(19) United States
(12) Patent Application Publication
(10) Pub. No.: US 2024/0392294 A1
(43) Pub. Date: Nov. 28, 2024

(54) IRNA COMPOSITIONS AND METHODS FOR SILENCING ANGIOTENSINOGEN (AGT)

(71) Applicant: Alnylam Pharmaceuticals, Inc., Cambridge, MA (US)

(72) Inventors: Paul Nioi, Cambridge, MA (US); James D. McIninch, Burlington, MA (US); Mark K. Schlegel, Boston, MA (US); Adam Castoreno, Framingham, MA (US); Joseph Barry, Arlington, MA (US)

(21) Appl. No.: 18/427,082

(22) Filed: Jan. 30, 2024

Related U.S. Application Data
(63) Continuation of application No. PCT/US2022/039242, filed on Aug. 3, 2022.
(60) Provisional application No. 63/272,769, filed on Oct. 28, 2021.
(60) Provisional application No. 63/229,085, filed on Aug. 4, 2021.

(51) Int. Cl. C12N 15/113; A61K 31/4178; A61K 31/4245

(52) U.S. Cl. CPC C12N 15/1136; A61K 31/4178; A61K 31/4245; C12N 2310/11; C12N 2310/3125; C12N 2310/315; C12N 2310/321; C12N 2310/322; C12N 2310/351

(57) ABSTRACT

The present invention relates to RNAi agents, e.g., double stranded RNA (dsRNA) agents, targeting an angiotensinogen (AGT) gene. The invention also relates to methods of using such RNAi agents to inhibit expression of an AGT gene and to methods of preventing and treating an AGT-associated disorder, e.g., hypertension.

### RELATED APPLICATIONS

[0001] This application is a 35 § U.S.C. 111 (a) continuation application which claims the benefit of priority to International Application No. PCT/US2022/039242, filed on Aug. 3, 2022, which, in turn, claims the benefit of priority to U.S. Provisional Application No. 63/229,085, filed on Aug. 4, 2021 and U.S. Provisional Application No. 63/272,769, filed on Oct. 28, 2021. The entire contents of each of the foregoing patent applications are incorporated herein by reference.

### SEQUENCE LISTING

[0002] The instant application contains a Sequence Listing which has been submitted electronically in XML file format via Patent Center and is hereby incorporated by reference in its entirety. Said XML copy, created on May 9, 2024, is named 121301_16003_SL.xml and is 26,673,326 bytes in size.

### BACKGROUND OF THE INVENTION

[0003] The renin-angiotensin-aldosterone system (RAAS) plays a crucial role in the regulation of blood pressure. The RAAS cascade begins with the release of angiotensinogen from the liver, and renin by the juxtaglomerular cells of the kidney into the circulation. Renin secretion is stimulated by several factors, including Na+ load in the distal tubule. β-sympathetic stimulation, or reduced renal perfusion. Active renin in the plasma cleaves angiotensinogen (produced by the liver) to angiotensin I, which is then converted by circulating and locally expressed angiotensin-converting enzyme (ACE) to angiotensin II. Most of the effects of angiotensin II on the RAAS are exerted by its binding to angiotensin II type 1 receptors (AT₁R), leading to arterial vasoconstriction, tubular and glomerular effects, such as enhanced Na+ reabsorption or modulation of glomerular filtration rate.

[0004] In addition, together with other stimuli such as adrenocorticotropin, anti-diuretic hormone, catecholamines, endothelin, serotonin, and levels of Mg2+ and K+, AT₁R stimulation leads to aldosterone release which, in turn, promotes Na+ and K+ excretion in the renal distal convoluted tubule.

[0005] Dysregulation of the RAAS leading to, for example, excessive angiotensin II production or AT₁R stimulation results in hypertension which can lead to, e.g., increased oxidative stress, promotion of inflammation, hypertrophy, and fibrosis in the heart, kidneys, and arteries, and result in, e.g., left ventricular fibrosis, arterial remodeling, and glomerulosclerosis.

[0006] Hypertension is the most prevalent, controllable disease in developed countries, affecting 20-50% of adult populations. Hypertension is a major risk factor for various diseases, disorders and conditions such as, shortened life expectancy, chronic kidney disease, stroke, myocardial infarction, heart failure, aneurysms (e.g. aortic aneurysm), peripheral artery disease, heart damage (e.g., heart enlargement or hypertrophy) and other cardiovascular related diseases, disorders, or conditions. In addition, hypertension has been shown to be an important risk factor for cardiovascular morbidity and mortality accounting for, or contributing to, 62% of all strokes and 49% of all cases of heart disease. In 2017, changes in the guidelines for diagnosis, prevention, and treatment of hypertension were developed providing goals for even lower blood pressure to further decrease risk of development of diseases and disorders associated with hypertension (see, e.g., Reboussin et al. Systematic Review for the 2017 ACC/AHA/AAPA/ABC/ACPM/AGS/APhA/ASH/ASPC/NMA/PCNA Guideline for the Prevention, Detection, Evaluation, and Management of High Blood Pressure in Adults: A Report of the American College of Cardiology/American Heart Association Task Force on Clinical Practice Guidelines. J Am Coll Cardiol. 2017 Nov. 7. pii: S0735-1097(17)41517-8. doi: 10.1016/j.jacc.2017.11.004; and Whelton et al. (2017 ACC/AHA/AAPA/ABC/ACPM/AGS/APhA/ASH/ASPC/NMA/PCNA Guideline for the Prevention, Detection, Evaluation, and Management of High Blood Pressure in Adults: A Report of the American College of Cardiology/American Heart Association Task Force on Clinical Practice Guidelines. J Am Coll Cardiol. 2017 Nov. 7. pii: S0735-1097(17)41519-1. doi: 10.1016/j.jacc.2017.11.006).

[0007] Despite the number of anti-hypertensive drugs available for treating hypertension, more than two-thirds of subjects are not controlled with one anti-hypertensive agent and require two or more anti-hypertensive agents selected from different drug classes. This further reduces the number of subjects with controlled blood pressure as adherence is reduced and side-effects are increased with increasing numbers of medications.

### SUMMARY OF THE INVENTION

[0008] The present invention provides iRNA compositions which effect the RNA-induced silencing complex (RISC)-mediated cleavage of RNA transcripts of a gene encoding angiotensinogen (AGT). The AGT gene may be within a cell, e.g., a cell within a subject, such as a human subject. The present invention also provides methods of using the iRNA compositions of the invention for inhibiting the expression of an AGT gene and/or for treating a subject who would benefit from inhibiting or reducing the expression of an AGT gene, e.g., a subject suffering or prone to suffering from an AGT-associated disorder, e.g., hypertension.

[0009] Accordingly, in an aspect, the invention provides a double stranded ribonucleic acid (dsRNA) agent for inhibiting expression of angiotensinogen (AGT) in a cell, wherein the dsRNA agent comprises a sense strand and an antisense strand forming a double stranded region, wherein the sense strand comprises at least 15, e.g., 15, 16, 17, 18, 19, or 20, contiguous nucleotides differing by no more than 0, 1, 2, or 3 nucleotides from the nucleotide sequence of SEQ ID NO:1 or SEQ ID NO:3 and the antisense strand comprises at least 15, e.g., 15, 16, 17, 18, 19, or 20, contiguous nucleotides differing by no more than 1, 2, or 3 nucleotides from the corresponding portion of the nucleotide sequence of SEQ ID NO:2 or SEQ ID NO:4.

[0010] In another aspect, the present invention provides a double stranded ribonucleic acid (dsRNA) for inhibiting expression of angiotensinogen (AGT) in a cell, wherein said dsRNA comprises a sense strand and an antisense strand forming a double stranded region, wherein the antisense strand comprises a region of complementarity to an mRNA encoding AGT, and wherein the region of complementarity comprises at least 15, e.g., 15, 16, 17, 18, 19, or 20, contiguous nucleotides differing by no more than 0, 1, 2, or 3 nucleotides from any one of the antisense nucleotide sequences in any one of Tables 2-7.

[0011] In one embodiment, the dsRNA agent comprises a sense strand comprising at least 15 contiguous nucleotides differing by no more than three nucleotides from any one of the nucleotide sequences of the sense strands in any one of Tables 2-7 and an antisense strand comprising at least 15 contiguous nucleotides differing by no more than three nucleotides from any one of the nucleotide sequences of the antisense strands in any one of Tables 2-7.

[0012] In one embodiment, the dsRNA agent comprises a sense strand comprising at least 15 contiguous nucleotides differing by no more than two nucleotides from any one of the nucleotide sequences of the sense strands in any one of Tables 2-7 and an antisense strand comprising at least 15 contiguous nucleotides differing by no more than two nucleotides from any one of the nucleotide sequences of the antisense strands in any one of Tables 2-7.

[0013] In one embodiment, the dsRNA agent comprises a sense strand comprising at least 15 contiguous nucleotides differing by no more than one nucleotide from any one of the nucleotide sequences of the sense strands in any one of Tables 2-7 and an antisense strand comprising at least 15 contiguous nucleotides differing by no more than one nucleotide from any one of the nucleotide sequences of the antisense strands in any one of Tables 2-7.

[0014] In one embodiment, the dsRNA agent comprises a sense strand comprising or consisting of a nucleotide sequence selected from the group consisting of any one of the nucleotide sequences of the sense strands in any one of Tables 2-7 and an antisense strand comprising or consisting of a nucleotide sequence selected from the group consisting of any one of the nucleotide sequences of the antisense strands in any one of Tables 2-7.

[0015] In one embodiment, the dsRNA agent comprises at least one modified nucleotide.

[0016] In one embodiment, substantially all of the nucleotides of the sense strand are modified nucleotides; substantially all of the nucleotides of the antisense strand are modified nucleotides; or substantially all of the nucleotides of the sense strand and substantially all of the nucleotides of the antisense strand are modified nucleotides.

[0017] In one embodiment, all of the nucleotides of the sense strand are modified nucleotides; all of the nucleotides of the antisense strand are modified nucleotides; or all of the nucleotides of the sense strand and all of the nucleotides of the antisense strand are modified nucleotides.

[0018] In one embodiment, at least one of the modified nucleotides is selected from the group consisting of a deoxy-nucleotide, a 3′-terminal deoxythimidine (dT) nucleotide, a 2′-O-methyl modified nucleotide, a 2′-fluoro modified nucleotide, a 2′-deoxy-modified nucleotide, a locked nucleotide, an unlocked nucleotide, a conformationally restricted nucleotide, a constrained ethyl nucleotide, an abasic nucleotide, a 2′-amino-modified nucleotide, a 2′-O-allyl-modified nucleotide, 2′-C-alkyl-modified nucleotide, 2′-hydroxly-modified nucleotide, a 2′-methoxyethyl modified nucleotide, a 2′-O-alkyl-modified nucleotide, a morpholino nucleotide, a phosphoramidate, a non-natural base comprising nucleotide, a tetrahydropyran modified nucleotide, a 1,5-anhydrohexitol modified nucleotide, a cyclohexenyl modified nucleotide, a nucleotide comprising a phosphorothioate group, a nucleotide comprising a methylphosphonate group, a vinyl phosphonate nucleotide, a nucleotide comprising a 5′-phosphate, a nucleotide comprising a 5′-phosphate mimic, a thermally destabilizing nucleotide, a glycol modified nucleotide (GNA), a nucleotide comprising a 2′ phosphate, and a 2-O—(N-methylacetamide) modified nucleotide; and combinations thereof.

[0019] In one embodiment, at least one of the modified nucleotides is selected from the group consisting of LNA, HNA, CeNA, 2′-methoxyethyl, 2′-O-alkyl, 2′-O-allyl, 2′-C-allyl, 2′-fluoro, 2′-deoxy, 2′-hydroxyl, and glycol; and combinations thereof.

[0020] In one embodiment, at least one of the modified nucleotides is selected from the group consisting of a deoxy-nucleotide, a 2′-O-methyl modified nucleotide, a 2′-fluoro modified nucleotide, a 2′-deoxy-modified nucleotide, a glycol modified nucleotide (GNA), e.g., Ggn, Cgn, Tgn, or Agn, a nucleotide with a 2′ phosphate, e.g., G2p, C2p, A2p or U2p, and a nucleotide comprising a phosphorothioate group, and combinations thereof.

[0021] In another embodiment, at least one of the modified nucleotides is a nucleotide with a thermally destabilizing nucleotide modification.

[0022] In one embodiment, the thermally destabilizing nucleotide modification is selected from the group consisting of an abasic modification; a mismatch with the opposing nucleotide in the duplex; a destabilizing sugar modification, a 2′-deoxy modification, an acyclic nucleotide, an unlocked nucleic acid (UNA), and a glycerol nucleic acid (GNA).

[0023] In some embodiments, the modified nucleotide comprises a short sequence of 3′-terminal deoxythimidine nucleotides (dT).

[0024] In some embodiments, the dsRNA agent further comprises at least one phosphorothioate internucleotide linkage. In some embodiments, the dsRNA agent comprises 6-8 phosphorothioate internucleotide linkages. In one embodiment, the phosphorothioate or methylphosphonate internucleotide linkage is at the 3′-terminus of one strand. Optionally, the strand is the antisense strand. In another embodiment, the strand is the sense strand. In a related embodiment, the phosphorothioate or methylphosphonate internucleotide linkage is at the 5′-terminus of one strand. Optionally, the strand is the antisense strand. In another embodiment, the strand is the sense strand. In another embodiment, the phosphorothioate or methylphosphonate internucleotide linkage is at the both the 5′- and 3′-terminus of one strand. Optionally, the strand is the antisense strand. In another embodiment, the strand is the sense strand.

[0025] The double stranded region may be 19-30 nucleotide pairs in length; 19-25 nucleotide pairs in length; 19-23 nucleotide pairs in length; 23-27 nucleotide pairs in length; or 21-23 nucleotide pairs in length.

[0026] In one embodiment, each strand is independently no more than 30 nucleotides in length.

[0027] In one embodiment, the sense strand is 21 nucleotides in length and the antisense strand is 23 nucleotides in length.

[0028] The region of complementarity may be at least 17 nucleotides in length; between 19 and 23 nucleotides in length; or 19 nucleotides in length.

[0029] In one embodiment, at least one strand comprises a 3′ overhang of at least 1 nucleotide. In another embodiment, at least one strand comprises a 3′ overhang of at least 2 nucleotides.

[0030] In one embodiment, the dsRNA agent further comprises a ligand.

[0031] In one embodiment, the ligand is conjugated to the 3′ end of the sense strand of the dsRNA agent.

[0032] In one embodiment, the ligand is an N-acetylgalactosamine (GalNAc) derivative.

[0033] In one embodiment, the ligand is one or more GalNAc derivatives attached through a monovalent, bivalent, or trivalent branched linker.

[0034] In one embodiment, the ligand is

[chemical structure]

[0035] In one embodiment, the dsRNA agent is conjugated to the ligand as shown in the following schematic

[chemical structure]

and, wherein X is O or S.

[0036] In one embodiment, the X is O.

[0037] In one embodiment, the dsRNA agent further comprises at least one phosphorothioate or methylphosphonate internucleotide linkage.

[0038] In one embodiment, the phosphorothioate or methylphosphonate internucleotide linkage is at the 3′-terminus of one strand, e.g., the antisense strand or the sense strand.

[0039] In another embodiment, the phosphorothioate or methylphosphonate internucleotide linkage is at the 5′-terminus of one strand, e.g., the antisense strand or the sense strand.

[0040] In one embodiment, the phosphorothioate or methylphosphonate internucleotide linkage is at the both the 5′- and 3′-terminus of one strand. In one embodiment, the strand is the antisense strand.

[0041] In one embodiment, the base pair at the 1 position of the 5′-end of the antisense strand of the duplex is an AU base pair.

[0042] The present invention also provides cells containing any of the dsRNA agents of the invention and pharmaceutical compositions comprising any of the dsRNA agents of the invention.

[0043] The pharmaceutical composition of the invention may include dsRNA agent in an unbuffered solution, e.g., saline or water, or the pharmaceutical composition of the invention may include the dsRNA agent is in a buffer solution, e.g., a buffer solution comprising acetate, citrate, prolamine, carbonate, or phosphate or any combination thereof; or phosphate buffered saline (PBS).

[0044] In one aspect, the present invention provides a method of inhibiting expression of an angiotensinogen (AGT) gene in a cell. The method includes contacting the cell with any of the dsRNAs of the invention or any of the pharmaceutical compositions of the invention, thereby inhibiting expression of the AGT gene in the cell.

[0045] In one embodiment, the cell is within a subject, e.g., a human subject, e.g., a subject having a angiotensinogen (AGT)-associated disorder, such as high blood pressure, hypertension, borderline hypertension, primary hypertension, secondary hypertension isolated systolic or diastolic hypertension, pregnancy-associated hypertension, diabetic hypertension, resistant hypertension, refractory hypertension, paroxysmal hypertension, renovascular hypertension, Goldblatt hypertension, ocular hypertension, glaucoma, pulmonary hypertension, portal hypertension, systemic venous hypertension, systolic hypertension, labile hypertension; hypertensive heart disease, hypertensive nephropathy, atherosclerosis, arteriosclerosis, vasculopathy, diabetic nephropathy, diabetic retinopathy, chronic heart failure, cardiomyopathy, diabetic cardiac myopathy, glomerulosclerosis, coarctation of the aorta, aortic aneurism, ventricular fibrosis, heart failure, myocardial infarction, angina, stroke, renal disease, renal failure, systemic sclerosis, intrauterine growth restriction (IUGR), fetal growth restriction, obesity, liver steatosis/fatty liver, non-alcoholic Steatohepatitis (NASH), non-alcoholic fatty liver disease (NAFLD); glucose intolerance, type 2 diabetes (non-insulin dependent diabetes), and metabolic syndrome.

[0046] In certain embodiments, the subject has a systolic blood pressure of at least 130 mm Hg or a diastolic blood pressure of at least 80 mm Hg. In certain embodiments, the subject has a systolic blood pressure of at least 140 mm Hg and a diastolic blood pressure of at least 80 mm Hg. In certain embodiments, the subject is part of a group susceptible to salt sensitivity, is overweight, is obese, or is pregnant.

[0047] In certain embodiments, contacting the cell with the dsRNA agent inhibits the expression of AGT by at least 50%, 60%, 70%, 80%, 90%, 95% (e.g., as compared to the level of expression of AGT prior to first contacting the cell with the dsRNA agent; e.g., prior to administration of a first dose of the dsRNA agent to the subject). In certain embodiments, inhibiting expression of AGT decreases an AGT protein level in a subject serum sample(s) by at least 50%, 60%, 70%, 80%, 90%, or 95%, e.g., as compared to the level of expression of AGT prior to first contacting the cell with the dsRNA agent.

[0048] In one aspect, the present invention provides a method of treating a subject having a disorder that would benefit from reduction in angiotensinogen (AGT) expression. The method includes administering to the subject a therapeutically effective amount of any of the dsRNAs of the invention or any of the pharmaceutical compositions of the invention, thereby treating the subject having the disorder that would benefit from reduction in AGT expression.

[0049] In another aspect, the present invention provides a method of preventing at least one symptom in a subject having a disorder that would benefit from reduction in angiotensinogen (AGT) expression. The method includes administering to the subject a prophylactically effective amount of any of the dsRNAs of the invention or any of the pharmaceutical compositions of the invention, thereby preventing at least one symptom in the subject having the disorder that would benefit from reduction in AGT expression.

[0050] In certain embodiments, the disorder is an angiotensinogen (AGT)-associated disorder.

[0051] In certain embodiments, the subject has a systolic blood pressure of at least 130 mm Hg or a diastolic blood pressure of at least 80 mm Hg. In certain embodiments, the subject has a systolic blood pressure of at least 140 mm Hg and diastolic blood pressure of at least 80 mm Hg. In certain embodiments, the subject is human. In certain embodiments, subject is part of a group susceptible to salt sensitivity, is overweight, is obese, or is pregnant.

[0052] In some embodiments, the AGT-associated disorder is selected from the group consisting of high blood pressure, hypertension, borderline hypertension, primary hypertension, secondary hypertension isolated systolic or diastolic hypertension, pregnancy-associated hypertension, diabetic hypertension, resistant hypertension, refractory hypertension, paroxysmal hypertension, renovascular hypertension, Goldblatt hypertension, ocular hypertension, glaucoma, pulmonary hypertension, portal hypertension, systemic venous hypertension, systolic hypertension, labile hypertension; hypertensive heart disease, hypertensive nephropathy, atherosclerosis, arteriosclerosis, vasculopathy, diabetic nephropathy, diabetic retinopathy, chronic heart failure, cardiomyopathy, diabetic cardiac myopathy, glomerulosclerosis, coarctation of the aorta, aortic aneurism, ventricular fibrosis, heart failure, myocardial infarction, angina, stroke, renal disease, renal failure, systemic sclerosis, intrauterine growth restriction (IUGR), fetal growth restriction, obesity, liver steatosis/fatty liver, non-alcoholic Steatohepatitis (NASH), non-alcoholic fatty liver disease (NAFLD); glucose intolerance, type 2 diabetes (non-insulin dependent diabetes), and metabolic syndrome.

[0053] In a further aspect, the present invention also provides methods of inhibiting the expression of angiotensinogen (AGT) in a subject. The methods include administering to the subject a therapeutically effective amount of any of the dsRNAs provided herein, thereby inhibiting the expression of AGT in the subject.

[0054] In one embodiment, the subject is human.

[0055] In one embodiment, administration of the dsRNA agent to the subject causes a decrease in AGT protein accumulation in the subject.

[0056] In one embodiment, the dsRNA agent is administered to the subject at a dose of about 0.01 mg/kg to about 50 mg/kg.

[0057] In one embodiment, the dsRNA agent is administered to the subject subcutaneously.

[0058] In one embodiment, the methods of the invention further include determining the level of AGT in the subject sample(s) is an AGT protein level in a blood or a serum or a urine or a liver tissue sample(s).

[0059] In some embodiments, the methods of the invention further include determining the level of bradykinin; prekallikrein, or blood pressure in the subject.

[0060] In certain embodiments, the methods of the invention further comprise administering to the subject an additional therapeutic agent.

[0061] In certain embodiments, the additional therapeutic agent is selected from the group consisting of a diuretic, an angiotensin converting enzyme (ACE) inhibitor, an angiotensin II receptor antagonist, a beta-blocker, a vasodialator, a calcium channel blocker, an aldosterone antagonist, an alpha2-agonist, a renin inhibitor, an alpha-blocker, a peripheral acting adrenergic agent, a selective D1 receptor partial agonist, a nonselective alpha-adrenergic antagonist, a synthetic, and steroidal antimineralocorticoid agent; or a combination of any of the foregoing, and a hypertension therapeutic agent formulated as a combination of agents. In certain embodiments, the additional therapeutic agent comprises an angiotensin II receptor antagonist, e.g., losartan, valsartan, olmesartan, eprosartan, and azilsartan. In certain embodiments, the additional therapeutic agent is an angiotensin receptor-neprilysin inhibitor (ARNi), e.g., Entresto®, sacubitril/valsartan; or an endothelin receptor antagonist (ERA), e.g., sitaxentan, ambrisentan, atrasentan, BQ-123, zibotentan, bosentan, macitentan, and tezosentan.

[0062] The present invention also provides kits comprising any of the dsRNAs of the invention or any of the pharmaceutical compositions of the invention, and optionally, instructions for use. In one embodiment, the invention provides a kit for performing a method of inhibiting expression of an AGT gene in a cell by contacting a cell with a double stranded RNAi agent of the invention in an amount effective to inhibit expression of the AGT in the cell. The kit comprises an RNAi agent and instructions for use and, optionally, means for administering the RNAi agent to a subject.

[0063] The present invention also provides vials comprising the dsRNA agent of the invention or the pharmaceutical composition of the invention. The present invention further provides syringes comprising the dsRNA agent of the invention or the pharmaceutical composition of the invention.

[0064] The present invention further provides an RNA-induced silencing complex (RISC) comprising an antisense strand of any of the dsRNA agents of the invention.

[0065] In one embodiment, the RNAi agent is a pharmaceutically acceptable salt thereof. “Pharmaceutically acceptable salts” of each of RNAi agents herein include, but are not limited to, a sodium salt, a calcium salt, a lithium salt, a potassium salt, an ammonium salt, a magnesium salt, an mixtures thereof. One skilled in the art will appreciate that the RNAi agent, when provided as a polycationic salt having one cation per free acid group of the optionally modified phosophodiester backbone and/or any other acidic modifications (e.g., 5′-terminal phosphonate groups). For example, an oligonucleotide of “n” nucleotides in length contains n-1 optionally modified phosophodiesters, so that an oligonucleotide of 21 nt in length may be provided as a salt having up to 20 cations (e.g. 20 sodium cations). Similarly, an RNAi agents having a sense strand of 21 nt in length and an antisense strand of 23 nt in length may be provided as a salt having up to 42 cations (e.g. 42 sodium cations). In the preceding example, where the RNAi agent also includes a 5′-terminal phosphate or a 5′-terminal vinylphosphonate group, the RNAi agent may be provided as a salt having up to 44 cations (e.g, 44 sodium cations).

[0066] The present invention is further illustrated by the following detailed description.

### DETAILED DESCRIPTION OF THE INVENTION

[0067] The present invention provides iRNA compositions which effect the RNA-induced silencing complex (RISC)-mediated cleavage of RNA transcripts of an angiotensinogen (AGT) gene. The gene may be within a cell, e.g., a cell within a subject, such as a human. The use of these iRNAs enables the targeted degradation of mRNAs of the corresponding gene (AGT) in mammals.

[0068] The iRNAs of the invention have been designed to target the human angiotensinogen (AGT) gene, including portions of the gene that are conserved in the AGT orthologs of other mammalian species. Without intending to be limited by theory, it is believed that a combination or sub-combination of the foregoing properties and the specific target sites or the specific modifications in these iRNAs confer to the iRNAs of the invention improved efficacy, stability, potency, durability, and safety.

[0069] Accordingly, the present invention provides methods for treating and preventing an angiotensinogen (AGT)-associated disorder, e.g., high blood pressure, hypertension, borderline hypertension, primary hypertension, secondary hypertension isolated systolic or diastolic hypertension, pregnancy-associated hypertension, diabetic hypertension, resistant hypertension, refractory hypertension, paroxysmal hypertension, renovascular hypertension, Goldblatt hypertension, ocular hypertension, glaucoma, pulmonary hypertension, portal hypertension, systemic venous hypertension, systolic hypertension, labile hypertension; hypertensive heart disease, hypertensive nephropathy, atherosclerosis, arteriosclerosis, vasculopathy, diabetic nephropathy, diabetic retinopathy, chronic heart failure, cardiomyopathy, diabetic cardiac myopathy, glomerulosclerosis, coarctation of the aorta, aortic aneurism, ventricular fibrosis, heart failure, myocardial infarction, angina, stroke, renal disease, renal failure, systemic sclerosis, intrauterine growth restriction (IUGR), fetal growth restriction, obesity, liver steatosis/fatty liver, non-alcoholic Steatohepatitis (NASH), non-alcoholic fatty liver disease (NAFLD); glucose intolerance, type 2 diabetes (non-insulin dependent diabetes), and metabolic syndrome, using iRNA compositions which effect the RNA-induced silencing complex (RISC)-mediated cleavage of RNA transcripts of an AGT gene.

[0070] The iRNAs of the invention include an RNA strand (the antisense strand) having a region which is up to about 30 nucleotides or less in length, e.g., 19-30, 19-29, 19-28, 19-27, 19-26, 19-25, 19-24, 19-23, 19-22, 19-21, 19-20, 20-30, 20-29, 20-28, 20-27, 20-26, 20-25, 20-24,20-23, 20-22, 20-21, 21-30, 21-29, 21-28, 21-27, 21-26, 21-25, 21-24, 21-23, or 21-22 nucleotides in length, which region is substantially complementary to at least part of an mRNA transcript of an AGT gene.

[0071] In certain embodiments, one or both of the strands of the double stranded RNAi agents of the invention is up to 66 nucleotides in length, e.g., 36-66, 26-36, 25-36, 31-60, 22-43, 27-53 nucleotides in length, with a region of at least 19 contiguous nucleotides that is substantially complementary to at least a part of an mRNA transcript of an AGT gene. In some embodiments, such iRNA agents having longer length antisense strands may, for example, include a second RNA strand (the sense strand) of 20-60 nucleotides in length wherein the sense and antisense strands form a duplex of 18-30 contiguous nucleotides.

[0072] The use of iRNAs of the invention enables the targeted degradation of mRNAs of the corresponding gene (AGT gene) in mammals. Using in vitro assays, the present inventors have demonstrated that iRNAs targeting an AGT gene can potently mediate RNAi, resulting in significant inhibition of expression of an AGT gene. Thus, methods and compositions including these iRNAs are useful for treating a subject having an AGT-associated disorder, e.g., high blood pressure, hypertension, borderline hypertension, primary hypertension, secondary hypertension isolated systolic or diastolic hypertension, pregnancy-associated hypertension, diabetic hypertension, resistant hypertension, refractory hypertension, paroxysmal hypertension, renovascular hypertension, Goldblatt hypertension, hypertension associated with low plasma renin activity or plasma renin concentration, ocular hypertension, glaucoma, pulmonary hypertension, portal hypertension, systemic venous hypertension, systolic hypertension, labile hypertension; hypertensive heart disease, hypertensive nephropathy, atherosclerosis, arteriosclerosis, vasculopathy, diabetic nephropathy, diabetic retinopathy, chronic heart failure, cardiomyopathy, diabetic cardiac myopathy, glomerulosclerosis, coarctation of the aorta, aortic aneurism, ventricular fibrosis, heart failure, myocardial infarction, angina, stroke, renal disease, renal failure, systemic sclerosis, intrauterine growth restriction (IUGR), fetal growth restriction, obesity, liver steatosis/fatty liver, non-alcoholic Steatohepatitis (NASH), non-alcoholic fatty liver disease (NAFLD); glucose intolerance, type 2 diabetes (non-insulin dependent diabetes), and metabolic syndrome.

[0073] Accordingly, the present invention provides methods and combination therapies for treating a subject having a disorder that would benefit from inhibiting or reducing the expression of an AGT gene, e.g., an angiotensinogenI (AGT)-associated disorder, such as high blood pressure, hypertension, borderline hypertension, primary hypertension, secondary hypertension isolated systolic or diastolic hypertension, pregnancy-associated hypertension, diabetic hypertension, resistant hypertension, refractory hypertension, paroxysmal hypertension, renovascular hypertension, Goldblatt hypertension, ocular hypertension, glaucoma, pulmonary hypertension, portal hypertension, systemic venous hypertension, systolic hypertension, labile hypertension; hypertensive heart disease, hypertensive nephropathy, atherosclerosis, arteriosclerosis, vasculopathy, diabetic nephropathy, diabetic retinopathy, chronic heart failure, cardiomyopathy, diabetic cardiac myopathy, glomerulosclerosis, coarctation of the aorta, aortic aneurism, ventricular fibrosis, heart failure, myocardial infarction, angina, stroke, renal disease, renal failure, systemic sclerosis, intrauterine growth restriction (IUGR), fetal growth restriction, obesity, liver steatosis/fatty liver, non-alcoholic Steatohepatitis (NASH), non-alcoholic fatty liver disease (NAFLD); glucose intolerance, type 2 diabetes (non-insulin dependent diabetes), and metabolic syndrome, using iRNA compositions which effect the RNA-induced silencing complex (RISC)-mediated cleavage of RNA transcripts of an AGT gene.

[0074] The present invention also provides methods for preventing at least one symptom in a subject having a disorder that would benefit from inhibiting or reducing the expression of an AGT gene, e.g., an angiotensinogen (AGT)-associated disorder, such as high blood pressure, hypertension, borderline hypertension, primary hypertension, secondary hypertension isolated systolic or diastolic hypertension, pregnancy-associated hypertension, diabetic hypertension, resistant hypertension, refractory hypertension, paroxysmal hypertension, renovascular hypertension, Goldblatt hypertension, ocular hypertension, glaucoma, pulmonary hypertension, portal hypertension, systemic venous hypertension, systolic hypertension, labile hypertension; hypertensive heart disease, hypertensive nephropathy, atherosclerosis, arteriosclerosis, vasculopathy, diabetic nephropathy, diabetic retinopathy, chronic heart failure, cardiomyopathy, diabetic cardiac myopathy, glomerulosclerosis, coarctation of the aorta, aortic aneurism, ventricular fibrosis, heart failure, myocardial infarction, angina, stroke, renal disease, renal failure, systemic sclerosis, intrauterine growth restriction (IUGR), fetal growth restriction, obesity, liver steatosis/fatty liver, non-alcoholic Steatohepatitis (NASH), non-alcoholic fatty liver disease (NAFLD); glucose intolerance, type 2 diabetes (non-insulin dependent diabetes), and metabolic syndrome.

[0075] The following detailed description discloses how to make and use compositions containing iRNAs to inhibit the expression of an AGT gene as well as compositions, uses, and methods for treating subjects that would benefit from inhibition and/or reduction of the expression of an AGT gene, e.g., subjects susceptible to or diagnosed with an AGT-associated disorder.

### I. Definitions

[0076] In order that the present invention may be more readily understood, certain terms are first defined. In addition, it should be noted that whenever a value or range of values of a parameter are recited, it is intended that values and ranges intermediate to the recited values are also intended to be part of this invention.

[0077] The articles “a” and “an” are used herein to refer to one or to more than one (i.e., to at least one) of the grammatical object of the article. By way of example, “an element” means one element or more than one element, e.g., a plurality of elements.

[0078] The term “including” is used herein to mean, and is used interchangeably with, the phrase “including but not limited to”.

[0079] The term “or” is used herein to mean, and is used interchangeably with, the term “and/or,” unless context clearly indicates otherwise. For example, “sense strand or antisense strand” is understood as “sense strand or antisense strand or sense strand and antisense strand.”

[0080] The term “about” is used herein to mean within the typical ranges of tolerances in the art. For example, “about” can be understood as about 2 standard deviations from the mean. In certain embodiments, about means±10%. In certain embodiments, about means±5%. When about is present before a series of numbers or a range, it is understood that “about” can modify each of the numbers in the series or range.

[0081] The term “at least”, “no less than”, or “or more” prior to a number or series of numbers is understood to include the number adjacent to the term “at least”, and all subsequent numbers or integers that could logically be included, as clear from context. For example, the number of nucleotides in a nucleic acid molecule must be an integer. For example, “at least 19 nucleotides of a 21 nucleotide nucleic acid molecule” means that 19, 20, or 21 nucleotides have the indicated property. When at least is present before a series of numbers or a range, it is understood that “at least” can modify each of the numbers in the series or range.

[0082] As used herein, “no more than” or “or less” is understood as the value adjacent to the phrase and logical lower values or integers, as logical from context, to zero. For example, a duplex with an overhang of “no more than 2 nucleotides” has a 2, 1, or 0 nucleotide overhang. When “no more than” is present before a series of numbers or a range, it is understood that “no more than” can modify each of the numbers in the series or range. As used herein, ranges include both the upper and lower limit.

[0083] As used herein, methods of detection can include determination that the amount of analyte present is below the level of detection of the method.

[0084] In the event of a conflict between an indicated target site and the nucleotide sequence for a sense or antisense strand, the indicated sequence takes precedence.

[0085] In the event of a conflict between a sequence and its indicated site on a transcript or other sequence, the nucleotide sequence recited in the specification takes precedence.

[0086] As used herein, “angiotensinogen,” used interchangeably with the term “AGT” refers to the well-known gene and polypeptide, also known in the art as Serpin Peptidase Inhibitor, Clade A, Member 8; Alpha-1 Antiproteinase; Antitrypsin; SERPINA8; Angiotensin I; Serpin A8; Angiotensin II; Alpha-1 Antiproteinase angiotensinogen; antitrypsin; pre-angiotensinogen2; ANHU; Serine Proteinase Inhibitor; and Cysteine Proteinase Inhibitor.

[0087] The sequence of a human AGT mRNA transcript can be found at, for example, GenBank Accession No. GI: 1813757520 (NM_000505.4; SEQ ID NO: 1; reverse complement, SEQ ID NO: 2) and NM_001384479.1 (SEQ ID NO:3; reverse complement, SEQ ID NO:4). The sequence of Macaca fascicularis AGT mRNA can be found at, for example, GenBank Accession No. GI: 90075391 (NM_000029.1; SEQ ID NO:5; reverse complement, SEQ ID NO:6). The sequence of mouse AGT mRNA can be found at, for example, GenBank Accession No. GI: 113461997 (NM_007428.3; SEQ ID NO:7; reverse complement. SEQ ID NO:8). The sequence of rat AGT mRNA can be found at, for example, GenBank Accession No. GI: 51036672 (NM_134432.2; SEQ ID NO: 9; reverse complement, SEQ ID NO: 10). The sequence of Macaca mulatta AGT mRNA can be found at, for example, GenBank XM_015126038 (SEQ ID NO:11; reverse complement, SEQ ID NO: 12).

[0088] Additional examples of AGT mRNA sequences are readily available through publicly available databases, e.g., GenBank, UniProt, OMIM, and the Macaca genome project web site. Further information on AGT can be found, for example, at www.ncbi.nlm.nih.gov/gene/?term=AGT.

[0089] The entire contents of each of the foregoing GenBank Accession numbers and the Gene database numbers are incorporated herein by reference as of the date of filing this application.

[0090] The term “AGT.” as used herein, also refers to naturally occurring DNA sequence variations of the AGT gene, such as a single nucleotide polymorphism (SNP) in the AGT gene. Exemplary SNPs may be found in the dbSNP database available at www.ncbi.nlm.nih.gov/projects/SNP/snp-_ref.cgi?geneld=183. Non-limiting examples of sequence variations within the AGT gene include, for example, those described in U.S. Pat. No. 5,589,584, the entire contents of which are incorporated herein by reference. For example, sequence variations within the AGT gene may include as a C→T at position-532 (relative to the transcription start site); a G→A at position-386; a G→A at position-218; a C→T at position-18; a G→A and a A→C at position-6 and -10; a C→T at position +10 (untanslated): a C→T at position +521 (T174M); a T→C at position +597 (P199P): a T→C at position +704 (M235T; also see, e.g., Reference SNP (refSNP) Cluster Report: rs699, available at www.ncbi.nlm.nih.gov/SNP); a A→G at position +743 (Y248C); a C→T at position +813 (N27 IN): a G→A at position +1017 (L339L): a C→A at position +1075 (L359M); and/or a G→A at position +1162 (V388M).

[0091] As used herein, “target sequence” refers to a contiguous portion of the nucleotide sequence of an mRNA molecule formed during the transcription of an AGT gene, including mRNA that is a product of RNA processing of a primary transcription product. In one embodiment, the target portion of the sequence will be at least long enough to serve as a substrate for iRNA-directed cleavage at or near that portion of the nucleotide sequence of an mRNA molecule formed during the transcription of an AGTgene.

[0092] The target sequence may be from about 19-36 nucleotides in length, e.g., about 19-30 nucleotides in length. For example, the target sequence can be about 19-30 nucleotides, 19-30, 19-29, 19-28, 19-27, 19-26, 19-25, 19-24, 19-23, 19-22, 19-21, 19-20, 20-30, 20-29, 20-28, 20-27, 20-26, 20-25, 20-24, 20-23, 20-22, 20-21, 21-30, 21-29, 21-28, 21-27, 21-26, 21-25, 21-24, 21-23, or 21-22 nucleotides in length. In certain embodiments, the target sequence is 19-23 nucleotides in length, optionally 21-23 nucleotides in length. Ranges and lengths intermediate to the above recited ranges and lengths are also contemplated to be part of the disclosure.

[0093] As used herein, the term “strand comprising a sequence” refers to an oligonucleotide comprising a chain of nucleotides that is described by the sequence referred to using the standard nucleotide nomenclature.

[0094] “G,” “C,” “A,” “T,” and “U” each generally stand for a nucleotide that contains guanine, cytosine, adenine, thymidine, and uracil as a base, respectively. However, it will be understood that the term “ribonucleotide” or “nucleotide” can also refer to a modified nucleotide, as further detailed below, or a surrogate replacement moiety (see, e.g., Table 1). The skilled person is well aware that guanine, cytosine, adenine, and uracil can be replaced by other moieties without substantially altering the base pairing properties of an oligonucleotide comprising a nucleotide bearing such replacement moiety. For example, without limitation, a nucleotide comprising inosine as its base can base pair with nucleotides containing adenine, cytosine, or uracil. Hence, nucleotides containing uracil, guanine, or adenine can be replaced in the nucleotide sequences of dsRNA featured in the invention by a nucleotide containing, for example, inosine. In another example, adenine and cytosine anywhere in the oligonucleotide can be replaced with guanine and uracil, respectively to form G-U Wobble base pairing with the target mRNA. Sequences containing such replacement moieties are suitable for the compositions and methods featured in the invention.

[0095] The terms “iRNA”, “RNAi agent,” “iRNA agent,”, “RNA interference agent” as used interchangeably herein, refer to an agent that contains RNA as that term is defined herein, and which mediates the targeted cleavage of an RNA transcript via an RNA-induced silencing complex (RISC) pathway. iRNA directs the sequence-specific degradation of mRNA through a process known as RNA interference (RNAi). The iRNA modulates, e.g., inhibits, the expression of an AGT gene in a cell, e.g., a liver cell within a subject, such as a mammalian subject.

[0096] In one embodiment, an RNAi agent of the invention includes a single stranded RNA that interacts with a target RNA sequence, e.g., an AGT target mRNA sequence, to direct the cleavage of the target RNA. Without wishing to be bound by theory it is believed that long double stranded RNA introduced into cells is broken down into siRNA by a Type III endonuclease known as Dicer (Sharp et al. (2001) Genes Dev. 15:485). Dicer, a ribonuclease-III-like enzyme, processes the dsRNA into 19-23 base pair short interfering RNAs with characteristic two base 3′ overhangs (Bernstein, et al., (2001) Nature 409:363). The siRNAs are then incorporated into an RNA-induced silencing complex (RISC) where one or more helicases unwind the siRNA duplex, enabling the complementary antisense strand to guide target recognition (Nykanen, et al., (2001) Cell 107:309). Upon binding to the appropriate target mRNA, one or more endonucleases within the RISC cleave the target to induce silencing (Elbashir, et al., (2001) Genes Dev. 15:188). Thus, in one aspect the invention relates to a single stranded RNA (siRNA) generated within a cell and which promotes the formation of a RISC complex to effect silencing of the target gene, i.e., an AGT gene. Accordingly, the term “siRNA” is also used herein to refer to an iRNA as described above.

[0097] In certain embodiments, the RNAi agent may be a single-stranded siRNA (ssRNAi) that is introduced into a cell or organism to inhibit a target mRNA. Single-stranded RNAi agents bind to the RISC endonuclease, Argonaute 2, which then cleaves the target mRNA. The single-stranded siRNAs are generally 15-30 nucleotides and are chemically modified. The design and testing of single-stranded siRNAs are described in U.S. Pat. No. 8,101,348 and in Lima et al., (2012) Cell 150:883-894, the entire contents of each of which are hereby incorporated herein by reference. Any of the antisense nucleotide sequences described herein may be used as a single-stranded siRNA as described herein or as chemically modified by the methods described in Lima et al., (2012) Cell 150:883-894.

[0098] In certain embodiments, an “IRNA” for use in the compositions, uses, and methods of the invention is a double stranded RNA and is referred to herein as a “double stranded RNA agent,” “double stranded RNA (dsRNA) molecule,” “dsRNA agent,” or “dsRNA”. The term “dsRNA”, refers to a complex of ribonucleic acid molecules, having a duplex structure comprising two anti-parallel and substantially complementary nucleic acid strands, referred to as having “sense” and “antisense” orientations with respect to a target RNA, i.e., an AGT gene. In some embodiments of the invention, a double stranded RNA (dsRNA) triggers the degradation of a target RNA, e.g., an mRNA, through a post-transcriptional gene-silencing mechanism referred to herein as RNA interference or RNAi.

[0099] In general, the majority of nucleotides of each strand of a dsRNA molecule are ribonucleotides, but as described in detail herein, each or both strands can also include one or more non-ribonucleotides, e.g., a deoxyribonucleotide or a modified nucleotide. In addition, as used in this specification, an “iRNA” may include ribonucleotides with chemical modifications; an iRNA may include substantial modifications at multiple nucleotides. As used herein, the term “modified nucleotide” refers to a nucleotide having, independently, a modified sugar moiety, a modified internucleotide linkage, or modified nucleobase, or any combination thereof. Thus, the term modified nucleotide encompasses substitutions, additions or removal of, e.g., a functional group or atom, to internucleoside linkages, sugar moieties, or nucleobases. The modifications suitable for use in the agents of the invention include all types of modifications disclosed herein or known in the art. Any such modifications, as used in a siRNA type molecule, are encompassed by “iRNA” or “RNAi agent” for the purposes of this specification and claims.

[0100] In certain embodiments of the instant disclosure, inclusion of a deoxy-nucleotide if present within an RNAi agent can be considered to constitute a modified nucleotide.

[0101] The duplex region may be of any length that permits specific degradation of a desired target RNA through a RISC pathway, and may range from about 19 to 36 base pairs in length, e.g., about 19-30 base pairs in length, for example, about 9, 10, 11, 12, 13, 14, 15, 16, 17, 18, 19, 20, 21, 22, 23, 24, 25, 26, 27, 28, 29, 30, 31, 32, 33, 34, 35, or 36 base pairs in length, such as about 19-30, 19-29, 19-28, 19-27, 19-26, 19-25, 19-24, 19-23, 19-22, 19-21, 19-20, 20-30, 20-29, 20-28, 20-27, 20-26, 20-25, 20-24,20-23, 20-22, 20-21, 21-30, 21-29, 21-28, 21-27, 21-26, 21-25, 21-24, 21-23, or 21-22 base pairs in length. In certain embodiments, the duplex region is 19-21 base pairs in length, e.g., 21 base pairs in length. Ranges and lengths intermediate to the above recited ranges and lengths are also contemplated to be part of the disclosure.

[0102] The two strands forming the duplex structure may be different portions of one larger RNA molecule, or they may be separate RNA molecules. Where the two strands are part of one larger molecule, and therefore are connected by an uninterrupted chain of nucleotides between the 3′-end of one strand and the 5′-end of the respective other strand forming the duplex structure, the connecting RNA chain is referred to as a “hairpin loop.” A hairpin loop can comprise at least one unpaired nucleotide. In some embodiments, the hairpin loop can comprise at least 2, 3, 4, 5, 6, 7, 8, 9, 10, 20, 23 or more unpaired nucleotides. In some embodiments, the hairpin loop can be 10 or fewer nucleotides. In some embodiments, the hairpin loop can be 8 or fewer unpaired nucleotides. In some embodiments, the hairpin loop can be 4-10 unpaired nucleotides. In some embodiments, the hairpin loop can be 4-8 nucleotides.

[0103] Where the two substantially complementary strands of a dsRNA are comprised by separate RNA molecules, those molecules need not be, but can be covalently connected. Where the two strands are connected covalently by means other than an uninterrupted chain of nucleotides between the 3′-end of one strand and the 5′-end of the respective other strand forming the duplex structure, the connecting structure is referred to as a “linker.” The RNA strands may have the same or a different number of nucleotides. The maximum number of base pairs is the number of nucleotides in the shortest strand of the dsRNA minus any overhangs that are present in the duplex. In addition to the duplex structure, an RNAi may comprise one or more nucleotide overhangs. In one embodiment of the RNAi agent, at least one strand comprises a 3′ overhang of at least 1 nucleotide. In another embodiment, at least one strand comprises a 3′ overhang of at least 2 nucleotides, e.g., 2, 3, 4, 5, 6, 7, 9, 10, 11, 12, 13, 14, or 15 nucleotides. In other embodiments, at least one strand of the RNAi agent comprises a 5′ overhang of at least 1 nucleotide. In certain embodiments, at least one strand comprises a 5′ overhang of at least 2 nucleotides, e.g., 2, 3, 4, 5, 6, 7, 9, 10, 11, 12, 13, 14, or 15 nucleotides. In still other embodiments, both the 3′ and the 5′ end of one strand of the RNAi agent comprise an overhang of at least 1 nucleotide.

[0104] In certain embodiments, an iRNA agent of the invention is a dsRNA, each strand of which comprises 19-23 nucleotides, that interacts with a target RNA sequence, e.g., an AGT gene, to direct cleavage of the target RNA.

[0105] In some embodiments, an iRNA of the invention is a dsRNA of 24-30 nucleotides that interacts with a target RNA sequence, e.g., an AGT target mRNA sequence, to direct the cleavage of the target RNA.

[0106] As used herein, the term “nucleotide overhang” refers to at least one unpaired nucleotide that protrudes from the duplex structure of a double stranded iRNA. For example, when a 3′-end of one strand of a dsRNA extends beyond the 5′-end of the other strand, or vice versa, there is a nucleotide overhang. A dsRNA can comprise an overhang of at least one nucleotide; alternatively the overhang can comprise at least two nucleotides, at least three nucleotides, at least four nucleotides, at least five nucleotides or more. A nucleotide overhang can comprise or consist of a nucleotide/nucleoside analog, including a deoxynucleotide/nucleoside. The overhang(s) can be on the sense strand, the antisense strand, or any combination thereof. Furthermore, the nucleotide(s) of an overhang can be present on the 5′-end, 3′-end, or both ends of either an antisense or sense strand of a dsRNA.

[0107] In one embodiment, the antisense strand of a dsRNA has a 1-10 nucleotide, e.g., a 1, 2, 3, 4, 5, 6, 7, 8, 9, or 10 nucleotide, overhang at the 3′-end or the 5′-end. In one embodiment, the sense strand of a dsRNA has a 1-10 nucleotide, e.g., a 1, 2, 3, 4, 5, 6, 7, 8, 9, or 10 nucleotide, overhang at the 3′-end or the 5′-end. In another embodiment, one or more of the nucleotides in the overhang is replaced with a nucleoside thiophosphate.

[0108] In certain embodiments, the antisense strand of a dsRNA has a 1-10 nucleotide, e.g., 0-3, 1-3, 2-4, 2-5, 4-10, 5-10, e.g., a 1, 2, 3, 4, 5, 6, 7, 8, 9, or 10 nucleotide, overhang at the 3′-end or the 5′-end. In one embodiment, the sense strand of a dsRNA has a 1-10 nucleotide, e.g., a 1, 2, 3, 4, 5, 6, 7, 8, 9, or 10 nucleotide, overhang at the 3′-end or the 5′-end. In another embodiment, one or more of the nucleotides in the overhang is replaced with a nucleoside thiophosphate.

[0109] In certain embodiments, the antisense strand of a dsRNA has a 1-10 nucleotides, e.g., a 1, 2, 3, 4, 5, 6, 7, 8, 9, or 10 nucleotide, overhang at the 3′-end or the 5′-end. In certain embodiments, the overhang on the sense strand or the antisense strand, or both, can include extended lengths longer than 10 nucleotides, e.g., 1-30 nucleotides, 2-30 nucleotides, 10-30 nucleotides, 10-25 nucleotides, 10-20 nucleotides, or 10-15 nucleotides in length. In certain embodiments, an extended overhang is on the sense strand of the duplex. In certain embodiments, an extended overhang is present on the 3′ end of the sense strand of the duplex. In certain embodiments, an extended overhang is present on the 5′ end of the sense strand of the duplex. In certain embodiments, an extended overhang is on the antisense strand of the duplex. In certain embodiments, an extended overhang is present on the 3′end of the antisense strand of the duplex. In certain embodiments, an extended overhang is present on the 5′end of the antisense strand of the duplex. In certain embodiments, one or more of the nucleotides in the extended overhang is replaced with a nucleoside thiophosphate. In certain embodiments, the overhang includes a self-complementary portion such that the overhang is capable of forming a hairpin structure that is stable under physiological conditions.

[0110] “Blunt” or “blunt end” means that there are no unpaired nucleotides at that end of the double stranded RNA agent, i.e., no nucleotide overhang. A “blunt ended” double stranded RNA agent is double stranded over its entire length, i.e., no nucleotide overhang at either end of the molecule. The RNAi agents of the invention include RNAi agents with no nucleotide overhang at one end (i.e., agents with one overhang and one blunt end) or with no nucleotide overhangs at either end. Most often such a molecule will be double-stranded over its entire length.

[0111] The term “antisense strand” or “guide strand” refers to the strand of an iRNA, e.g., a dsRNA, which includes a region that is substantially complementary to a target sequence, e.g., an AGT mRNA.

[0112] As used herein, the term “region of complementarity” refers to the region on the antisense strand that is substantially complementary to a sequence, for example a target sequence, e.g., an AGT nucleotide sequence, as defined herein. Where the region of complementarity is not fully complementary to the target sequence, the mismatches can be in the internal or terminal regions of the molecule. Generally, the most tolerated mismatches are in the terminal regions, e.g., within 5, 4, or 3 nucleotides of the 5′- or 3′-end of the iRNA. In some embodiments, a double stranded RNA agent of the invention includes a nucleotide mismatch in the antisense strand. In some embodiments, the antisense strand of the double stranded RNA agent of the invention includes no more than 4 mismatches with the target mRNA, e.g., the antisense strand includes 4, 3, 2, 1, or 0 mismatches with the target mRNA. In some embodiments, the antisense strand double stranded RNA agent of the invention includes no more than 4 mismatches with the sense strand, e.g., the antisense strand includes 4, 3, 2, 1, or 0 mismatches with the sense strand. In some embodiments, a double stranded RNA agent of the invention includes a nucleotide mismatch in the sense strand. In some embodiments, the sense strand of the double stranded RNA agent of the invention includes no more than 4 mismatches with the antisense strand, e.g., the sense strand includes 4, 3, 2, 1, or 0 mismatches with the antisense strand. In some embodiments, the nucleotide mismatch is, for example, within 5, 4, 3 nucleotides from the 3′-end of the iRNA. In another embodiment, the nucleotide mismatch is, for example, in the 3′-terminal nucleotide of the iRNA agent. In some embodiments, the mismatch(s) is not in the seed region.

[0113] Thus, an RNAi agent as described herein can contain one or more mismatches to the target sequence. In one embodiment, an RNAi agent as described herein contains no more than 3 mismatches (i.e., 3, 2, 1, or 0 mismatches). In one embodiment, an RNAi agent as described herein contains no more than 2 mismatches. In one embodiment, an RNAi agent as described herein contains no more than 1 mismatch. In one embodiment, an RNAi agent as described herein contains 0 mismatches. In certain embodiments, if the antisense strand of the RNAi agent contains mismatches to the target sequence, the mismatch can optionally be restricted to be within the last 5 nucleotides from either the 5′- or 3′-end of the region of complementarity. For example, in such embodiments, for a 23 nucleotide RNAi agent, the strand which is complementary to a region of an AGT gene, generally does not contain any mismatch within the central 13 nucleotides. The methods described herein or methods known in the art can be used to determine whether an RNAi agent containing a mismatch to a target sequence is effective in inhibiting the expression of an AGT gene. Consideration of the efficacy of RNAi agents with mismatches in inhibiting expression of an AGT gene is important, especially if the particular region of complementarity in an AGT gene is known to have polymorphic sequence variation within the population.

[0114] The term “sense strand” or “passenger strand” as used herein, refers to the strand of an iRNA that includes a region that is substantially complementary to a region of the antisense strand as that term is defined herein.

[0115] As used herein, “substantially all of the nucleotides are modified” are largely but not wholly modified and can include not more than 5, 4, 3, 2, or 1 unmodified nucleotides.

[0116] As used herein, the term “cleavage region” refers to a region that is located immediately adjacent to the cleavage site. The cleavage site is the site on the target at which cleavage occurs. In some embodiments, the cleavage region comprises three bases on either end of, and immediately adjacent to, the cleavage site. In some embodiments, the cleavage region comprises two bases on either end of, and immediately adjacent to, the cleavage site. In some embodiments, the cleavage site specifically occurs at the site bound by nucleotides 10 and 11 of the antisense strand, and the cleavage region comprises nucleotides 11, 12 and 13.

[0117] As used herein, and unless otherwise indicated, the term “complementary.” when used to describe a first nucleotide sequence in relation to a second nucleotide sequence, refers to the ability of an oligonucleotide or polynucleotide comprising the first nucleotide sequence to hybridize and form a duplex structure under certain conditions with an oligonucleotide or polynucleotide comprising the second nucleotide sequence, as will be understood by the skilled person. Such conditions can, for example, be stringent conditions, where stringent conditions can include: 400 mM NaCl, 40 mM PIPES pH 6.4, 1 mM EDTA, 50° C. or 70° C. for 12-16 hours followed by washing (see, e.g., “Molecular Cloning: A Laboratory Manual, Sambrook, et al. (1989) Cold Spring Harbor Laboratory Press). Other conditions, such as physiologically relevant conditions as can be encountered inside an organism, can apply. The skilled person will be able to determine the set of conditions most appropriate for a test of complementarity of two sequences in accordance with the ultimate application of the hybridized nucleotides.

[0118] Complementary sequences within an iRNA, e.g., within a dsRNA as described herein, include base-pairing of the oligonucleotide or polynucleotide comprising a first nucleotide sequence to an oligonucleotide or polynucleotide comprising a second nucleotide sequence over the entire length of one or both nucleotide sequences. Such sequences can be referred to as “fully complementary” with respect to each other herein. However, where a first sequence is referred to as “substantially complementary” with respect to a second sequence herein, the two sequences can be fully complementary, or they can form one or more, but generally not more than 5, 4, 3, or 2 mismatched base pairs upon hybridization for a duplex up to 30 base pairs, while retaining the ability to hybridize under the conditions most relevant to their ultimate application, e.g., inhibition of gene expression, in vitro or in vivo. However, where two oligonucleotides are designed to form, upon hybridization, one or more single stranded overhangs, such overhangs shall not be regarded as mismatches with regard to the determination of complementarity. For example, a dsRNA comprising one oligonucleotide 21 nucleotides in length and another oligonucleotide 23 nucleotides in length, wherein the longer oligonucleotide comprises a sequence of 21 nucleotides that is fully complementary to the shorter oligonucleotide, can yet be referred to as “fully complementary” for the purposes described herein.

[0119] “Complementary” sequences, as used herein, can also include, or be formed entirely from, non-Watson-Crick base pairs or base pairs formed from non-natural and modified nucleotides, in so far as the above requirements with respect to their ability to hybridize are fulfilled. Such non-Watson-Crick base pairs include, but are not limited to, G:U Wobble or Hoogsteen base pairing.

[0120] The terms “complementary.” “fully complementary” and “substantially complementary” herein can be used with respect to the base matching between the sense strand and the antisense strand of a dsRNA, or between two oligonucleotides or polynucleotides, such as the antisense strand of a double stranded RNA agent and a target sequence, as will be understood from the context of their use.

[0121] As used herein, a polynucleotide that is “substantially complementary to at least part of” a messenger RNA (mRNA) refers to a polynucleotide that is substantially complementary to a contiguous portion of the mRNA of interest (e.g., an mRNA encoding an AGT gene). For example, a polynucleotide is complementary to at least a part of an AGT mRNA if the sequence is substantially complementary to a non-interrupted portion of an mRNA encoding an AGT gene.

[0122] Accordingly, in some embodiments, the antisense polynucleotides disclosed herein are fully complementary to the target AGT sequence. In other embodiments, the antisense polynucleotides disclosed herein are substantially complementary to the target AGT sequence and comprise a contiguous nucleotide sequence which is at least 80% complementary over its entire length to the equivalent region of the nucleotide sequence of any one of SEQ ID NOs: 1, 3, 5, 7, 9, or 11, or a fragment of any one of SEQ ID NOs: 1, 3, 5, 7, 9, or 11, such as about 85%, about 90%, about 91%, about 92%, about 93%, about 94%, about 95%, about 96%, about 97%, about 98%, or about 99% complementary.

[0123] In other embodiments, the antisense polynucleotides disclosed herein are substantially complementary to the target AGT sequence and comprise a contiguous nucleotide sequence which is at least about 80% complementary over its entire length to any one of the sense strand nucleotide sequences in any one of any one of Tables 2-7, or a fragment of any one of the sense strand nucleotide sequences in any one of Tables 2-7, such as about 85%, about 90%, about 91%, about 92%, about 93%, about 94%, about 95%, about 96%, about 97%, about 98%, about 99%, or 100% complementary.

[0124] In one embodiment, an RNAi agent of the disclosure includes a sense strand that is substantially complementary to an antisense polynucleotide which, in turn, is the same as a target AGT sequence, and wherein the sense strand polynucleotide comprises a contiguous nucleotide sequence which is at least about 80% complementary over its entire length to the equivalent region of the nucleotide sequence of SEQ ID NOs: 2, 4, 6, 8, 10, or 12, or a fragment of any one of SEQ ID NOs: 2, 4, 6, 8, 10, or 12, such as about 85%, about 90%, about 91%, about 92%, about 93%, about 94%, about 95%, about 96%, about 97%, about 98%, about 99%, or 100% complementary.

[0125] In some embodiments, an iRNA of the invention includes a sense strand that is substantially complementary to an antisense polynucleotide which, in turn, is complementary to a target AGT sequence, and wherein the sense strand polynucleotide comprises a contiguous nucleotide sequence which is at least about 80% complementary over its entire length to any one of the antisense strand nucleotide sequences in any one of any one of Tables 2-7, or a fragment of any one of the antisense strand nucleotide sequences in any one of Tables 2-7, such as about 85%, about 90%, about 91%, about 92%, about 93%, about 94%, about 95%, about 96%, about 97%, about 98%, about 99%, or 100% complementary.

[0126] In general, an “iRNA” includes ribonucleotides with chemical modifications. Such modifications may include all types of modifications disclosed herein or known in the art. Any such modifications, as used in a dsRNA molecule, are encompassed by “iRNA” for the purposes of this specification and claims.

[0127] In certain embodiments of the instant disclosure, inclusion of a deoxy-nucleotide if present within an RNAi agent can be considered to constitute a modified nucleotide.

[0128] In an aspect of the invention, an agent for use in the methods and compositions of the invention is a single-stranded antisense oligonucleotide molecule that inhibits a target mRNA via an antisense inhibition mechanism. The single-stranded antisense oligonucleotide molecule is complementary to a sequence within the target mRNA. The single-stranded antisense oligonucleotides can inhibit translation in a stoichiometric manner by base pairing to the mRNA and physically obstructing the translation machinery, see Dias, N. et al., (2002) Mol Cancer Ther 1:347-355. The single-stranded antisense oligonucleotide molecule may be about 14 to about 30 nucleotides in length and have a sequence that is complementary to a target sequence. For example, the single-stranded antisense oligonucleotide molecule may comprise a sequence that is at least about 14, 15, 16, 17, 18, 19, 20, or more contiguous nucleotides from any one of the antisense sequences described herein.

[0129] The phrase “contacting a cell with an iRNA,” such as a dsRNA, as used herein, includes contacting a cell by any possible means. Contacting a cell with an iRNA includes contacting a cell in vitro with the iRNA or contacting a cell in vivo with the iRNA. The contacting may be done directly or indirectly. Thus, for example, the iRNA may be put into physical contact with the cell by the individual performing the method, or alternatively, the iRNA may be put into a situation that will permit or cause it to subsequently come into contact with the cell.

[0130] Contacting a cell in vitro may be done, for example, by incubating the cell with the iRNA. Contacting a cell in vivo may be done, for example, by injecting the iRNA into or near the tissue where the cell is located, or by injecting the iRNA into another area, e.g., the bloodstream or the subcutaneous space, such that the agent will subsequently reach the tissue where the cell to be contacted is located. For example, the iRNA may contain or be coupled to a ligand, e.g., GalNAc. that directs the iRNA to a site of interest, e.g., the liver. Combinations of in vitro and in vivo methods of contacting are also possible. For example, a cell may also be contacted in vitro with an iRNA and subsequently transplanted into a subject.

[0131] In certain embodiments, contacting a cell with an iRNA includes “introducing” or “delivering the iRNA into the cell” by facilitating or effecting uptake or absorption into the cell. Absorption or uptake of an iRNA can occur through unaided diffusion or active cellular processes, or by auxiliary agents or devices. Introducing an iRNA into a cell may be in vitro or in vivo. For example, for in vivo introduction, iRNA can be injected into a tissue site or administered systemically. In vitro introduction into a cell includes methods known in the art such as electroporation and lipofection. Further approaches are described herein below or are known in the art.

[0132] The term “lipid nanoparticle” or “LNP” is a vesicle comprising a lipid layer encapsulating a pharmaceutically active molecule, such as a nucleic acid molecule, e.g., an iRNA or a plasmid from which an iRNA is transcribed. LNPs are described in, for example, U.S. Pat. Nos. 6,858,225, 6,815,432, 8,158,601, and 8,058,069, the entire contents of which are hereby incorporated herein by reference.

[0133] As used herein, a “subject” is an animal, such as a mammal, including a primate (such as a human, a non-human primate, e.g., a monkey, and a chimpanzee), a non-primate (such as a cow, a pig, a horse, a goat, a rabbit, a sheep, a hamster, a guinea pig, a cat, a dog, a rat, or a mouse), or a bird that expresses the target gene, either endogenously or heterologously. In an embodiment, the subject is a human, such as a human being treated or assessed for a disease or disorder that would benefit from reduction in AGT expression; a human at risk for a disease or disorder that would benefit from reduction in AGT expression; a human having a disease or disorder that would benefit from reduction in AGT expression; or human being treated for a disease or disorder that would benefit from reduction in AGT expression as described herein. The diagnostic criteria for an AGT-associated disorder, e.g., hypertension, are provided below. In some embodiments, the subject is a female human. In other embodiments, the subject is a male human. In certain embodiments, the subject is part of a group susceptible to salt sensitivity, e.g., black or an older adult (>65 years of age). In certain embodiments, the subject is overweight or obese, e.g., a subject that suffers from central obesity. In certain embodiments, the subject is sedentary. In certain embodiments, the subject is pregnant. In another embodiment, the subject is a pediatric subject.

[0134] As used herein, the terms “treating” or “treatment” refer to a beneficial or desired result, such as reducing at least one sign or symptom of an AGT-associated disorder in a subject. Treatment also includes a reduction of one or more sign or symptoms associated with unwanted AGT expression; diminishing the extent of unwanted AGT activation or stabilization; amelioration or palliation of unwanted AGT activation or stabilization. Treatment also includes a reduction of one or more sign or symptoms associated with unwanted AGT expression, e.g., angiotensin II type 1 receptor activation (AT1R) (e.g., hypertension, chronic kidney disease, stroke, myocardial infarction, heart failure, aneurysms, peripheral artery disease, heart disease, increased oxidative stress, e.g., increased superoxide formation, inflammation, vasoconstriction, sodium and water retention, potassium and magnesium loss, renin suppression, myocyte and smooth muscle hypertrophy, increased collagen synthesis, stimulation of vascular, myocardial and renal fibrosis, increased rate and force of cardiac contractions, altered heart rate, e.g., increased arrhythmia, stimulation of plasminogen activator inhibitor 1 (PAI1), activation of the sympathetic nervous system, and increased endothelin secretion), symptoms of pregnancy-associated hypertension (e.g., preeclampsia, and eclampsia), including, but not limited to intrauterine growth restriction (IUGR) or fetal growth restriction, symptoms associated with malignant hypertension, symptoms associated with hyperaldosteronism; diminishing the extent of unwanted AT1R activation; stabilization (i.e., not worsening) of the state of chronic AT1R activation; amelioration or palliation of unwanted AT1R activation (e.g., hypertension, chronic kidney disease, stroke, myocardial infarction, heart failure, aneurysms, peripheral artery disease, heart disease, increased oxidative stress, e.g., increased superoxide formation, inflammation, vasoconstriction, sodium and water retention, potassium and magnesium loss, renin suppression, myocyte and smooth muscle hypertrophy, increased collagen synthesis, stimulation of vascular, myocardial and renal fibrosis, increased rate and force of cardiac contractions, altered heart rate, e.g., increased arrhythmia, stimulation of plasminogen activator inhibitor 1 (PAI1), activation of the sympathetic nervous system, and increased endothelin secretion) whether detectable or undetectable. AGT-associated disorders can also include obesity, liver steatosis/fatty liver, e.g., non-alcoholic Steatohepatitis (NASH) and non-alcoholic fatty liver disease (NAFLD), glucose intolerance, type 2 diabetes (non-insulin dependent diabetes), and metabolic syndrome. In certain embodiments, hypertension includes hypertension associated with low plasma renin activity or plasma renin concentration. “Treatment” can also mean prolonging survival as compared to expected survival in the absence of treatment.

[0135] The term “lower” in the context of the level of AGT in a subject or a disease marker or symptom refers to a statistically significant decrease in such level. The decrease can be, for example, at least 10%, 15%, 20%, 25%, 30%, %, 40%, 45%, 50%, 55%, 60%, 65%, 70%, 75%, 80%, 85%, 90%, 95%, or more. In certain embodiments, a decrease is at least 20%. In certain embodiments, the decrease is at least 50% in a disease marker, e.g., protein or gene expression level. “Lower” in the context of the level of AGT in a subject is a decrease to a level accepted as within the range of normal for an individual without such disorder. In certain embodiments, “lower” is the decrease in the difference between the level of a marker or symptom for a subject suffering from a disease and a level accepted within the range of normal for an individual. The term “lower” can also be used in association with normalizing a symptom of a disease or condition, i.e. decreasing the difference between a level in a subject suffering from an AGT-associated disorder towards or to a level in a normal subject not suffering from an AGT-associated disorder. As used herein, if a disease is associated with an elevated value for a symptom, “normal” is considered to be the upper limit of normal. If a disease is associated with a decreased value for a symptom, “normal” is considered to be the lower limit of normal.

[0136] As used herein, “prevention” or “preventing.” when used in reference to a disease or disorder, that would benefit from a reduction in expression of an AGT gene or production of agt protein, e.g., in a subject susceptible to an AGT-associated disorder due to, e.g., aging, genetic factors, hormone changes, diet, and a sedentary lifestyle. In certain embodiments, the disease or disorder is e.g., a symptom of unwanted AT1R activation, such as a hypertension, chronic kidney disease, stroke, myocardial infarction, heart failure, aneurysms, peripheral artery disease, heart disease, increased oxidative stress, e.g., increased superoxide formation, inflammation, vasoconstriction, sodium and water retention, potassium and magnesium loss, renin suppression, myocyte and smooth muscle hypertrophy, increased collagen synthesis, stimulation of vascular, myocardial and renal fibrosis, increased rate and force of cardiac contractions, altered heart rate, e.g., increased arrhythmia, stimulation of plasminogen activator inhibitor 1 (PAI1), activation of the sympathetic nervous system, and increased endothelin secretion. AGT-associated disorders can also include obesity, liver steatosis/fatty liver, e.g., non-alcoholic Steatohepatitis (NASH) and non-alcoholic fatty liver disease (NAFLD), glucose intolerance, type 2 diabetes (non-insulin dependent diabetes), and metabolic syndrome. In certain embodiments, hypertension includes hypertension associated with low plasma renin activity or plasma renin concentration. The likelihood of developing, e.g., hypertension, is reduced, for example, when an individual having one or more risk factors for a hypertension either fails to develop hypertension or develops hypertension with less severity relative to a population having the same risk factors and not receiving treatment as described herein. The failure to develop an AGT-associated disorder, e.g., hypertension or a delay in the time to develop hypertension by months or years is considered effective prevention. Prevention may require administration of more than one dose if the iRNA agent.

[0137] As used herein, the term “angiotensinogen-associated disease” or “AGT-associated disease.” is a disease or disorder that is caused by, or associated with renin-angiotensin-aldosterone system (RAAS) activation, or a disease or disorder the symptoms of which or progression of which responds to RAAS inactivation. The term “angiotensinogen-associated disease” includes a disease, disorder or condition that would benefit from reduction in AGT expression. Such diseases are typically associated with high blood pressure. Non-limiting examples of angiotensinogen-associated diseases include hypertension, e.g., borderline hypertension (also known as prehypertension), primary hypertension (also known as essential hypertension or idiopathic hypertension), secondary hypertension (also known as inessential hypertension), isolated systolic or diastolic hypertension, pregnancy-associated hypertension (e.g., preeclampsia, eclampsia, and post-partum preeclampsia), diabetic hypertension, resistant hypertension, refractory hypertension, paroxysmal hypertension, renovascular hypertension (also known as renal hypertension), Goldblatt hypertension, ocular hypertension, glaucoma, pulmonary hypertension, portal hypertension, systemic venous hypertension, systolic hypertension, labile hypertension; hypertensive heart disease, hypertensive nephropathy, atherosclerosis, arteriosclerosis, vasculopathy (including peripheral vascular disease), diabetic nephropathy, diabetic retinopathy, chronic heart failure, cardiomyopathy, diabetic cardiac myopathy, glomerulosclerosis, coarctation of the aorta, aortic aneurism, ventricular fibrosis, sleep apnea, heart failure (e.g., left ventricular systolic dysfunction), myocardial infarction, angina, stroke, renal disease e.g., chronic kidney disease or diabetic nephropathy optionally in the context of pregnancy, renal failure, e.g., chronic renal failure, and systemic sclerosis (e.g., scleroderma renal crisis). In certain embodiments, AGT-associated disease includes intrauterine growth restriction (IUGR) or fetal growth restriction. In certain embodiments, AGT-associated disorders also include obesity, liver steatosis/fatty liver, e.g., non-alcoholic Steatohepatitis (NASH) and non-alcoholic fatty liver disease (NAFLD), glucose intolerance, type 2 diabetes (non-insulin dependent diabetes), and metabolic syndrome. In certain embodiments, hypertension includes hypertension associated with low plasma renin activity or plasma renin concentration.

[0138] Thresholds for high blood pressure and stages of hypertension are discussed in detail below.

[0139] In one embodiment, an angiotensinogen-associated disease is primary hypertension. “Primary hypertension” is a result of environmental or genetic causes (e.g., a result of no obvious underlying medical cause).

[0140] In one embodiment, an angiotensinogen-associated disease is secondary hypertension. “Secondary hypertension” has an identifiable underlying disorder which can be of multiple etiologies, including renal, vascular, and endocrine causes, e.g., renal parenchymal disease (e.g., polycystic kidneys, glomerular or interstitial disease), renal vascular disease (e.g., renal artery stenosis, fibromuscular dysplasia), endocrine disorders (e.g., adrenocorticosteroid or mineralocorticoid excess, pheochromocytoma, hyperthyroidism or hypothyroidism, growth hormone excess, hyperparathyroidism), coarctation of the aorta, or oral contraceptive use.

[0141] In one embodiment, an angiotensinogen-associated disease is pregnancy-associated hypertension, e.g., chronic hypertension of pregnancy, gestational hypertension, preeclampsia, eclampsia, preeclampsia superimposed on chronic hypertension, HELLP syndrome, and gestational hypertension (also known as transient hypertension of pregnancy, chronic hypertension identified in the latter half of pregnancy, and pregnancy-induced hypertension (PIH)). Diagnostic criteria for pregnancy-associated hypertension are provided below.

[0142] In one embodiment, an angiotensinogen-associated disease is resistant hypertension. “Resistant hypertension” is blood pressure that remains above goal (e.g., above 130 mm Hg systolic or above 90 diastolic) in spite of concurrent use of three antihypertensive agents of different classes, one of which is a thiazide diuretic. Subjects whose blood pressure is controlled with four or more medications are also considered to have resistant hypertension.

[0143] “Therapeutically effective amount,” as used herein, is intended to include the amount of an RNAi agent that, when administered to a subject having an AGT-associated disorder, is sufficient to effect treatment of the disease (e.g., by diminishing, ameliorating, or maintaining the existing disease or one or more symptoms of disease). The “therapeutically effective amount” may vary depending on the RNAi agent, how the agent is administered, the disease and its severity and the history, age, weight, family history, genetic makeup, the types of preceding or concomitant treatments, if any, and other individual characteristics of the subject to be treated.

[0144] “Prophylactically effective amount,” as used herein, is intended to include the amount of an RNAi agent that, when administered to a subject having an AGT-associated disorder, is sufficient to prevent or ameliorate the disorder or one or more symptoms of the disorder. Ameliorating the disease includes slowing the course of the disease or reducing the severity of later-developing disease. The “prophylactically effective amount” may vary depending on the RNAi agent, how the agent is administered, the degree of risk of disease, and the history, age, weight, family history, genetic makeup, the types of preceding or concomitant treatments, if any, and other individual characteristics of the patient to be treated.

[0145] A “therapeutically-effective amount” or “prophylactically effective amount” also includes an amount of an RNAi agent that produces some desired effect at a reasonable benefit/risk ratio applicable to any treatment. The iRNA employed in the methods of the present invention may be administered in a sufficient amount to produce a reasonable benefit/risk ratio applicable to such treatment.

[0146] The phrase “pharmaceutically acceptable” is employed herein to refer to those compounds, materials (including salts), compositions, or dosage forms which are, within the scope of sound medical judgment, suitable for use in contact with the tissues of human subjects and animal subjects without excessive toxicity, irritation, allergic response, or other problem or complication, commensurate with a reasonable benefit/risk ratio.

[0147] The phrase “pharmaceutically-acceptable carrier” as used herein means a pharmaceutically-acceptable material, composition, or vehicle, such as a liquid or solid filler, diluent, excipient, manufacturing aid (e.g., lubricant, talc magnesium, calcium or zinc stearate, or steric acid), or solvent encapsulating material, involved in carrying or transporting the subject compound from one organ, or portion of the body, to another organ, or portion of the body. Each carrier must be “acceptable” in the sense of being compatible with the other ingredients of the formulation and not injurious to the subject being treated. Such carriers are known in the art. Pharmaceutically acceptable carriers include carriers for administration by injection.

[0148] The term “sample.” as used herein, includes a collection of similar fluids, cells, or tissues isolated from a subject, as well as fluids, cells, or tissues present within a subject. Examples of biological fluids include blood, serum and serosal fluids, plasma, cerebrospinal fluid, ocular fluids, lymph, urine, saliva, and the like. Tissue samples may include samples from tissues, organs, or localized regions. For example, samples may be derived from particular organs, parts of organs, or fluids or cells within those organs. In certain embodiments, samples may be derived from the liver (e.g., whole liver or certain segments of liver or certain types of cells in the liver, such as, e.g., hepatocytes). In some embodiments, a “sample derived from a subject” refers to urine obtained from the subject. A “sample derived from a subject” can refer to blood or blood derived serum or plasma from the subject.

### II. iRNAs of the Invention

[0149] The present invention provides iRNAs which inhibit the expression of an AGT gene. In certain embodiments, the iRNA includes double stranded ribonucleic acid (dsRNA) molecules for inhibiting the expression of an AGT gene in a cell, such as a cell within a subject, e.g., a mammal, such as a human susceptible to developing an AGT-associated disorder, e.g., hypertension. The dsRNAi agent includes an antisense strand having a region of complementarity which is complementary to at least a part of an mRNA formed in the expression of an AGT gene. The region of complementarity is about 19-30 nucleotides in length (e.g., about 30, 29, 28, 27, 26, 25, 24, 23, 22, 21, 20, or 19 nucleotides in length).

[0150] Upon contact with a cell expressing the AGT gene, the iRNA inhibits the expression of the AGT gene (e.g., a human, a primate, a non-primate, or a rat AGT gene) by at least about 50% as assayed by, for example, a PCR or branched DNA (bDNA)-based method, or by a protein-based method, such as by immunofluorescence analysis, using, for example, western blotting or flow cytometric techniques. In certain embodiments, inhibition of expression is determined by the qPCR method provided in the examples herein with the siRNA at, e.g., a 10 nM concentration, in an appropriate organism cell line provided therein. In certain embodiments, inhibition of expression in vivo is determined by knockdown of the human gene in a rodent expressing the human gene, e.g., a mouse or an AAV-infected mouse expressing the human target gene, e.g., when administered as single dose, e.g., at 3 mg/kg at the nadir of RNA expression.

[0151] A dsRNA includes two RNA strands that are complementary and hybridize to form a duplex structure under conditions in which the dsRNA will be used. One strand of a dsRNA (the antisense strand) includes a region of complementarity that is substantially complementary, and generally fully complementary, to a target sequence. The target sequence can be derived from the sequence of an mRNA formed during the expression of an AGT gene. The other strand (the sense strand) includes a region that is complementary to the antisense strand, such that the two strands hybridize and form a duplex structure when combined under suitable conditions. As described elsewhere herein and as known in the art, the complementary sequences of a dsRNA can also be contained as self-complementary regions of a single nucleic acid molecule, as opposed to being on separate oligonucleotides.

[0152] Generally, the duplex structure is 15 to 30 base pairs in length, e.g., 15-29, 15-28, 15-27, 15-26, 15-25, 15-24, 15-23, 15-22, 15-21, 15-20, 15-19, 15-18, 15-17, 18-30, 18-29, 18-28, 18-27, 18-26, 18-25, 18-24, 18-23, 18-22, 18-21, 18-20, 19-30, 19-29, 19-28, 19-27, 19-26, 19-25, 19-24, 19-23, 19-22, 19-21, 19-20, 20-30, 20-29, 20-28, 20-27, 20-26, 20-25, 20-24,20-23, 20-22, 20-21, 21-30, 21-29, 21-28, 21-27, 21-26, 21-25, 21-24, 21-23, or 21-22 base pairs in length. In certain embodiments, the duplex structure is 18 to 25 base pairs in length, e.g., 18-25, 18-24, 18-23, 18-22, 18-21, 18-20, 19-25, 19-24, 19-23, 19-22, 19-21, 19-20, 20-25, 20-24,20-23, 20-22, 20-21, 21-25, 21-24, 21-23, 21-22, 22-25, 22-24, 22-23, 23-25, 23-24 or 24-25 base pairs in length, for example, 19-21 basepairs in length. Ranges and lengths intermediate to the above recited ranges and lengths are also contemplated to be part of the disclosure.

[0153] Similarly, the region of complementarity to the target sequence is 15 to 30 nucleotides in length, e.g., 15-29, 15-28, 15-27, 15-26, 15-25, 15-24, 15-23, 15-22, 15-21, 15-20, 15-19, 15-18, 15-17, 18-30, 18-29, 18-28, 18-27, 18-26, 18-25, 18-24, 18-23, 18-22, 18-21, 18-20, 19-30, 19-29, 19-28, 19-27, 19-26, 19-25, 19-24, 19-23, 19-22, 19-21, 19-20, 20-30, 20-29, 20-28, 20-27, 20-26, 20-25, 20-24,20-23, 20-22, 20-21, 21-30, 21-29, 21-28, 21-27, 21-26, 21-25, 21-24, 21-23, or 21-22 nucleotides in length, for example 19-23 nucleotides in length or 21-23 nucleotides in length. Ranges and lengths intermediate to the above recited ranges and lengths are also contemplated to be part of the disclosure.

[0154] In some embodiments, the duplex structure is 19 to 30 base pairs in length. Similarly, the region of complementarity to the target sequence is 19 to 30 nucleotides in length.

[0155] In some embodiments, the dsRNA is about 19 to about 23 nucleotides in length, or about 25 to about 30 nucleotides in length. In general, the dsRNA is long enough to serve as a substrate for the Dicer enzyme. For example, it is well-known in the art that dsRNAs longer than about 21-23 nucleotides in length may serve as substrates for Dicer. As the ordinarily skilled person will also recognize, the region of an RNA targeted for cleavage will most often be part of a larger RNA molecule, often an mRNA molecule. Where relevant, a “part” of an mRNA target is a contiguous sequence of an mRNA target of sufficient length to allow it to be a substrate for RNAi-directed cleavage (i.e., cleavage through a RISC pathway).

[0156] One of skill in the art will also recognize that the duplex region is a primary functional portion of a dsRNA, e.g., a duplex region of about 19 to about 30 base pairs, e.g., about 19-30, 19-29, 19-28, 19-27, 19-26, 19-25, 19-24, 19-23, 19-22, 19-21, 19-20, 20-30, 20-29, 20-28, 20-27, 20-26, 20-25, 20-24,20-23, 20-22, 20-21, 21-30, 21-29, 21-28, 21-27, 21-26, 21-25, 21-24, 21-23, or 21-22 base pairs. Thus, in one embodiment, to the extent that it becomes processed to a functional duplex, of e.g., 15-30 base pairs, that targets a desired RNA for cleavage, an RNA molecule or complex of RNA molecules having a duplex region greater than 30 base pairs is a dsRNA. Thus, an ordinarily skilled artisan will recognize that in one embodiment, a miRNA is a dsRNA. In another embodiment, a dsRNA is not a naturally occurring miRNA. In another embodiment, an iRNA agent useful to target AGT gene expression is not generated in the target cell by cleavage of a larger dsRNA.

[0157] A dsRNA as described herein can further include one or more single-stranded nucleotide overhangs, e.g., 1-4, 2-4, 1-3, 2-3, 1, 2, 3, or 4 nucleotides. dsRNAs having at least one nucleotide overhang can have superior inhibitory properties relative to their blunt-ended counterparts. A nucleotide overhang can comprise or consist of a nucleotide/nucleoside analog, including a deoxynucleotide/nucleoside. The overhang(s) can be on the sense strand, the antisense strand, or any combination thereof. Furthermore, the nucleotide(s) of an overhang can be present on the 5′-end, 3′-end, or both ends of an antisense or sense strand of a dsRNA.

[0158] A dsRNA can be synthesized by standard methods known in the art. Double stranded RNAi compounds of the invention may be prepared using a two-step procedure. First, the individual strands of the double stranded RNA molecule are prepared separately. Then, the component strands are annealed. The individual strands of the siRNA compound can be prepared using solution-phase or solid-phase organic synthesis or both. Organic synthesis offers the advantage that the oligonucleotide strands comprising unnatural or modified nucleotides can be easily prepared. Similarly, single-stranded oligonucleotides of the invention can be prepared using solution-phase or solid-phase organic synthesis or both.

[0159] In an aspect, a dsRNA of the invention includes at least two nucleotide sequences, a sense sequence and an anti-sense sequence. The sense strand is selected from the group of sequences provided in any one of Tables 2-7, and the corresponding antisense strand of the sense strand is selected from the group of sequences of any one of Tables 2-7. In this aspect, one of the two sequences is complementary to the other of the two sequences, with one of the sequences being substantially complementary to a sequence of an mRNA generated in the expression of an AGT gene. As such, in this aspect, a dsRNA will include two oligonucleotides, where one oligonucleotide is described as the sense strand in any one of Tables 2-7, and the second oligonucleotide is described as the corresponding antisense strand of the sense strand in any one of Tables 2-7.

[0160] In certain embodiments, the substantially complementary sequences of the dsRNA are contained on separate oligonucleotides. In other embodiments, the substantially complementary sequences of the dsRNA are contained on a single oligonucleotide.

[0161] It will be understood that, although the sequences in, for example, Table 2, are not described as modified or conjugated sequences, the RNA of the iRNA of the invention e.g., a dsRNA of the invention, may comprise any one of the sequences set forth in any one of Tables 2-7 that is un-modified, un-conjugated, or modified or conjugated differently than described therein. In other words, the invention encompasses dsRNA of Tables 2-7 which are un-modified, un-conjugated, modified, or conjugated, as described herein.

[0162] The skilled person is well aware that dsRNAs having a duplex structure of about 20 to 23 base pairs, e.g., 21, base pairs have been hailed as particularly effective in inducing RNA interference (Elbashir et al., EMBO 2001, 20:6877-6888). However, others have found that shorter or longer RNA duplex structures can also be effective (Chu and Rana (2007) RNA 14:1714-1719; Kim et al. (2005) Nat Biotech 23:222-226). In the embodiments described above, by virtue of the nature of the oligonucleotide sequences provided in any one of Tables 2-7. dsRNAs described herein can include at least one strand of a length of minimally 21 nucleotides. It can be reasonably expected that shorter duplexes having any one of the sequences in any one of Tables 2-7 minus only a few nucleotides on one or both ends can be similarly effective as compared to the dsRNAs described above. Hence, dsRNAs having a sequence of at least 19, 20, or more contiguous nucleotides derived from any one of the sequences of any one of Tables 2-7, and differing in their ability to inhibit the expression of an AGT gene by not more than about 5, 10, 15, 20, 25, or 30% inhibition from a dsRNA comprising the full sequence, are contemplated to be within the scope of the present invention.

[0163] In addition, the RNAs provided in Tables 2-7 identify a site(s) in an AGT transcript that is susceptible to RISC-mediated cleavage. As such, the present invention further features iRNAs that target within one of these sites. As used herein, an iRNA is said to target within a particular site of an RNA transcript if the iRNA promotes cleavage of the transcript anywhere within that particular site. Such an iRNA will generally include at least about 19 contiguous nucleotides from any one of the sequences provided in any one of Tables 2-7 coupled to additional nucleotide sequences taken from the region contiguous to the selected sequence in an AGT gene.

### III. Modified iRNAs of the Invention

[0164] In certain embodiments, the RNA of the iRNA of the invention e.g., a dsRNA, is un-modified, and does not comprise, e.g., chemical modifications or conjugations known in the art and described herein. In other embodiments, the RNA of an iRNA of the invention, e.g., a dsRNA, is chemically modified to enhance stability or other beneficial characteristics. In certain embodiments of the invention, substantially all of the nucleotides of an iRNA of the invention are modified. In other embodiments of the invention, all of the nucleotides of an iRNA or substantially all of the nucleotides of an iRNA are modified, i.e., not more than 5, 4, 3, 2, or 1 unmodified nucleotides are present in a strand of the iRNA.

[0165] The nucleic acids featured in the invention can be synthesized or modified by methods well established in the art, such as those described in “Current protocols in nucleic acid chemistry.” Beaucage, S. L. et al. (Edrs.), John Wiley & Sons, Inc., New York, NY, USA, which is hereby incorporated herein by reference. Modifications include, for example, end modifications, e.g., 5′-end modifications (phosphorylation, conjugation, inverted linkages) or 3′-end modifications (conjugation, DNA nucleotides, inverted linkages, etc.); base modifications, e.g., replacement with stabilizing bases, destabilizing bases, or bases that base pair with an expanded repertoire of partners, removal of bases (abasic nucleotides), or conjugated bases; sugar modifications (e.g., at the 2′-position or 4′-position) or replacement of the sugar; or backbone modifications, including modification or replacement of the phosphodiester linkages. Specific examples of iRNA compounds useful in the embodiments described herein include, but are not limited to RNAs containing modified backbones or no natural internucleoside linkages. RNAs having modified backbones include, among others, those that do not have a phosphorus atom in the backbone. For the purposes of this specification, and as sometimes referenced in the art, modified RNAs that do not have a phosphorus atom in their internucleoside backbone can also be considered to be oligonucleosides. In some embodiments, a modified iRNA will have a phosphorus atom in its internucleoside backbone.

[0166] Modified RNA backbones include, for example, phosphorothioates, chiral phosphorothioates, phosphorodithioates, phosphotriesters, aminoalkylphosphotriesters, methyl and other alkyl phosphonates including 3′-alkylene phosphonates and chiral phosphonates, phosphinates, phosphoramidates including 3′-amino phosphoramidate and aminoalkylphosphoramidates, thionophosphoramidates, thionoalkylphosphonates, thionoalkylphosphotriesters, and boranophosphates having normal 3′-5′ linkages, 2′-5′-linked analogs of these, and those having inverted polarity wherein the adjacent pairs of nucleoside units are linked 3′-5′ to 5′-3′ or 2′-5′ to 5′-2′. Various salts, mixed salts and free acid forms are also included. In some embodiments of the invention, the dsRNA agents of the invention are in a free acid form. In other embodiments of the invention, the dsRNA agents of the invention are in a salt form. In one embodiment, the dsRNA agents of the invention are in a sodium salt form. In certain embodiments, when the dsRNA agents of the invention are in the sodium salt form, sodium ions are present in the agent as counterions for substantially all of the phosphodiester and/or phosphorothiotate groups present in the agent. Agents in which substantially all of the phosphodiester and/or phosphorothioate linkages have a sodium counterion include not more than 5, 4, 3, 2, or 1 phosphodiester and/or phosphorothioate linkages without a sodium counterion. In some embodiments, when the dsRNA agents of the invention are in the sodium salt form, sodium ions are present in the agent as counterions for all of the phosphodiester and/or phosphorothiotate groups present in the agent.

[0167] Representative U.S. Patents that teach the preparation of the above phosphorus-containing linkages include, but are not limited to, U.S. Pat. Nos. 3,687,808; 4,469,863; 4,476,301; 5,023,243; 5,177,195; 5,188,897; 5,264,423; 5,276,019; 5,278,302; 5,286,717; 5,321,131; 5,399,676; 5,405,939; 5,453,496; 5,455,233; 5,466,677; 5,476,925; 5,519,126; 5,536,821; 5,541,316; 5,550,111; 5,563,253; 5,571,799; 5,587,361; 5,625,050; 6,028,188; 6,124,445; 6,160,109; 6,169,170; 6,172,209; 6,239,265; 6,277,603; 6,326,199; 6,346,614; 6,444,423; 6,531,590; 6,534,639; 6,608,035; 6,683,167; 6,858,715; 6,867,294; 6,878,805; 7,015,315; 7,041,816; 7,273,933; 7,321,029; and U.S. Pat. RE39464, the entire contents of each of which are hereby incorporated herein by reference.

[0168] Modified RNA backbones that do not include a phosphorus atom therein have backbones that are formed by short chain alkyl or cycloalkyl internucleoside linkages, mixed heteroatoms and alkyl or cycloalkyl internucleoside linkages, or one or more short chain heteroatomic or heterocyclic internucleoside linkages. These include those having morpholino linkages (formed in part from the sugar portion of a nucleoside); siloxane backbones; sulfide, sulfoxide and sulfone backbones; formacetyl and thioformacetyl backbones; methylene formacetyl and thioformacetyl backbones; alkene containing backbones; sulfamate backbones; methyleneimino and methylenehydrazino backbones; sulfonate and sulfonamide backbones; amide backbones; and others having mixed N, O, S, and CH₂ component parts.

[0169] Representative U.S. Patents that teach the preparation of the above oligonucleosides include, but are not limited to, U.S. Pat. Nos. 5,034,506; 5,166,315; 5,185,444; 5,214,134; 5,216,141; 5,235,033; 5,64,562; 5,264,564; 5,405,938; 5,434,257; 5,466,677; 5,470,967; 5,489,677; 5,541,307; 5,561.225; 5,596,086; 5,602,240; 5,608,046; 5,610,289; 5,618,704; 5,623,070; 5,663,312; 5,633,360; 5,677,437; and 5,677,439, the entire contents of each of which are hereby incorporated herein by reference.

[0170] Suitable RNA mimetics are contemplated for use in iRNAs provided herein, in which both the sugar and the internucleoside linkage, i.e., the backbone, of the nucleotide units are replaced with novel groups. The base units are maintained for hybridization with an appropriate nucleic acid target compound. One such oligomeric compound in which an RNA mimetic that has been shown to have excellent hybridization properties is referred to as a peptide nucleic acid (PNA). In PNA compounds, the sugar backbone of an RNA is replaced with an amide containing backbone, in particular an aminoethylglycine backbone. The nucleobases are retained and are bound directly or indirectly to aza nitrogen atoms of the amide portion of the backbone. Representative US patents that teach the preparation of PNA compounds include, but are not limited to, U.S. Pat. Nos. 5,539,082; 5,714,331; and 5,719,262, the entire contents of each of which are hereby incorporated herein by reference. Additional PNA compounds suitable for use in the iRNAs of the invention are described in, for example, in Nielsen et al., Science, 1991, 254, 1497-1500.

[0171] Some embodiments featured in the invention include RNAs with phosphorothioate backbones and oligonucleosides with heteroatom backbones, and in particular —CH₂—NH—CH₂—, —CH₂—N(CH₃)—O—CH₂— [known as a methylene(methylimino) or MMI backbone], —CH₂—O—N(CH₃)—CH₂—, —CH₂—N(CH₃)—N(CH₃)—CH₂— and —N(CH;)—CH₂—CH₂— of the above-referenced U.S. Pat. No. 5,489,677, and the amide backbones of the above-referenced U.S. Pat. No. 5,602,240. In some embodiments, the RNAs featured herein have morpholino backbone structures of the above-referenced U.S. Pat. No. 5,034,506. The native phosphodiester backbone can be represented as O—P(O)(OH)—OCH₂—.

[0172] Modified RNAs can also contain one or more substituted sugar moieties. The iRNAs, e.g., dsRNAs, featured herein can include one of the following at the 2′-position: OH; F; O-, S-, or N-alkyl; O-, S-, or N-alkenyl; O-, S- or N-alkynyl; or O-alkyl-O-alkyl, wherein the alkyl, alkenyl and alkynyl can be substituted or unsubstituted C₁ to C₁₀ alkyl or C₂ to C₁₀ alkenyl and alkynyl. Exemplary suitable modifications include O[(CH₂)ₙ[O]ₘCH₃, O(CH₂)ₙOCH₃, O(CH₂)ₙNH₂, O(CH₂)ₙCH₃. O(CH₂)ₙONH₂, and O(CH₂)ₙON[(CH₂)ₙCH₃)]₂, where n and m are from 1 to about 10. In other embodiments, dsRNAs include one of the following at the 2′ position: C₁ to C₁₀ lower alkyl, substituted lower alkyl, alkaryl, aralkyl, O-alkaryl or O-aralkyl, SH, SCH₃, OCN, Cl, Br, CN, CF₃, OCH₃, SOCH₃, SO₂CH₃, ONO₂, N₃, NH₂, heterocycloalkyl, heterocycloalkaryl, aminoalkylamino, polyalkylamino, substituted silyl, an RNA cleaving group, a reporter group, an intercalator, a group for improving the pharmacokinetic properties of an iRNA, or a group for improving the pharmacodynamic properties of an iRNA, and other substituents having similar properties. In some embodiments, the modification includes a 2′-methoxyethoxy (2′-O—CH₂CH₂OCH₃, also known as 2′-O-(2-methoxyethyl) or 2′-MOE) (Martin et al., Helv. Chim. Acta, 1995, 78:486-504) i.e., an alkoxy-alkoxy group. Another exemplary modification is 2′-dimethylaminooxyethoxy, i.e., a O(CH₂)₂ON(CH₃)₂ group, also known as 2′-DMAOE, as described in examples herein below, and 2′-dimethylaminoethoxyethoxy (also known in the art as 2′-O-dimethylaminoethoxyethyl or 2′-DMAEOE), i.e., 2′-O—CH₂—O—CH₂—N(CH₃)₂. Further exemplary modifications include: 5′-Me-2′-F nucleotides, 5′-Me-2′-OMe nucleotides, 5′-Me-2′-deoxynucleotides, (both R and S isomers in these three families); 2′-alkoxyalkyl; and 2′-NMA (N-methylacetamide).

[0173] Other modifications include 2′-methoxy (2′-OCH₃), 2′-aminopropoxy (2′-OCH₂CH₂CH₂NH₂) and 2′-fluoro (2′-F). Similar modifications can also be made at other positions on the RNA of an iRNA, particularly the 3′ position of the sugar on the 3′ terminal nucleotide or in 2′-5′ linked dsRNAs and the 5′ position of 5′ terminal nucleotide. iRNAs can also have sugar mimetics such as cyclobutyl moieties in place of the pentofuranosyl sugar. Representative US patents that teach the preparation of such modified sugar structures include, but are not limited to, U.S. Pat. Nos. 4,981,957; 5,118,800; 5,319,080; 5,359,044; 5,393,878; 5,446,137; 5,466,786; 5,514,785; 5,519,134; 5,567,811; 5,576,427; 5,591,722; 5,597,909; 5,610,300; 5,627,053; 5,639,873; 5,646,265; 5,658,873; 5,670,633; and 5,700,920, certain of which are commonly owned with the instant application. The entire contents of each of the foregoing are hereby incorporated herein by reference.

[0174] An iRNA can also include nucleobase (often referred to in the art simply as “base”) modifications or substitutions. As used herein, “unmodified” or “natural” nucleobases include the purine bases adenine (A) and guanine (G), and the pyrimidine bases thymine (T), cytosine (C), and uracil (U). Modified nucleobases include other synthetic and natural nucleobases such as deoxythimidine (dT), 5-methylcytosine (5-me-C), 5-hydroxymethyl cytosine, xanthine, hypoxanthine, 2-aminoadenine, 6-methyl and other alkyl derivatives of adenine and guanine, 2-propyl and other alkyl derivatives of adenine and guanine, 2-thiouracil, 2-thiothymine and 2-thiocytosine, 5-halouracil and cytosine, 5-propynyl uracil and cytosine, 6-azo uracil, cytosine and thymine, 5-uracil (pseudouracil), 4-thiouracil, 8-halo, 8-amino, 8-thiol, 8-thioalkyl, 8-hydroxyl anal other 8-substituted adenines and guanines, 5-halo, particularly 5-bromo, 5-trifluoromethyl and other 5-substituted uracils and cytosines, 7-methylguanine and 7-methyladenine, 8-azaguanine and 8-azaadenine, 7-deazaguanine and 7-daazaadenine and 3-deazaguanine and 3-deazaadenine. Further nucleobases include those disclosed in U.S. Pat. No. 3,687,808, those disclosed in Modified Nucleosides in Biochemistry, Biotechnology and Medicine, Herdewijn, P. ed. Wiley-VCH, 2008; those disclosed in The Concise Encyclopedia Of Polymer Science And Engineering, pages 858-859, Kroschwitz, J. L. cd. John Wiley & Sons, 1990, these disclosed by Englisch et al., Angewandte Chemie, International Edition, 1991, 30, 613, and those disclosed by Sanghvi, Y S., Chapter 15, dsRNA Research and Applications, pages 289-302, Crooke, S. T. and Lebleu, B., Ed., CRC Press, 1993. Certain of these nucleobases are particularly useful for increasing the binding affinity of the oligomeric compounds featured in the invention. These include 5-substituted pyrimidines, 6-azapyrimidines and N-2, N-6 and 0-6 substituted purines, including 2-aminopropyladenine, 5-propynyluracil and 5-propynylcytosine. 5-methylcytosine substitutions have been shown to increase nucleic acid duplex stability by 0.6-1.2° C. (Sanghvi, Y. S., Crooke, S. T. and Lebleu, B., Eds., dsRNA Research and Applications, CRC Press, Boca Raton, 1993, pp. 276-278) and are exemplary base substitutions, even more particularly when combined with 2′-O-methoxyethyl sugar modifications.

[0175] Representative U.S. Patents that teach the preparation of certain of the above noted modified nucleobases as well as other modified nucleobases include, but are not limited to, the above noted U.S. Pat. Nos. 3,687,808, 4,845,205; 5,130,30; 5,134,066; 5,175,273; 5,367,066; 5,432,272; 5,457,187; 5,459,255; 5,484,908; 5,502,177; 5,525,711; 5,552,540; 5,587,469; 5,594,121, 5,596,091; 5,614,617; 5,681,941; 5,750,692; 6,015,886; 6,147,200; 6,166,197; 6,222,025; 6,235,887; 6,380,368; 6,528,640; 6,639,062; 6,617,438; 7,045,610; 7,427,672; and 7,495,088, the entire contents of each of which are hereby incorporated herein by reference.

[0176] In some embodiments, an RNAi agent of the disclosure can also be modified to include one or more bicyclic sugar moieties. A “bicyclic sugar” is a furanosyl ring modified by a ring formed by the bridging of two carbons, whether adjacent or non-adjacent. A “bicyclic nucleoside” (“BNA”) is a nucleoside having a sugar moiety comprising a ring formed by bridging two carbons, whether adjacent or non-adjacent, of the sugar ring, thereby forming a bicyclic ring system. In certain embodiments, the bridge connects the 4′-carbon and the 2′-carbon of the sugar ring, optionally, via the 2′-acyclic oxygen atom. Thus, in some embodiments an agent of the invention may include one or more locked nucleic acids (LNA). A locked nucleic acid is a nucleotide having a modified ribose moiety in which the ribose moiety comprises an extra bridge connecting the 2′ and 4′ carbons. In other words, an LNA is a nucleotide comprising a bicyclic sugar moiety comprising a 4′-CH₂—O-2′ bridge. This structure effectively “locks” the ribose in the 3′-endo structural conformation. The addition of locked nucleic acids to siRNAs has been shown to increase siRNA stability in serum, and to reduce off-target effects (Elmen, J. et al., (2005) Nucleic Acids Research 33(1):439-447; Mook, OR. et al., (2007) Mol Canc Ther 6(3):833-843; Grunweller, A. et al., (2003) Nucleic Acids Research 31(12):3185-3193). Examples of bicyclic nucleosides for use in the polynucleotides of the invention include without limitation nucleosides comprising a bridge between the 4′ and the 2′ ribosyl ring atoms. In certain embodiments, the antisense polynucleotide agents of the invention include one or more bicyclic nucleosides comprising a 4′ to 2′ bridge.

[0177] A locked nucleoside can be represented by the structure (omitting stereochemistry),

[chemical structure]

[0178] wherein B is a nucleobase or modified nucleobase and L is the linking group that joins the 2′-carbon to the 4′-carbon of the ribose ring. Examples of such 4′ to 2′ bridged bicyclic nucleosides, include but are not limited to 4′-(CH₂)—O-2′ (LNA); 4′-(CH₂)—S-2′; 4′-(CH₂)₂—O-2′ (ENA); 4′-CH(CH₃)—O-2′ (also referred to as “constrained ethyl” or “cEt”) and 4′-CH(CH₂OCH₃)—O-2′ (and analogs thereof; see, e.g., U.S. Pat. No. 7,399,845); 4′-C(CH₃)(CH₃)—O-2′ (and analogs thereof; see e.g., U.S. Pat. No. 8,278,283); 4′-CH₂—N(OCH₃)-2′ (and analogs thereof; see e.g., U.S. Pat. No. 8,278,425); 4′-CH₂—O—N(CH₃)-2′ (see, e.g., U.S. Patent Publication No. 2004/0171570); 4′-CH₂—N(R)—O-2′, wherein R is H, C₁-C₁₂ alkyl, or a nitrogen protecting group (see, e.g., U.S. Pat. No. 7,427,672); 4′-CH₂—C(H)(CH₃)-2′ (see, e.g., Chattopadhyaya et al., J. Org. Chem., 2009, 74, 118-134); and 4′-CH₂—C(═CH₂)-2′ (and analogs thereof; see, e.g., U.S. Pat. No. 8,278,426). The entire contents of each of the foregoing are hereby incorporated herein by reference.

[0179] Additional representative U.S. Patents and U.S. Patent Publications that teach the preparation of locked nucleic acid nucleotides include, but are not limited to, the following: U.S. Pat. Nos. 6,268,490; 6,525,191; 6,670,461; 6,770,748; 6,794,499; 6,998,484; 7,053,207; 7,034,133; 7,084,125; 7,399,845; 7,427,672; 7,569,686; 7,741,457; 8,022,193; 8,030,467; 8,278,425; 8,278,426; 8,278,283; US 2008/0039618; and US 2009/0012281, the entire contents of each of which are hereby incorporated herein by reference.

[0180] Any of the foregoing bicyclic nucleosides can be prepared having one or more stereochemical sugar configurations including for example α-L-ribofuranose and β-D-ribofuranose (see WO 99/14226).

[0181] The RNA of an iRNA can also be modified to include one or more constrained ethyl nucleotides. As used herein, a “constrained ethyl nucleotide” or “cEt” is a locked nucleic acid comprising a bicyclic sugar moiety comprising a 4′-CH(CH₃)—O-2′ bridge (i.e., L in the preceding structure). In one embodiment, a constrained ethyl nucleotide is in the S conformation referred to herein as “S-cEt.”

[0182] An iRNA of the invention may also include one or more “conformationally restricted nucleotides” (“CRN”). CRN are nucleotide analogs with a linker connecting the C2′ and C4′ carbons of ribose or the C3 and —C5′ carbons of ribose. CRN lock the ribose ring into a stable conformation and increase the hybridization affinity to mRNA. The linker is of sufficient length to place the oxygen in an optimal position for stability and affinity resulting in less ribose ring puckering.

[0183] Representative publications that teach the preparation of certain of the above noted CRN include, but are not limited to, U.S. Patent Publication No. 2013/0190383; and PCT publication WO 2013/036868, the entire contents of each of which are hereby incorporated herein by reference.

[0184] In some embodiments, an iRNA of the invention comprises one or more monomers that are UNA (unlocked nucleic acid) nucleotides. UNA is unlocked acyclic nucleic acid, wherein any of the bonds of the sugar has been removed, forming an unlocked “sugar” residue. In one example, UNA also encompasses monomer with bonds between C1′-C4′ have been removed (i.e. the covalent carbon-oxygen-carbon bond between the C1′ and C4′ carbons). In another example, the C2′-C3′ bond (i.e. the covalent carbon-carbon bond between the C2′ and C3′ carbons) of the sugar has been removed (see Nuc. Acids Symp. Series, 52, 133-134(2008) and Fluiter et al., Mol. Biosyst., 2009, 10, 1039 hereby incorporated by reference).

[0185] Representative U.S. publications that teach the preparation of UNA include, but are not limited to, U.S. Pat. No. 8,314,227; and U.S. Patent Publication Nos. 2013/0096289; 2013/0011922; and 2011/0313020, the entire contents of each of which are hereby incorporated herein by reference.

[0186] Potentially stabilizing modifications to the ends of RNA molecules can include N-(acetylaminocaproyl)-4-hydroxyprolinol (Hyp-C₆-NHAc), N-(caproyl-4-hydroxyprolinol (Hyp-C₆), N-(acetyl-4-hydroxyprolinol (Hyp-NHAc), thymidine-2′-O-deoxythymidine (ether), N-(aminocaproyl)-4-hydroxyprolinol (Hyp-C₆-amino), 2-docosanoyl-uridine-3′-phosphate, inverted 2′-deoxy-modified ribonucleotide, such as inverted dT (idT), inverted dA (idA), and inverted abasic 2′-deoxyribonucleotide (iAb) and others. Disclosure of this modification can be found in WO 2011/005861.

[0187] In one example, the 3′ or 5′ terminal end of a oligonucleotide is linked to an inverted 2′-deoxy-modified ribonucleotide, such as inverted dT (idT), inverted dA (idA), or a inverted abasic 2′-deoxyribonucleotide (iAb). In one particular example, the inverted 2′-deoxy-modified ribonucleotide is linked to the 3′end of an oligonucleotide, such as the 3′-end of a sense strand described herein, where the linking is via a 3′-3′ phosphodiester linkage or a 3′-3′-phosphorothioate linkage.

[0188] In another example, the 3′-end of a sense strand is linked via a 3′-3′-phosphorothioate linkage to an inverted abasic ribonucleotide (iAb). In another example, the 3′-end of a sense strand is linked via a 3′-3′-phosphorothioate linkage to an inverted dA (idA).

[0189] In one particular example, the inverted 2′-deoxy-modified ribonucleotide is linked to the 3′end of an oligonucleotide, such as the 3′-end of a sense strand described herein, where the linking is via a 3′-3′ phosphodiester linkage or a 3′-3′-phosphorothioate linkage.

[0190] In another example, the 3′-terminal nucleotides of a sense strand is an inverted dA (idA) and is linked to the preceding nucleotide via a 3′-3′-linkage (e.g., 3′-3′-phosphorothioate linkage).

[0191] Other modifications of the nucleotides of an iRNA of the invention include a 5′ phosphate or 5′ phosphate mimic, e.g., a 5′-terminal phosphate or phosphate mimic on the antisense strand of an iRNA. Suitable phosphate mimics are disclosed in, for example U.S. Patent Publication No. 2012/0157511, the entire contents of which are incorporated herein by reference.

A. Modified iRNAs Comprising Motifs of the Invention

[0192] In certain aspects of the invention, the double stranded RNA agents of the invention include agents with chemical modifications as disclosed, for example, in PCT Application No. PCT/US2021/057016, entitled “Modified Double Stranded Oligonucleotides”, filed on Oct. 28, 2021 (Attorney Docket No. ALN-384WO), the entire contents of which are incorporated herein by reference.

[0193] In certain aspects of the invention, the double stranded RNA agents of the invention include agents with chemical modifications as disclosed, for example, in WO2013/075035, the entire contents of each of which are incorporated herein by reference. As shown herein and in WO2013/075035, one or more motifs of three identical modifications on three consecutive nucleotides may be introduced into a sense strand or antisense strand of a dsRNAi agent, particularly at or near the cleavage site. In some embodiments, the sense strand and antisense strand of the dsRNAi agent may otherwise be completely modified. The introduction of these motifs interrupts the modification pattern, if present, of the sense or antisense strand. The dsRNAi agent may be optionally conjugated with a GalNAc derivative ligand, for instance on the sense strand.

[0194] More specifically, when the sense strand and antisense strand of the double stranded RNA agent are completely modified to have one or more motifs of three identical modifications on three consecutive nucleotides at or near the cleavage site of at least one strand of a dsRNAi agent, the gene silencing activity of the dsRNAi agent was observed.

[0195] Accordingly, the invention provides double stranded RNA agents capable of inhibiting the expression of a target gene (i.e., AGT gene) in vivo. The RNAi agent comprises a sense strand and an antisense strand. Each strand of the RNAi agent may be, for example, 17-30 nucleotides in length, 25-30 nucleotides in length, 27-30 nucleotides in length, 19-25 nucleotides in length, 19-23 nucleotides in length, 19-21 nucleotides in length, 21-25 nucleotides in length, or 21-23 nucleotides in length.

[0196] The sense strand and antisense strand typically form a duplex double stranded RNA (“dsRNA”), also referred to herein as “dsRNAi agent.” The duplex region of a dsRNAi agent may be, for example, the duplex region can be 27-30 nucleotide pairs in length, 19-25 nucleotide pairs in length, 19-23 nucleotide pairs in length, 19-21 nucleotide pairs in length, 21-25 nucleotide pairs in length, or 21-23 nucleotide pairs in length. In another example, the duplex region is selected from 19, 20, 21, 22, 23, 24, 25, 26, and 27 nucleotides in length.

[0197] In certain embodiments, the dsRNAi agent may contain one or more overhang regions or capping groups at the 3′-end. 5′-end, or both ends of one or both strands. The overhang can be, independently, 1-6 nucleotides in length, for instance 2-6 nucleotides in length, 1-5 nucleotides in length, 2-5 nucleotides in length, 1-4 nucleotides in length, 2-4 nucleotides in length, 1-3 nucleotides in length, 2-3 nucleotides in length, or 1-2 nucleotides in length. In certain embodiments, the overhang regions can include extended overhang regions as provided above. The overhangs can be the result of one strand being longer than the other, or the result of two strands of the same length being staggered. The overhang can form a mismatch with the target mRNA or it can be complementary to the gene sequences being targeted or can be another sequence. The first and second strands can also be joined, e.g., by additional bases to form a hairpin, or by other non-base linkers.

[0198] In certain embodiments, the nucleotides in the overhang region of the dsRNAi agent can each independently be a modified or unmodified nucleotide including, but no limited to 2′-sugar modified, such as, 2′-F. 2′-O-methyl, thymidine (T), 2′-O-methoxyethyl-5-methyluridine (Teo), 2′-O-methoxyethyladenosine (Aeo), 2-O-methoxyethyl-5-methylcytidine (m5Ceo), and any combinations thereof.

[0199] For example, TT can be an overhang sequence for either end on either strand. The overhang can form a mismatch with the target mRNA or it can be complementary to the gene sequences being targeted or can be another sequence.

[0200] The 5′- or 3′-overhangs at the sense strand, antisense strand, or both strands of the dsRNAi agent may be phosphorylated. In some embodiments, the overhang region(s) contains two nucleotides having a phosphorothioate between the two nucleotides, where the two nucleotides can be the same or different. In some embodiments, the overhang is present at the 3′-end of the sense strand, antisense strand, or both strands. In some embodiments, this 3′-overhang is present in the antisense strand. In some embodiments, this 3′-overhang is present in the sense strand.

[0201] The dsRNAi agent may contain only a single overhang, which can strengthen the interference activity of the RNAi, without affecting its overall stability. For example, the single-stranded overhang may be located at the 3′-end of the sense strand or, alternatively, at the 3′-end of the antisense strand. The RNAi may also have a blunt end, located at the 5′-end of the antisense strand (i.e., the 3′-end of the sense strand) or vice versa. Generally, the antisense strand of the dsRNAi agent has a nucleotide overhang at the 3′-end, and the 5′-end is blunt. While not wishing to be bound by theory, the asymmetric blunt end at the 5′-end of the antisense strand and 3′-end overhang of the antisense strand favor the guide strand loading into RISC process.

[0202] In certain embodiments, the dsRNAi agent is a double blunt-ended of 19 nucleotides in length, wherein the sense strand contains at least one motif of three 2′-F modifications on three consecutive nucleotides at positions 7, 8, 9 from the 5′end. The antisense strand contains at least one motif of three 2′-O-methyl modifications on three consecutive nucleotides at positions 11, 12, and 13 from the 5′end.

[0203] In other embodiments, the dsRNAi agent is a double blunt-ended of 20 nucleotides in length, wherein the sense strand contains at least one motif of three 2′-F modifications on three consecutive nucleotides at positions 8, 9, and 10 from the 5′end. The antisense strand contains at least one motif of three 2′-O-methyl modifications on three consecutive nucleotides at positions 11, 12, and 13 from the 5′end.

[0204] In yet other embodiments, the dsRNAi agent is a double blunt-ended of 21 nucleotides in length, wherein the sense strand contains at least one motif of three 2′-F modifications on three consecutive nucleotides at positions 9, 10, and 11 from the 5′end. The antisense strand contains at least one motif of three 2′-O-methyl modifications on three consecutive nucleotides at positions 11, 12, and 13 from the 5′end.

[0205] In certain embodiments, the dsRNAi agent comprises a 21 nucleotide sense strand and a 23 nucleotide antisense strand, wherein the sense strand contains at least one motif of three 2′-F modifications on three consecutive nucleotides at positions 9, 10, and 11 from the 5′end; the antisense strand contains at least one motif of three 2′-O-methyl modifications on three consecutive nucleotides at positions 11, 12, and 13 from the 5′end, wherein one end of the RNAi agent is blunt, while the other end comprises a 2 nucleotide overhang. In one embodiment, the 2 nucleotide overhang is at the 3′-end of the antisense strand.

[0206] When the 2 nucleotide overhang is at the 3′-end of the antisense strand, there may be two phosphorothioate internucleotide linkages between the terminal three nucleotides, wherein two of the three nucleotides are the overhang nucleotides, and the third nucleotide is a paired nucleotide next to the overhang nucleotide. In one embodiment, the RNAi agent additionally has two phosphorothioate internucleotide linkages between the terminal three nucleotides at both the 5′-end of the sense strand and at the 5′-end of the antisense strand. In certain embodiments, every nucleotide in the sense strand and the antisense strand of the dsRNAi agent, including the nucleotides that are part of the motifs are modified nucleotides. In certain embodiments each residue is independently modified with a 2′-O-methyl or 3′-fluoro, e.g., in an alternating motif. Optionally, the dsRNAi agent further comprises a ligand (such as, GalNAc₃).

[0207] In certain embodiments, the dsRNAi agent comprises a sense and an antisense strand, wherein the sense strand is 25-30 nucleotide residues in length, wherein starting from the 5′ terminal nucleotide (position 1) positions 1 to 23 of the first strand comprise at least 8 ribonucleotides; the antisense strand is 36-66 nucleotide residues in length and, starting from the 3′ terminal nucleotide, comprises at least 8 ribonucleotides in the positions paired with positions 1-23 of sense strand to form a duplex; wherein at least the 3 ‘terminal nucleotide of antisense strand is unpaired with sense strand, and up to 6 consecutive 3’ terminal nucleotides are unpaired with sense strand, thereby forming a 3′ single stranded overhang of 1-6 nucleotides; wherein the 5′ terminus of antisense strand comprises from 10-30 consecutive nucleotides which are unpaired with sense strand, thereby forming a 10-30 nucleotide single stranded 5′ overhang; wherein at least the sense strand 5′ terminal and 3′ terminal nucleotides are base paired with nucleotides of antisense strand when sense and antisense strands are aligned for maximum complementarity, thereby forming a substantially duplexed region between sense and antisense strands; and antisense strand is sufficiently complementary to a target RNA along at least 19 ribonucleotides of antisense strand length to reduce target gene expression when the double stranded nucleic acid is introduced into a mammalian cell; and wherein the sense strand contains at least one motif of three 2′-F modifications on three consecutive nucleotides, where at least one of the motifs occurs at or near the cleavage site. The antisense strand contains at least one motif of three 2′-O-methyl modifications on three consecutive nucleotides at or near the cleavage site.

[0208] In certain embodiments, the dsRNAi agent comprises sense and antisense strands, wherein the dsRNAi agent comprises a first strand having a length which is at least 25 and at most 29 nucleotides and a second strand having a length which is at most 30 nucleotides with at least one motif of three 2′-O-methyl modifications on three consecutive nucleotides at position 11, 12, 13 from the 5′ end; wherein the 3′ end of the first strand and the 5′ end of the second strand form a blunt end and the second strand is 1-4 nucleotides longer at its 3′ end than the first strand, wherein the duplex region which is at least 25 nucleotides in length, and the second strand is sufficiently complementary to a target mRNA along at least 19 nucleotide of the second strand length to reduce target gene expression when the RNAi agent is introduced into a mammalian cell, and wherein Dicer cleavage of the dsRNAi agent results in an siRNA comprising the 3′-end of the second strand, thereby reducing expression of the target gene in the mammal. Optionally, the dsRNAi agent further comprises a ligand.

[0209] In certain embodiments, the sense strand of the dsRNAi agent contains at least one motif of three identical modifications on three consecutive nucleotides, where one of the motifs occurs at the cleavage site in the sense strand.

[0210] In certain embodiments, the antisense strand of the dsRNAi agent can also contain at least one motif of three identical modifications on three consecutive nucleotides, where one of the motifs occurs at or near the cleavage site in the antisense strand.

[0211] For a dsRNAi agent having a duplex region of 19-23 nucleotides in length, the cleavage site of the antisense strand is typically around the 10, 11, and 12 positions from the 5′-end. Thus the motifs of three identical modifications may occur at the 9, 10, 11 positions; the 10, 11, 12 positions; the 11, 12, 13 positions; the 12, 13, 14 positions; or the 13, 14, 15 positions of the antisense strand, the count starting from the first nucleotide from the 5′-end of the antisense strand, or, the count starting from the first paired nucleotide within the duplex region from the 5′-end of the antisense strand. The cleavage site in the antisense strand may also change according to the length of the duplex region of the dsRNAi agent from the 5′-end.

[0212] The sense strand of the dsRNAi agent may contain at least one motif of three identical modifications on three consecutive nucleotides at the cleavage site of the strand; and the antisense strand may have at least one motif of three identical modifications on three consecutive nucleotides at or near the cleavage site of the strand. When the sense strand and the antisense strand form a dsRNA duplex, the sense strand and the antisense strand can be so aligned that one motif of the three nucleotides on the sense strand and one motif of the three nucleotides on the antisense strand have at least one nucleotide overlap, i.e., at least one of the three nucleotides of the motif in the sense strand forms a base pair with at least one of the three nucleotides of the motif in the antisense strand. Alternatively, at least two nucleotides may overlap, or all three nucleotides may overlap.

[0213] In some embodiments, the sense strand of the dsRNAi agent may contain more than one motif of three identical modifications on three consecutive nucleotides. The first motif may occur at or near the cleavage site of the strand and the other motifs may be a wing modification. The term “wing modification” herein refers to a motif occurring at another portion of the strand that is separated from the motif at or near the cleavage site of the same strand. The wing modification is either adjacent to the first motif or is separated by at least one or more nucleotides. When the motifs are immediately adjacent to each other then the chemistries of the motifs are distinct from each other, and when the motifs are separated by one or more nucleotide than the chemistries can be the same or different. Two or more wing modifications may be present. For instance, when two wing modifications are present, each wing modification may occur at one end relative to the first motif which is at or near cleavage site or on either side of the lead motif.

[0214] Like the sense strand, the antisense strand of the dsRNAi agent may contain more than one motif of three identical modifications on three consecutive nucleotides, with at least one of the motifs occurring at or near the cleavage site of the strand. This antisense strand may also contain one or more wing modifications in an alignment similar to the wing modifications that may be present on the sense strand.

[0215] In some embodiments, the wing modification on the sense strand or antisense strand of the dsRNAi agent typically does not include the first one or two terminal nucleotides at the 3′-end, 5′-end, or both ends of the strand.

[0216] In other embodiments, the wing modification on the sense strand or antisense strand of the dsRNAi agent typically does not include the first one or two paired nucleotides within the duplex region at the 3′-end, 5′-end, or both ends of the strand.

[0217] When the sense strand and the antisense strand of the dsRNAi agent each contain at least one wing modification, the wing modifications may fall on the same end of the duplex region, and have an overlap of one, two, or three nucleotides.

[0218] When the sense strand and the antisense strand of the dsRNAi agent each contain at least two wing modifications, the sense strand and the antisense strand can be so aligned that two modifications each from one strand fall on one end of the duplex region, having an overlap of one, two, or three nucleotides; two modifications each from one strand fall on the other end of the duplex region, having an overlap of one, two or three nucleotides; two modifications one strand fall on each side of the lead motif, having an overlap of one, two or three nucleotides in the duplex region.

[0219] In some embodiments, every nucleotide in the sense strand and antisense strand of the dsRNAi agent, including the nucleotides that are part of the motifs, may be modified. Each nucleotide may be modified with the same or different modification which can include one or more alteration of one or both of the non-linking phosphate oxygens or of one or more of the linking phosphate oxygens; alteration of a constituent of the ribose sugar, e.g., of the 2′-hydroxyl on the ribose sugar; wholesale replacement of the phosphate moiety with “dephospho” linkers; modification or replacement of a naturally occurring base; and replacement or modification of the ribose-phosphate backbone.

[0220] As nucleic acids are polymers of subunits, many of the modifications occur at a position which is repeated within a nucleic acid, e.g., a modification of a base, or a phosphate moiety, or a non-linking O of a phosphate moiety. In some cases the modification will occur at all of the subject positions in the nucleic acid but in many cases it will not. By way of example, a modification may only occur at a 3′- or 5′ terminal position, may only occur in a terminal region, e.g., at a position on a terminal nucleotide or in the last 2, 3, 4, 5, or 10 nucleotides of a strand. A modification may occur in a double strand region, a single strand region, or in both. A modification may occur only in the double strand region of an RNA or may only occur in a single strand region of a RNA. For example, a phosphorothioate modification at a non-linking O position may only occur at one or both termini, may only occur in a terminal region, e.g., at a position on a terminal nucleotide or in the last 2, 3, 4, 5, or 10 nucleotides of a strand, or may occur in double strand and single strand regions, particularly at termini. The 5′-end or ends can be phosphorylated.

[0221] It may be possible, e.g., to enhance stability, to include particular bases in overhangs, or to include modified nucleotides or nucleotide surrogates, in single strand overhangs, e.g., in a 5′- or 3′-overhang, or in both. For example, it can be desirable to include purine nucleotides in overhangs. In some embodiments all or some of the bases in a 3′- or 5′-overhang may be modified, e.g., with a modification described herein. Modifications can include, e.g., the use of modifications at the 2′ position of the ribose sugar with modifications that are known in the art, e.g., the use of deoxyribonucleotides, 2′-deoxy-2′-fluoro (2′-F) or 2′-O-methyl modified instead of the ribosugar of the nucleobase, and modifications in the phosphate group, e.g., phosphorothioate modifications. Overhangs need not be homologous with the target sequence.

[0222] In some embodiments, each residue of the sense strand and antisense strand is independently modified with LNA, CRN, CET, UNA, HNA, CeNA, 2′-methoxyethyl, 2′-O-methyl, 2′-O-allyl, 2′-C-allyl, 2′-deoxy, 2′-hydroxyl, or 2′-fluoro. The strands can contain more than one modification. In one embodiment, each residue of the sense strand and antisense strand is independently modified with 2′-O-methyl or 2′-fluoro.

[0223] At least two different modifications are typically present on the sense strand and antisense strand. Those two modifications may be the 2′-O-methyl or 2′-fluoro modifications, or others.

[0224] In certain embodiments, the Nₐ or N_{b} comprise modifications of an alternating pattern. The term “alternating motif” as used herein refers to a motif having one or more modifications, each modification occurring on alternating nucleotides of one strand. The alternating nucleotide may refer to one per every other nucleotide or one per every three nucleotides, or a similar pattern. For example, if A, B and C each represent one type of modification to the nucleotide, the alternating motif can be “ABABABABABAB . . . ” “AABBAABBAABB . . . ,” “AABAABAABAAB . . . ” “AAABAAABAAAB . . . ” “AAABBBAAABBB . . . ,” or “ABCABCABCABC . . . ,” etc.

[0225] The type of modifications contained in the alternating motif may be the same or different. For example, if A, B, C, D each represent one type of modification on the nucleotide, the alternating pattern, i.e., modifications on every other nucleotide, may be the same, but each of the sense strand or antisense strand can be selected from several possibilities of modifications within the alternating motif such as “ABABAB . . . ”, “ACACAC . . . ” “BDBDBD . . . ” or “CDCDCD . . . ” etc.

[0226] In some embodiments, the dsRNAi agent of the invention comprises the modification pattern for the alternating motif on the sense strand relative to the modification pattern for the alternating motif on the antisense strand is shifted. The shift may be such that the modified group of nucleotides of the sense strand corresponds to a differently modified group of nucleotides of the antisense strand and vice versa. For example, the sense strand when paired with the antisense strand in the dsRNA duplex, the alternating motif in the sense strand may start with “ABABAB” from 5′ to 3′ of the strand and the alternating motif in the antisense strand may start with “BABABA” from 5′ to 3′ of the strand within the duplex region. As another example, the alternating motif in the sense strand may start with “AABBAABB” from 5′ to 3′ of the strand and the alternating motif in the antisense strand may start with “BBAABBAA” from 5′ to 3′ of the strand within the duplex region, so that there is a complete or partial shift of the modification patterns between the sense strand and the antisense strand.

[0227] In one particular example, the alternating motif in the sense strand is “ABABAB” s from 5′ 3′ of the strand, where each A is an unmodified ribonucleotide and each B is a 2′-Omethyl modified nucleotide.

[0228] In one particular example, the alternating motif in the sense strand is “ABABAB” s from 5′ 3′ of the strand, where each A is an 2′-deoxy-2′-fluoro modified nucleotide and each B is a 2′-Omethyl modified nucleotide.

[0229] In another particular example, the alternating motif in the antisense strand is “BABABA” from 3′-5′ of the strand, where each A is a 2′-deoxy-2′-fluoro modified nucleotide and each B is a 2′-Omethyl modified nucleotide.

[0230] In one particular example, the alternating motif in the sense strand is “ABABAB” s from 5′ 3′ of the strand and the alternating motif in the antisense strand is “BABABA” from 3′-5′ of the strand, where each A is an unmodified ribonucleotide and each B is a 2′-Omethyl modified nucleotide.

[0231] In one particular example, the alternating motif in the sense strand is “ABABAB” s from 5′ 3′ of the strand and the alternating motif in the antisense strand is “BABABA” from 3′-5′ of the strand, where each A is a 2′-deoxy-2′-fluoro modified nucleotide and each B is a 2′-Omethyl modified nucleotide.

[0232] In some embodiments, the dsRNAi agent comprises the pattern of the alternating motif of 2′-O-methyl modification and 2′-F modification on the sense strand initially has a shift relative to the pattern of the alternating motif of 2′-O-methyl modification and 2′-F modification on the antisense strand initially, i.e., the 2′-O-methyl modified nucleotide on the sense strand base pairs with a 2′-F modified nucleotide on the antisense strand and vice versa. The 1 position of the sense strand may start with the 2′-F modification, and the 1 position of the antisense strand may start with the 2′-O-methyl modification.

[0233] The introduction of one or more motifs of three identical modifications on three consecutive nucleotides to the sense strand or antisense strand interrupts the initial modification pattern present in the sense strand or antisense strand. This interruption of the modification pattern of the sense or antisense strand by introducing one or more motifs of three identical modifications on three consecutive nucleotides to the sense or antisense strand may enhance the gene silencing activity against the target gene.

[0234] In some embodiments, when the motif of three identical modifications on three consecutive nucleotides is introduced to any of the strands, the modification of the nucleotide next to the motif is a different modification than the modification of the motif. For example, the portion of the sequence containing the motif is “ . . . . Nₐ YYYN_{b} . . . ” where “Y” represents the modification of the motif of three identical modifications on three consecutive nucleotide, and “Nₐ” and “N_{b}” represent a modification to the nucleotide next to the motif “YYY” that is different than the modification of Y, and where Nₐ and N_{b} can be the same or different modifications. Alternatively, Nₐ or N_{b} may be present or absent when there is a wing modification present.

[0235] The iRNA may further comprise at least one phosphorothioate or methylphosphonate internucleotide linkage. The phosphorothioate or methylphosphonate internucleotide linkage modification may occur on any nucleotide of the sense strand, antisense strand, or both strands in any position of the strand. For instance, the internucleotide linkage modification may occur on every nucleotide on the sense strand or antisense strand; each internucleotide linkage modification may occur in an alternating pattern on the sense strand or antisense strand; or the sense strand or antisense strand may contain both internucleotide linkage modifications in an alternating pattern. The alternating pattern of the internucleotide linkage modification on the sense strand may be the same or different from the antisense strand, and the alternating pattern of the internucleotide linkage modification on the sense strand may have a shift relative to the alternating pattern of the internucleotide linkage modification on the antisense strand. In one embodiment, a double-stranded RNAi agent comprises 6-8 phosphorothioate internucleotide linkages. In some embodiments, the antisense strand comprises two phosphorothioate internucleotide linkages at the 5′-end and two phosphorothioate internucleotide linkages at the 3′-end, and the sense strand comprises at least two phosphorothioate internucleotide linkages at either the 5′-end or the 3′-end.

[0236] In some embodiments, the dsRNAi agent comprises a phosphorothioate or methylphosphonate internucleotide linkage modification in the overhang region. For example, the overhang region may contain two nucleotides having a phosphorothioate or methylphosphonate internucleotide linkage between the two nucleotides. Internucleotide linkage modifications also may be made to link the overhang nucleotides with the terminal paired nucleotides within the duplex region. For example, at least 2, 3, 4, or all the overhang nucleotides may be linked through phosphorothioate or methylphosphonate internucleotide linkage, and optionally, there may be additional phosphorothioate or methylphosphonate internucleotide linkages linking the overhang nucleotide with a paired nucleotide that is next to the overhang nucleotide. For instance, there may be at least two phosphorothioate internucleotide linkages between the terminal three nucleotides, in which two of the three nucleotides are overhang nucleotides, and the third is a paired nucleotide next to the overhang nucleotide. These terminal three nucleotides may be at the 3′-end of the antisense strand, the 3′-end of the sense strand, the 5′-end of the antisense strand, or the 5′end of the antisense strand.

[0237] In some embodiments, the 2-nucleotide overhang is at the 3′-end of the antisense strand, and there are two phosphorothioate internucleotide linkages between the terminal three nucleotides, wherein two of the three nucleotides are the overhang nucleotides, and the third nucleotide is a paired nucleotide next to the overhang nucleotide. Optionally, the dsRNAi agent may additionally have two phosphorothioate internucleotide linkages between the terminal three nucleotides at both the 5′-end of the sense strand and at the 5′-end of the antisense strand.

[0238] In one embodiment, the dsRNAi agent comprises mismatch(es) with the target, within the duplex, or combinations thereof. The mismatch may occur in the overhang region or the duplex region. The base pair may be ranked on the basis of their propensity to promote dissociation or melting (e.g., on the free energy of association or dissociation of a particular pairing, the simplest approach is to examine the pairs on an individual pair basis, though next neighbor or similar analysis can also be used). In terms of promoting dissociation: A:U is preferred over G:C; G:U is preferred over G:C; and I:C is preferred over G:C (I=inosine). Mismatches, e.g., non-canonical or other than canonical pairings (as described elsewhere herein) are preferred over canonical (A: T, A:U, G:C) pairings; and pairings which include a universal base are preferred over canonical pairings.

[0239] In certain embodiments, the dsRNAi agent comprises at least one of the first 1, 2, 3, 4, or 5 base pairs within the duplex regions from the 5′-end of the antisense strand independently selected from the group of: A:U, G:U, I:C, and mismatched pairs, e.g., non-canonical or other than canonical pairings or pairings which include a universal base, to promote the dissociation of the antisense strand at the 5′-end of the duplex.

[0240] In certain embodiments, the nucleotide at the 1 position within the duplex region from the 5′-end in the antisense strand is selected from A, dA, dU, U, and dT. Alternatively, at least one of the first 1, 2, or 3 base pair within the duplex region from the 5′-end of the antisense strand is an AU base pair. For example, the first base pair within the duplex region from the 5′-end of the antisense strand is an AU base pair.

[0241] In other embodiments, the nucleotide at the 3′-end of the sense strand is deoxythimidine (dT) or the nucleotide at the 3′-end of the antisense strand is deoxythimidine (dT). For example, there is a short sequence of deoxythimidine nucleotides, for example, two dT nucleotides on the 3′-end of the sense, antisense strand, or both strands.

[0242] In certain embodiments, the sense strand sequence may be represented by formula (I):

(I)
5′ nₚ-Nₐ-(X X X)ᵢ-N_{b}-Y Y Y -N_{b}-(Z Z Z)ⱼ- Nₐ-n_{q} 3′

[0243] wherein:
[0244] i and j are each independently 0 or 1;
[0245] p and q are each independently 0-6;
[0246] each Nₐ independently represents an oligonucleotide sequence comprising 0-25 modified nucleotides, each sequence comprising at least two differently modified nucleotides;
[0247] each N_{b} independently represents an oligonucleotide sequence comprising 0-10 modified nucleotides;
[0248] each nₚ and n_{q} independently represent an overhang nucleotide;
[0249] wherein N_{b} and Y do not have the same modification; and
[0250] XXX, YYY, and ZZZ each independently represent one motif of three identical modifications on three consecutive nucleotides. In one embodiment, YYY is all 2′-F modified nucleotides.

[0251] In some embodiments, the Nₐ or N_{b} comprises modifications of alternating pattern.

[0252] In some embodiments, the YYY motif occurs at or near the cleavage site of the sense strand. For example, when the dsRNAi agent has a duplex region of 17-23 nucleotides in length, the YYY motif can occur at or the vicinity of the cleavage site (e.g.: can occur at positions 6, 7, 8; 7, 8, 9; 8, 9, 10; 9, 10, 11; 10, 11,12; or 11, 12, 13) of the sense strand, the count starting from the first nucleotide, from the 5′-end; or optionally, the count starting at the first paired nucleotide within the duplex region, from the 5′-end.

[0253] In one embodiment, i is 1 and j is 0, or i is 0 and j is 1, or both i and j are 1. The sense strand can therefore be represented by the following formulas:

(Ib)
5′ nₚ-Nₐ-YYY-N_{b}-ZZZ-Nₐ-n_{q} 3′;
(Ic)
5′ nₚ-Nₐ-XXX-N_{b}-YYY-Nₐ-n_{q} 3′;
or
(Id)
5′ nₚ-Nₐ-XXX-N_{b}-YYY-N_{b}-ZZZ-Nₐ-n_{q} 3′.

[0254] When the sense strand is represented by formula (Ib), No represents an oligonucleotide sequence comprising 0-10, 0-7, 0-5, 0-4, 0-2, or 0 modified nucleotides. Each Nₐ independently can represent an oligonucleotide sequence comprising 2-20, 2-15, or 2-10 modified nucleotides.

[0255] When the sense strand is represented as formula (Ic), N_{b} represents an oligonucleotide sequence comprising 0-10, 0-7, 0-10, 0-7, 0-5, 0-4, 0-2, or 0 modified nucleotides. Each Nₐ can independently represent an oligonucleotide sequence comprising 2-20, 2-15, or 2-10 modified nucleotides.

[0256] When the sense strand is represented as formula (Id), each N_{b} independently represents an oligonucleotide sequence comprising 0-10, 0-7, 0-5, 0-4, 0-2, or 0 modified nucleotides. In one embodiment, No is 0, 1, 2, 3, 4, 5, or 6 Each Nₐ can independently represent an oligonucleotide sequence comprising 2-20, 2-15, or 2-10 modified nucleotides.

[0257] Each of X, Y and Z may be the same or different from each other.

[0258] In other embodiments, i is 0 and j is 0, and the sense strand may be represented by the formula:

(Ia)
5′ nₚ-Nₐ-YYY- Nₐ-n_{q} 3′.

[0259] When the sense strand is represented by formula (Ia), each Nₐ independently can represent an oligonucleotide sequence comprising 2-20, 2-15, or 2-10 modified nucleotides.

[0260] In one embodiment, the antisense strand sequence of the RNAi may be represented by formula (II):

(II)
5′ n_{q′}-Nₐ′-(Z′Z′Z′)ₖ-N_{b}′-Y′Y′Y′-N_{b}′-(X′X′X′)ₗ-N′ₐ-
nₚ′ 3′

[0261] wherein:
[0262] k and l are each independently 0 or 1;
[0263] p′ and q′ are each independently 0-6;
[0264] each Nₐ′ independently represents an oligonucleotide sequence comprising 0-25 modified nucleotides, each sequence comprising at least two differently modified nucleotides;
[0265] each N_{b}′ independently represents an oligonucleotide sequence comprising 0-10 modified nucleotides;
[0266] each nₚ′ and n_{q}′ independently represent an overhang nucleotide;
[0267] wherein N_{b}′ and Y′ do not have the same modification; and
[0268] X′X′X′, Y′Y′Y′, and Z′Z′Z′ each independently represent one motif of three identical modifications on three consecutive nucleotides.

[0269] In some embodiments, the Nₐ′ or N_{b}′ comprises modifications of alternating pattern.

[0270] The Y′Y′Y′ motif occurs at or near the cleavage site of the antisense strand. For example, when the dsRNAi agent has a duplex region of 17-23 nucleotides in length, the Y′Y′Y′ motif can occur at positions 9, 10, 11; 10, 11, 12; 11, 12, 13; 12, 13, 14; or 13, 14, 15 of the antisense strand, with the count starting from the first nucleotide, from the 5′-end; or optionally, the count starting at the first paired nucleotide within the duplex region, from the 5′-end. In one embodiment, the Y′Y′Y′ motif occurs at positions 11, 12, 13.

[0271] In certain embodiments, Y′Y′Y′ motif is all 2′-OMe modified nucleotides.

[0272] In certain embodiments, k is 1 and 1 is 0, or k is 0 and l is 1, or both k and l are 1.

[0273] The antisense strand can therefore be represented by the following formulas:

(IIb)
5′ n_{q′}-Nₐ′-Z′Z′Z′-N_{b}′-Y′Y′Y′-Nₐ′-n_{p′} 3′;
(IIc)
5′ n_{q′}-Nₐ′-Y′Y′Y′-N_{b}′-X′X′X′-n_{p′} 3′;
or
(IId)
5′ n_{q′}-Nₐ′- Z′Z′Z′-N_{b}′-Y′Y′Y′-N_{b}′- X′X′X′-Nₐ′-n_{p′}
3′.

[0274] When the antisense strand is represented by formula (IIb), N_{b}′ represents an oligonucleotide sequence comprising 0-10, 0-7, 0-10, 0-7, 0-5, 0-4, 0-2, or 0 modified nucleotides. Each Nₐ′ independently represents an oligonucleotide sequence comprising 2-20, 2-15, or 2-10 modified nucleotides.

[0275] When the antisense strand is represented as formula (IIc), N_{b}′ represents an oligonucleotide sequence comprising 0-10, 0-7, 0-10, 0-7, 0-5, 0-4, 0-2, or 0 modified nucleotides. Each Nₐ′ independently represents an oligonucleotide sequence comprising 2-20, 2-15, or 2-10 modified nucleotides.

[0276] When the antisense strand is represented as formula (IId), each N_{b}′ independently represents an oligonucleotide sequence comprising 0-10, 0-7, 0-10, 0-7, 0-5, 0-4, 0-2, or 0 modified nucleotides. Each Nₐ′ independently represents an oligonucleotide sequence comprising 2-20, 2-15, or 2-10 modified nucleotides. In one embodiment, N_{b} is 0, 1, 2, 3, 4, 5, or 6.

[0277] In other embodiments, k is 0 and 1 is 0 and the antisense strand may be represented by the formula:

(Ia)
5′ n_{p′}-N_{a′}-Y′Y′Y′- N_{a′}-n_{q′} 3′.

[0278] When the antisense strand is represented as formula (IIa), each Nₐ′ independently represents an oligonucleotide sequence comprising 2-20, 2-15, or 2-10 modified nucleotides. Each of X′, Y′ and Z′ may be the same or different from each other.

[0279] Each nucleotide of the sense strand and antisense strand may be independently modified with LNA, CRN, UNA, cEt, HNA, CeNA, 2′-methoxyethyl, 2′-O-methyl, 2′-O-allyl, 2′-C-allyl, 2′-hydroxyl, or 2′-fluoro. For example, each nucleotide of the sense strand and antisense strand is independently modified with 2′-O-methyl or 2′-fluoro. Each X, Y, Z, X′, Y′, and Z′, in particular, may represent a 2′-O-methyl modification or a 2′-fluoro modification.

[0280] In some embodiments, the sense strand of the dsRNAi agent may contain YYY motif occurring at 9, 10, and 11 positions of the strand when the duplex region is 21 nt, the count starting from the first nucleotide from the 5′-end, or optionally, the count starting at the first paired nucleotide within the duplex region, from the 5′-end; and Y represents 2′-F modification. The sense strand may additionally contain XXX motif or ZZZ motifs as wing modifications at the opposite end of the duplex region; and XXX and ZZZ each independently represents a 2′-OMe modification or 2′-F modification.

[0281] In some embodiments the antisense strand may contain Y′Y′Y′ motif occurring at positions 11, 12, 13 of the strand, the count starting from the first nucleotide from the 5′-end, or optionally, the count starting at the first paired nucleotide within the duplex region, from the 5′-end; and Y′ represents 2′-O-methyl modification. The antisense strand may additionally contain X′X′X′ motif or Z′Z′Z′ motifs as wing modifications at the opposite end of the duplex region; and X′X′X′ and Z′Z′Z′ each independently represents a 2′-OMe modification or 2′-F modification.

[0282] The sense strand represented by any one of the above formulas (Ia), (Ib), (Ic), and (Id) forms a duplex with an antisense strand being represented by any one of formulas (IIa), (IIb), (IIc), and (IId), respectively.

[0283] Accordingly, the dsRNAi agents for use in the methods of the invention may comprise a sense strand and an antisense strand, each strand having 14 to 30 nucleotides, the iRNA duplex represented by formula (III):

(III)
sense:
5′ nₚ -Nₐ-(X X X)ᵢ-N_{b}- Y Y Y -N_{b}-(ZZZ)ⱼ-Nₐ-n_{q} 3′
antisense:
3′ nₚ′-Nₐ′ -(X′X′X′)ₖ-N_{b}′-Y′Y′Y′-N_{b}′-(Z′Z′Z′)ₗ-
Nₐ′-n_{q}′ 5′

[0284] wherein:
[0285] i, j, k, and I are each independently 0 or 1;
[0286] p, p′, q, and q′ are each independently 0-6;
[0287] each Nₐ and Nₐ independently represents an oligonucleotide sequence comprising 0-25 modified nucleotides, each sequence comprising at least two differently modified nucleotides;
[0288] each No and N_{b}′ independently represents an oligonucleotide sequence comprising 0-10 modified nucleotides;
[0289] wherein each nₚ′, nₚ, n_{q}′, and n_{q}, each of which may or may not be present, independently represents an overhang nucleotide; and
[0290] XXX, YYY, ZZZ, X′X′X′, Y′Y′Y′, and Z′Z′Z′ each independently represent one motif of three identical modifications on three consecutive nucleotides.

[0291] In one embodiment, i is 0 and j is 0; or i is 1 and j is 0; or i is 0 and j is 1; or both i and j are 0; or both i and j are 1. In another embodiment, k is 0 and 1 is 0; or k is 1 and 1 is 0; k is 0 and 1 is 1; or both k and l are 0; or both k and l are 1.

[0292] Exemplary combinations of the sense strand and antisense strand forming an iRNA duplex include the formulas below:

(IIIa)
5′ nₚ - Nₐ -Y Y Y -Nₐ-n_{q} 3′
3′ nₚ′-Nₐ′-Y′Y′Y′ -Nₐ′n_{q}′ 5′
(IIIb)
5′ nₚ -Nₐ -Y Y Y -N_{b}-ZZZ -Nₐ-n_{q} 3′
3′ nₚ′-Nₐ′-Y′Y′Y′-N_{b}′-Z′Z′Z′-Nₐ′n_{q}′ 5′
(IIIc)
5′ nₚ-Nₐ- X X X -N_{b} -Y Y Y - Nₐ-n_{q} 3′
3′ nₚ′-Nₐ′-X′X′X′-N_{b}′-Y′Y′Y′-Nₐ′-n_{q}′ 5′
(IIId)
5′ nₚ -Nₐ -X X X -N_{b}-Y Y Y -N_{b}- ZZZ -Nₐ-n_{q} 3′
3′ nₚ′-Nₐ′ -X′X′X′-N_{b}′-Y′Y′Y′-N_{b}′ -Z′Z′Z′-Nₐ-n_{q}′
5′

[0293] When the dsRNAi agent is represented by formula (IIIa), each Nₐ independently represents an oligonucleotide sequence comprising 2-20, 2-15, or 2-10 modified nucleotides.

[0294] When the dsRNAi agent is represented by formula (IIIb), each N_{b} independently represents an oligonucleotide sequence comprising 1-10, 1-7, 1-5, or 1-4 modified nucleotides. Each Nₐ independently represents an oligonucleotide sequence comprising 2-20, 2-15, or 2-10 modified nucleotides.

[0295] When the dsRNAi agent is represented as formula (IIIc), each N_{b}, N_{b}′ independently represents an oligonucleotide sequence comprising 0-10, 0-7, 0-10, 0-7, 0-5, 0-4, 0-2, or 0 modified nucleotides. Each Nₐ independently represents an oligonucleotide sequence comprising 2-20, 2-15, or 2-10 modified nucleotides.

[0296] When the dsRNAi agent is represented as formula (IIId), each N_{b}, N_{b}′ independently represents an oligonucleotide sequence comprising 0-10, 0-7, 0-10, 0-7, 0-5, 0-4, 0-2, or 0 modified nucleotides. Each Nₐ, Nₐ′ independently represents an oligonucleotide sequence comprising 2-20, 2-15, or 2-10 modified nucleotides. Each of Nₐ, Nₐ′, N_{b}. and No′ independently comprises modifications of alternating pattern.

[0297] Each of X, Y, and Z in formulas (III), (IIIa), (IIIb), (IIIc), and (IIId) may be the same or different from each other.

[0298] When the dsRNAi agent is represented by formula (III), (IIIa), (IIIb), (IIIc), and (IIId), at least one of the Y nucleotides may form a base pair with one of the Y′ nucleotides. Alternatively, at least two of the Y nucleotides form base pairs with the corresponding Y′ nucleotides; or all three of the Y nucleotides all form base pairs with the corresponding Y′ nucleotides.

[0299] When the dsRNAi agent is represented by formula (IIIb) or (IIId), at least one of the Z nucleotides may form a base pair with one of the Z′ nucleotides. Alternatively, at least two of the Z nucleotides form base pairs with the corresponding Z′ nucleotides; or all three of the Z nucleotides all form base pairs with the corresponding Z′ nucleotides.

[0300] When the dsRNAi agent is represented as formula (IIIc) or (IIId), at least one of the X nucleotides may form a base pair with one of the X′ nucleotides. Alternatively, at least two of the X nucleotides form base pairs with the corresponding X′ nucleotides; or all three of the X nucleotides all form base pairs with the corresponding X′ nucleotides.

[0301] In certain embodiments, the modification on the Y nucleotide is different than the modification on the Y′ nucleotide, the modification on the Z nucleotide is different than the modification on the Z′ nucleotide, or the modification on the X nucleotide is different than the modification on the X′ nucleotide.

[0302] In certain embodiments, when the dsRNAi agent is represented by formula (IIId), the Nₐ modifications are 2′-O-methyl or 2′-fluoro modifications. In other embodiments, when the RNAi agent is represented by formula (IIId), the Nₐ modifications are 2′-O-methyl or 2′-fluoro modifications and nₚ′>0 and at least one nₚ′ is linked to a neighboring nucleotide a via phosphorothioate linkage. In yet other embodiments, when the RNAi agent is represented by formula (IIId), the Nₐ modifications are 2′-O-methyl or 2′-fluoro modifications, nₚ′>0 and at least one nₚ′ is linked to a neighboring nucleotide via phosphorothioate linkage, and the sense strand is conjugated to one or more GalNAc derivatives attached through a bivalent or trivalent branched linker (described below). In other embodiments, when the RNAi agent is represented by formula (IIId), the Nₐ modifications are 2′-O-methyl or 2′-fluoro modifications, nₚ′>0 and at least one nₚ′ is linked to a neighboring nucleotide via phosphorothioate linkage, the sense strand comprises at least one phosphorothioate linkage, and the sense strand is conjugated to one or more GalNAc derivatives attached through a bivalent or trivalent branched linker.

[0303] In some embodiments, when the dsRNAi agent is represented by formula (IIIa), the Nₐ modifications are 2′-O-methyl or 2′-fluoro modifications, nₚ′>0 and at least one nₚ′ is linked to a neighboring nucleotide via phosphorothioate linkage, the sense strand comprises at least one phosphorothioate linkage, and the sense strand is conjugated to one or more GalNAc derivatives attached through a bivalent or trivalent branched linker.

[0304] In some embodiments, the dsRNAi agent is a multimer containing at least two duplexes represented by formula (III), (IIIa), (IIIb), (IIIc), and (IIId), wherein the duplexes are connected by a linker. The linker can be cleavable or non-cleavable. Optionally, the multimer further comprises a ligand. Each of the duplexes can target the same gene or two different genes; or each of the duplexes can target same gene at two different target sites.

[0305] In some embodiments, the dsRNAi agent is a multimer containing three, four, five, six, or more duplexes represented by formula (III), (IIIa), (IIIb), (IIIc), and (IIId), wherein the duplexes are connected by a linker. The linker can be cleavable or non-cleavable. Optionally, the multimer further comprises a ligand. Each of the duplexes can target the same gene or two different genes; or each of the duplexes can target same gene at two different target sites.

[0306] In one embodiment, two dsRNAi agents represented by at least one of formulas (III), (IIIa), (IIIb), (IIIc), and (IIId) are linked to each other at the 5′ end, and one or both of the 3′ ends, and are optionally conjugated to a ligand. Each of the agents can target the same gene or two different genes; or each of the agents can target same gene at two different target sites.

[0307] In certain embodiments, an RNAi agent of the invention may contain a low number of nucleotides containing a 2′-fluoro modification, e.g., 10 or fewer nucleotides with 2′-fluoro modification. For example, the RNAi agent may contain 10, 9, 8, 7, 6, 5, 4, 3, 2, 1 or 0 nucleotides with a 2′-fluoro modification. In a specific embodiment, the RNAi agent of the invention contains 10 nucleotides with a 2′-fluoro modification, e.g., 4 nucleotides with a 2′-fluoro modification in the sense strand and 6 nucleotides with a 2′-fluoro modification in the antisense strand. In another specific embodiment, the RNAi agent of the invention contains 6 nucleotides with a 2′-fluoro modification, e.g., 4 nucleotides with a 2′-fluoro modification in the sense strand and 2 nucleotides with a 2′-fluoro modification in the antisense strand.

[0308] In other embodiments, an RNAi agent of the invention may contain an ultra low number of nucleotides containing a 2′-fluoro modification, e.g., 2 or fewer nucleotides containing a 2′-fluoro modification. For example, the RNAi agent may contain 2, 1 of 0 nucleotides with a 2′-fluoro modification. In a specific embodiment, the RNAi agent may contain 2 nucleotides with a 2′-fluoro modification, e.g., 0 nucleotides with a 2-fluoro modification in the sense strand and 2 nucleotides with a 2′-fluoro modification in the antisense strand.

[0309] Various publications describe multimeric iRNAs that can be used in the methods of the invention. Such publications include WO2007/091269, U.S. Pat. No. 7,858,769, WO2010/141511, WO2007/117686, WO2009/014887, and WO2011/031520 the entire contents of each of which are hereby incorporated herein by reference.

[0310] In certain embodiments, the compositions and methods of the disclosure include a vinyl phosphonate (VP) modification of an RNAi agent as described herein. In exemplary embodiments, a 5′ vinyl phosphonate modified nucleotide of the disclosure has the structure:

[chemical structure]

wherein X is O or S;
[0311] R is hydrogen, hydroxy, fluoro, or C₁-20alkoxy (e.g., methoxy or n-hexadecyloxy);
[0312] R^{5′} is ═C(H)—P(O)(OH), and the double bond between the C5′ carbon and R^{5′} is in the E or Z orientation (e.g., E orientation); and

[0313] B is a nucleobase or a modified nucleobase, optionally where B is adenine, guanine, cytosine, thymine, or uracil.

[0314] In one embodiment, R5′ is ═C(H)—P(O)(OH)₂ and the double bond between the C5′ carbon and R5′ is in the E orientation. In another embodiment, R is methoxy and R5′ is ═C(H)—P(O)(OH)₂ and the double bond between the C₅′ carbon and R5′ is in the E orientation. In another embodiment, X is S, R is methoxy, and R^{5′} is ═C(H)—P(O)(OH), and the double bond between the C₅′ carbon and R5′ is in the E orientation.

[0315] A vinyl phosphonate of the instant disclosure may be attached to either the antisense or the sense strand of a dsRNA of the disclosure. In certain embodiments, a vinyl phosphonate of the instant disclosure is attached to the antisense strand of a dsRNA, optionally at the 5′ end of the antisense strand of the dsRNA.

[0316] Vinyl phosphonate modifications are also contemplated for the compositions and methods of the instant disclosure. An exemplary vinyl phosphonate structure includes the preceding structure, where R5′ is ═C(H)—OP(O)(OH)₂ and the double bond between the C₅′ carbon and R5′ is in the E or Z orientation (e.g., E orientation).

[0317] As described in more detail below, the iRNA that contains conjugations of one or more carbohydrate moieties to an iRNA can optimize one or more properties of the iRNA. In many cases, the carbohydrate moiety will be attached to a modified subunit of the iRNA. For example, the ribose sugar of one or more ribonucleotide subunits of a iRNA can be replaced with another moiety, e.g., a non-carbohydrate (such as, cyclic) carrier to which is attached a carbohydrate ligand. A ribonucleotide subunit in which the ribose sugar of the subunit has been so replaced is referred to herein as a ribose replacement modification subunit (RRMS). A cyclic carrier may be a carbocyclic ring system, i.e., all ring atoms are carbon atoms, or a heterocyclic ring system, i.e., one or more ring atoms may be a heteroatom, e.g., nitrogen, oxygen, sulfur. The cyclic carrier may be a monocyclic ring system, or may contain two or more rings, e.g. fused rings. The cyclic carrier may be a fully saturated ring system, or it may contain one or more double bonds.

[0318] The ligand may be attached to the polynucleotide via a carrier. The carriers include (i) at least one “backbone attachment point.” such as, two “backbone attachment points” and (ii) at least one “tethering attachment point.” A “backbone attachment point” as used herein refers to a functional group, e.g. a hydroxyl group, or generally, a bond available for, and that is suitable for incorporation of the carrier into the backbone, e.g., the phosphate, or modified phosphate, e.g., sulfur containing, backbone, of a ribonucleic acid. A “tethering attachment point” (TAP) in some embodiments refers to a constituent ring atom of the cyclic carrier, e.g., a carbon atom or a heteroatom (distinct from an atom which provides a backbone attachment point), that connects a selected moiety. The moiety can be, e.g., a carbohydrate, e.g. monosaccharide, disaccharide, trisaccharide, tetrasaccharide, oligosaccharide, or polysaccharide. Optionally, the selected moiety is connected by an intervening tether to the cyclic carrier. Thus, the cyclic carrier will often include a functional group, e.g., an amino group, or generally, provide a bond, that is suitable for incorporation or tethering of another chemical entity, e.g., a ligand to the constituent ring.

[0319] The iRNA may be conjugated to a ligand via a carrier, wherein the carrier can be cyclic group or acyclic group. In one embodiment, the cyclic group is selected from pyrrolidinyl, pyrazolinyl, pyrazolidinyl, imidazolinyl, imidazolidinyl, piperidinyl, piperazinyl, [1,3]dioxolane, oxazolidinyl, isoxazolidinyl, morpholinyl, thiazolidinyl, isothiazolidinyl, quinoxalinyl, pyridazinonyl, tetrahydrofuryl, and decalin. In one embodiment, the acyclic group is a serinol backbone or diethanolamine backbone.

i. Thermally Destabilizing Modifications

[0320] In certain embodiments, a dsRNA molecule can be optimized for RNA interference by incorporating thermally destabilizing modifications in the seed region of the antisense strand. As used herein “seed region” means at positions 2-9 of the 5′-end of the referenced strand or at positions 2-8 of the 5′-end of the referenced strand. For example, thermally destabilizing modifications can be incorporated in the seed region of the antisense strand to reduce or inhibit off-target gene silencing.

[0321] The term “thermally destabilizing modification(s)” includes modification(s) that would result with a dsRNA with a lower overall melting temperature (Tm) than the Tₘ of the dsRNA without having such modification(s). For example, the thermally destabilizing modification(s) can decrease the Tₘ of the dsRNA by 1-4° C., such as one, two, three or four degrees Celcius. And, the term “thermally destabilizing nucleotide” refers to a nucleotide containing one or more thermally destabilizing modifications.

[0322] It has been discovered that dsRNAs with an antisense strand comprising at least one thermally destabilizing modification of the duplex within the first 9 nucleotide positions, counting from the 5′ end, of the antisense strand have reduced off-target gene silencing activity. Accordingly, in some embodiments, the antisense strand comprises at least one (e.g., one, two, three, four, five or more) thermally destabilizing modification of the duplex within the first 9 nucleotide positions of the 5′ region of the antisense strand. In some embodiments, one or more thermally destabilizing modification(s) of the duplex is/are located in positions 2-9, such as, positions 4-8, from the 5′-end of the antisense strand. In some further embodiments, the thermally destabilizing modification(s) of the duplex is/are located at position 6, 7 or 8 from the 5′-end of the antisense strand. In still some further embodiments, the thermally destabilizing modification of the duplex is located at position 7 from the 5′-end of the antisense strand. In some embodiments, the thermally destabilizing modification of the duplex is located at position 2, 3, 4, 5 or 9 from the 5′-end of the antisense strand.

[0323] An iRNA agent comprises a sense strand and an antisense strand, each strand having 14 to 40 nucleotides. The RNAi agent may be represented by formula (L):

[chemical structure]

In formula (L), B1, B2, B3, B1′, B2′, B3′, and B4′ each are independently a nucleotide containing a modification selected from the group consisting of 2′-O-alkyl, 2′-substituted alkoxy, 2′-substituted alkyl, 2′-halo, ENA, and BNA/LNA. In one embodiment, B1, B2, B3, B1′, B2′, B3′, and B4′ each contain 2′-OMe modifications. In one embodiment, B1, B2, B3, B1′, B2′, B3′, and B4′ each contain 2′-OMe or 2′-F modifications. In one embodiment, at least one of B1, B2, B3, B1′, B2′, B3′, and B4′ contain 2′-O—N-methylacetamido (2′-O-NMA, 2′O—CH2C(O)N(Me)H) modification.

[0324] C1 is a thermally destabilizing nucleotide placed at a site opposite to the seed region of the antisense strand (i.e., at positions 2-8 of the 5′-end of the antisense strand or at positions 2-9 of the 5′-end of the antisense strand). For example, C1 is at a position of the sense strand that pairs with a nucleotide at positions 2-8 of the 5′-end of the antisense strand. In one example, C1 is at position 15 from the 5′-end of the sense strand. C1 nucleotide bears the thermally destabilizing modification which can include abasic modification; mismatch with the opposing nucleotide in the duplex; and sugar modification such as 2′-deoxy modification or acyclic nucleotide e.g., unlocked nucleic acids (UNA), glycerol nucleic acid (GNA), or 2′-5′-linked ribonucleotides (“3′-RNA”). In one embodiment, C1 has thermally destabilizing modification selected from the group consisting of: i) mismatch with the opposing nucleotide in the antisense strand; ii) abasic modification selected from the group consisting of:

[chemical structure]

and iii) sugar modification selected from the group consisting of:

[chemical structure]

wherein B is a modified or unmodified nucleobase, R¹ and R² independently are H, halogen, OR₃, or alkyl; and R₃ is H, alkyl, cycloalkyl, aryl, aralkyl, heteroaryl or sugar. In one embodiment, the thermally destabilizing modification in C1 is a mismatch selected from the group consisting of G:G, G:A, G:U, G:T, A:A, A:C, C:C, C:U, C:T, U:U, T:T, and U:T; and optionally, at least one nucleobase in the mismatch pair is a 2′-deoxy nucleobase. In one example, the thermally destabilizing modification in C1 is GNA or

[chemical structure]

T1, T1′, T2′, and T3′ each independently represent a nucleotide comprising a modification providing the nucleotide a steric bulk that is less or equal to the steric bulk of a 2′-OMe modification. A steric bulk refers to the sum of steric effects of a modification. Methods for determining steric effects of a modification of a nucleotide are known to one skilled in the art. The modification can be at the 2′ position of a ribose sugar of the nucleotide, or a modification to a non-ribose nucleotide, acyclic nucleotide, or the backbone of the nucleotide that is similar or equivalent to the 2′ position of the ribose sugar, and provides the nucleotide a steric bulk that is less than or equal to the steric bulk of a 2′-OMe modification. For example, T1, T1′, T2′, and T3′ are each independently selected from DNA, RNA, LNA, 2′-F, and 2′-F-5′-methyl. In one embodiment, T1 is DNA. In one embodiment, T1′ is DNA, RNA or LNA. In one embodiment, T2′ is DNA or RNA. In one embodiment, T3′ is DNA or RNA.
[0325] n¹, n³, and q¹ are independently 4 to 15 nucleotides in length.
[0326] n⁵, q³, and q⁷ are independently 1-6 nucleotide(s) in length.
[0327] n⁴, q², and q⁶ are independently 1-3 nucleotide(s) in length; alternatively, n⁴ is 0.
[0328] q⁵ is independently 0-10 nucleotide(s) in length.
[0329] n² and q⁴ are independently 0-3 nucleotide(s) in length.

[0330] Alternatively, n⁴ is 0-3 nucleotide(s) in length.

[0331] In one embodiment, n⁴ can be 0. In one example, n⁴ is 0, and q² and q⁶ are 1. In another example, n⁴ is 0, and q² and q⁶ are 1, with two phosphorothioate internucleotide linkage modifications within position 1-5 of the sense strand (counting from the 5′-end of the sense strand), and two phosphorothioate internucleotide linkage modifications at positions 1 and 2 and two phosphorothioate internucleotide linkage modifications within positions 18-23 of the antisense strand (counting from the 5′-end of the antisense strand).

[0332] In one embodiment, n⁴, q², and q⁶ are each 1.

[0333] In one embodiment, n², n⁴, q², q⁴, and q⁶ are each 1.

[0334] In one embodiment, C1 is at position 14-17 of the 5′-end of the sense strand, when the sense strand is 19-22 nucleotides in length, and n⁴ is 1. In one embodiment, C1 is at position 15 of the 5′-end of the sense strand

[0335] In one embodiment, T3′ starts at position 2 from the 5′ end of the antisense strand. In one example, T3′ is at position 2 from the 5′ end of the antisense strand and q⁶ is equal to 1.

[0336] In one embodiment, T1′ starts at position 14 from the 5′ end of the antisense strand. In one example, T1′ is at position 14 from the 5′ end of the antisense strand and q² is equal to 1.

[0337] In an exemplary embodiment, T3′ starts from position 2 from the 5′ end of the antisense strand and T1′ starts from position 14 from the 5′ end of the antisense strand. In one example, T3′ starts from position 2 from the 5′ end of the antisense strand and q⁶ is equal to 1 and T1′ starts from position 14 from the 5′ end of the antisense strand and q² is equal to 1.

[0338] In one embodiment, T1′ and T3′ are separated by 11 nucleotides in length (i.e. not counting the T1′ and T3′ nucleotides).

[0339] In one embodiment, T1′ is at position 14 from the 5′ end of the antisense strand. In one example, T1′ is at position 14 from the 5′ end of the antisense strand and q² is equal to 1, and the modification at the 2′ position or positions in a non-ribose, acyclic or backbone that provide less steric bulk than a 2′-OMe ribose.

[0340] In one embodiment, T3′ is at position 2 from the 5′ end of the antisense strand. In one example, T3′ is at position 2 from the 5′ end of the antisense strand and q⁶ is equal to 1, and the modification at the 2′ position or positions in a non-ribose, acyclic or backbone that provide less than or equal to steric bulk than a 2′-OMe ribose.

[0341] In one embodiment, T1 is at the cleavage site of the sense strand. In one example, T1 is at position 11 from the 5′ end of the sense strand, when the sense strand is 19-22 nucleotides in length, and n² is 1. In an exemplary embodiment, T1 is at the cleavage site of the sense strand at position 11 from the 5′ end of the sense strand, when the sense strand is 19-22 nucleotides in length, and n² is 1,

[0342] In one embodiment, T2′ starts at position 6 from the 5′ end of the antisense strand. In one example, T2′ is at positions 6-10 from the 5′ end of the antisense strand, and q⁴ is 1.

[0343] In an exemplary embodiment, T1 is at the cleavage site of the sense strand, for instance, at position 11 from the 5′ end of the sense strand, when the sense strand is 19-22 nucleotides in length, and n² is 1; T1′ is at position 14 from the 5′ end of the antisense strand, and q² is equal to 1, and the modification to T1′ is at the 2′ position of a ribose sugar or at positions in a non-ribose, acyclic or backbone that provide less steric bulk than a 2′-OMe ribose; T2′ is at positions 6-10 from the 5′ end of the antisense strand, and q⁴ is 1; and T3′ is at position 2 from the 5′ end of the antisense strand, and q⁶ is equal to 1, and the modification to T3′ is at the 2′ position or at positions in a non-ribose, acyclic or backbone that provide less than or equal to steric bulk than a 2′-OMe ribose.

[0344] In one embodiment, T2′ starts at position 8 from the 5′ end of the antisense strand. In one example, T2′ starts at position 8 from the 5′ end of the antisense strand, and q⁴ is 2.

[0345] In one embodiment, T2′ starts at position 9 from the 5′ end of the antisense strand. In one example, T2′ is at position 9 from the 5′ end of the antisense strand, and q⁴ is 1.

[0346] In one embodiment, B1′ is 2′-OMe or 2′-F, q¹ is 9, T1′ is 2′-F, q² is 1, B2′ is 2′-OMe or 2′-F, q³ is 4, T2′ is 2′-F, q⁴ is 1, B3′ is 2′-OMe or 2′-F, q⁵ is 6, T3′ is 2′-F, q⁶ is 1, B4′ is 2′-OMe, and q⁷ is 1; with two phosphorothioate internucleotide linkage modifications within positions 1-5 of the sense strand (counting from the 5′-end of the sense strand), and two phosphorothioate internucleotide linkage modifications at positions 1 and 2 and two phosphorothioate internucleotide linkage modifications within positions 18-23 of the antisense strand (counting from the 5′-end of the antisense strand).

[0347] In one embodiment, n⁴ is 0, B3 is 2′-OMe, n⁵ is 3, B1′ is 2′-OMe or 2′-F, q¹ is 9, T1′ is 2′-F, q² is 1, B2′ is 2′-OMe or 2′-F, q³ is 4, T2′ is 2′-F, q⁴ is 1, B3′ is 2′-OMe or 2′-F, q⁵ is 6, T3′ is 2′-F, q⁶ is 1, B4′ is 2′-OMe, and q⁷ is 1; with two phosphorothioate internucleotide linkage modifications within positions 1-5 of the sense strand (counting from the 5′-end of the sense strand), and two phosphorothioate internucleotide linkage modifications at positions 1 and 2 and two phosphorothioate internucleotide linkage modifications within positions 18-23 of the antisense strand (counting from the 5′-end of the antisense strand).

[0348] In one embodiment, B1 is 2′-OMe or 2′-F, n¹ is 8, T1 is 2′F, n² is 3, B2 is 2′-OMe, n³ is 7, n⁴ is 0, B3 is 2′OMe, n⁵ is 3, B1′ is 2′-OMe or 2′-F, q¹ is 9, T1′ is 2′-F, q² is 1, B2′ is 2′-OMe or 2′-F, q³ is 4, T2′ is 2′-F, q⁴ is 2, B3′ is 2′-OMe or 2′-F, q⁵ is 5, T3′ is 2′-F, q⁶ is 1, B4′ is 2′-OMe, and q⁷ is 1.

[0349] In one embodiment, B1 is 2′-OMe or 2′-F, n¹ is 8, T1 is 2′F, n² is 3, B2 is 2′-OMe, n³ is 7, n⁴ is 0, B3 is 2′-OMe, n⁵ is 3, B1′ is 2′-OMe or 2′-F, q¹ is 9, T1′ is 2′-F, q² is 1, B2′ is 2′-OMe or 2′-F, q³ is 4, T2′ is 2′-F, q⁴ is 2, B3′ is 2′-OMe or 2′-F, q⁵ is 5, T3′ is 2′-F, q⁶ is 1, B4′ is 2′-OMe, and q⁷ is 1; with two phosphorothioate internucleotide linkage modifications within positions 1-5 of the sense strand (counting from the 5′-end of the sense strand), and two phosphorothioate internucleotide linkage modifications at positions 1 and 2 and two phosphorothioate internucleotide linkage modifications within positions 18-23 of the antisense strand (counting from the 5′-end of the antisense strand).

[0350] In one embodiment, B1 is 2′-OMe or 2′-F, n¹ is 6, T1 is 2′F, n² is 3, B2 is 2′-OMe, n³ is 7, n⁴ is 0, B3 is 2′OMe, n⁵ is 3, B1′ is 2′-OMe or 2′-F, q¹ is 7, T1′ is 2′-F, q² is 1, B2′ is 2′-OMe or 2′-F, q³ is 4, T2′ is 2′-F, q⁴ is 2, B3′ is 2′-OMe or 2′-F, q⁵ is 5, T3′ is 2′-F, q⁶ is 1, B4′ is 2′-OMe, and q⁷ is 1.

[0351] In one embodiment, B1 is 2′-OMe or 2′-F, n¹ is 6, T1 is 2′F, n² is 3, B2 is 2′-OMe, n³ is 7, n⁴ is 0, B3 is 2′-OMe, n⁵ is 3, B1′ is 2′-OMe or 2′-F, q¹ is 7, T1′ is 2′-F, q² is 1, B2′ is 2′-OMe or 2′-F, q³ is 4, T2′ is 2′-F, q⁴ is 2, B3′ is 2′-OMe or 2′-F, q⁵ is 5, T3′ is 2′-F, q⁶ is 1, B4′ is 2′-OMe, and q⁷ is 1; with two phosphorothioate internucleotide linkage modifications within positions 1-5 of the sense strand (counting from the 5′-end of the sense strand), and two phosphorothioate internucleotide linkage modifications at positions 1 and 2 and two phosphorothioate internucleotide linkage modifications within positions 18-23 of the antisense strand (counting from the 5′-end of the antisense strand).

[0352] In one embodiment, B1 is 2′-OMe or 2′-F, n¹ is 8, T1 is 2′F, n² is 3, B2 is 2′-OMe, n³ is 7, n⁴ is 0, B3 is 2′OMe, n⁵ is 3, B1′ is 2′-OMe or 2′-F, q¹ is 9, T1′ is 2′-F, q² is 1, B2′ is 2′-OMe or 2′-F, q³ is 4, T2′ is 2′-F, q⁴ is 1, B3′ is 2′-OMe or 2′-F, q⁵ is 6, T3′ is 2′-F, q⁶ is 1, B4′ is 2′-OMe, and q⁷ is 1.

[0353] In one embodiment, B1 is 2′-OMe or 2′-F, n¹ is 8, T1 is 2′F, n² is 3, B2 is 2′-OMe, n³ is 7, n⁴ is 0, B3 is 2′-OMe, n⁵ is 3, B1′ is 2′-OMe or 2′-F, q¹ is 9, T1′ is 2′-F, q² is 1, B2′ is 2′-OMe or 2′-F, q³ is 4, T2′ is 2′-F, q⁴ is 1, B3′ is 2′-OMe or 2′-F, q⁵ is 6, T3′ is 2′-F, q⁶ is 1, B4′ is 2′-OMe, and q⁷ is 1; with two phosphorothioate internucleotide linkage modifications within positions 1-5 of the sense strand (counting from the 5′-end of the sense strand), and two phosphorothioate internucleotide linkage modifications at positions 1 and 2 and two phosphorothioate internucleotide linkage modifications within positions 18-23 of the antisense strand (counting from the 5′-end of the antisense strand).

[0354] In one embodiment, B1 is 2′-OMe or 2′-F, n¹ is 8, T1 is 2′F, n² is 3, B2 is 2′-OMe, n³ is 7, n⁴ is 0, B3 is 2′OMe, n⁵ is 3, B1′ is 2′-OMe or 2′-F, q¹ is 9, T1′ is 2′-F, q² is 1, B2′ is 2′-OMe or 2′-F, q³ is 5, T2′ is 2′-F, q⁴ is 1, B3′ is 2′-OMe or 2′-F, q⁵ is 5, T3′ is 2′-F, q⁶ is 1, B4′ is 2′-OMe, and q⁷ is 1; optionally with at least 2 additional TT at the 3′-end of the antisense strand.

[0355] In one embodiment, B1 is 2′-OMe or 2′-F, n¹ is 8, T1 is 2′F, n² is 3, B2 is 2′-OMe, n³ is 7, n⁴ is 0, B3 is 2′-OMe, n⁵ is 3, B1′ is 2′-OMe or 2′-F, q¹ is 9, T1′ is 2′-F, q² is 1, B2′ is 2′-OMe or 2′-F, q³ is 5, T2′ is 2′-F, q⁴ is 1, B3′ is 2′-OMe or 2′-F, q⁵ is 5, T3′ is 2′-F, q⁶ is 1, B4′ is 2′-OMe, and q⁷ is 1; optionally with at least 2 additional TT at the 3′-end of the antisense strand; with two phosphorothioate internucleotide linkage modifications within positions 1-5 of the sense strand (counting from the 5′-end of the sense strand), and two phosphorothioate internucleotide linkage modifications at positions 1 and 2 and two phosphorothioate internucleotide linkage modifications within positions 18-23 of the antisense strand (counting from the 5′-end of the antisense strand).

[0356] In one embodiment, B1 is 2′-OMe or 2′-F, n¹ is 8, T1 is 2′F, n² is 3, B2 is 2′-OMe, n³ is 7, n⁴ is 0, B3 is 2′-OMe, n⁵ is 3, B1′ is 2′-OMe or 2′-F, q¹ is 9, T1′ is 2′-F, q² is 1, B2′ is 2′-OMe or 2′-F, q³ is 4, q⁴ is 0, B3′ is 2′-OMe or 2′-F, q⁵ is 7, T3′ is 2′-F, q⁶ is 1, B4′ is 2′-OMe, and q⁷ is 1. In one embodiment, B1 is 2′-OMe or 2′-F, n¹ is 8, T1 is 2′F, n² is 3, B2 is 2′-OMe, n³ is 7, n⁴ is 0, B3 is 2′-OMe, n⁵ is 3, B1′ is 2′-OMe or 2′-F, q¹ is 9, T1′ is 2′-F, q² is 1, B2′ is 2′-OMe or 2′-F, q³ is 4, q⁴ is 0, B3′ is 2′-OMe or 2′-F, q⁵ is 7, T3′ is 2′-F, q⁶ is 1, B4′ is 2′-OMe, and q⁷ is 1; with two phosphorothioate internucleotide linkage modifications within positions 1-5 of the sense strand (counting from the 5′-end), and two phosphorothioate internucleotide linkage modifications at positions 1 and 2 and two phosphorothioate internucleotide linkage modifications within positions 18-23 of the antisense strand (counting from the 5′-end).

[0357] In one embodiment, B1 is 2′-OMe or 2′-F, n¹ is 8, T1 is 2′F, n² is 3, B2 is 2′-OMe, n³ is 7, n⁴ is 0, B3 is 2′OMe, n⁵ is 3, B1′ is 2′-OMe or 2′-F, q¹ is 9, T1′ is 2′-F, q² is 1, B2′ is 2′-OMe or 2′-F, q³ is 4, T2′ is 2′-F, q⁴ is 2, B3′ is 2′-OMe or 2′-F, q⁵ is 5, T3′ is 2′-F, q⁶ is 1, B4′ is 2′-F, and q⁷ is 1. In one embodiment, B1 is 2′-OMe or 2′-F, n¹ is 8, T1 is 2′F, n² is 3, B2 is 2′-OMe, n³ is 7, n⁴ is 0, B3 is 2′-OMe, n⁵ is 3, B1′ is 2′-OMe or 2′-F, q¹ is 9, T1′ is 2′-F, q² is 1, B2′ is 2′-OMe or 2′-F, q³ is 4, T2′ is 2′-F, q⁴ is 2, B3′ is 2′-OMe or 2′-F, q⁵ is 5, T3′ is 2′-F, q⁶ is 1, B4′ is 2′-F, and q⁷ is 1; with two phosphorothioate internucleotide linkage modifications within positions 1-5 of the sense strand (counting from the 5′-end of the sense strand), and two phosphorothioate internucleotide linkage modifications at positions 1 and 2 and two phosphorothioate internucleotide linkage modifications within positions 18-23 of the antisense strand (counting from the 5′-end of the antisense strand).

[0358] In one embodiment, B1 is 2′-OMe or 2′-F, n¹ is 8, T1 is 2′F, n² is 3, B2 is 2′-OMe, n³ is 7, n⁴ is 0, B3 is 2′-OMe, n⁵ is 3, B1′ is 2′-OMe or 2′-F, q¹ is 9, T1′ is 2′-F, q² is 1, B2′ is 2′-OMe or 2′-F, q³ is 4, q⁴ is 0, B3′ is 2′-OMe or 2′-F, q⁵ is 7, T3′ is 2′-F, q⁶ is 1, B4′ is 2′-F, and q⁷ is 1. In one embodiment, B1 is 2′-OMe or 2′-F, n¹ is 8, T1 is 2′F, n² is 3, B2 is 2′-OMe, n³ is 7, n⁴ is 0, B3 is 2′-OMe, n⁵ is 3, B1′ is 2′-OMe or 2′-F, q¹ is 9, T1′ is 2′-F, q² is 1, B2′ is 2′-OMe or 2′-F, q³ is 4, q⁴ is 0, B3′ is 2′-OMe or 2′-F, q⁵ is 7, T3′ is 2′-F, q⁶ is 1, B4′ is 2′-F, and q⁷ is 1; with two phosphorothioate internucleotide linkage modifications within positions 1-5 of the sense strand (counting from the 5′-end of the sense strand), and two phosphorothioate internucleotide linkage modifications at positions 1 and 2 and two phosphorothioate internucleotide linkage modifications within positions 18-23 of the antisense strand (counting from the 5′-end of the antisense strand).

[0359] The RNAi agent can comprise a phosphorus-containing group at the 5′-end of the sense strand or antisense strand. The 5′-end phosphorus-containing group can be 5′-end phosphate (5′-P), 5′-end phosphorothioate (5′-PS), 5′-end phosphorodithioate (5′-PS₂), 5′-end vinylphosphonate (5′-VP), 5′-end methylphosphonate (MePhos), or 5′-deoxy-5′-C-malonyl

[chemical structure]

When the 5′-end phosphorus-containing group is 5′-end vinylphosphonate (5′-VP), the 5′-VP can be either 5′-E-VP isomer (i.e., trans-vinylphosphonate,

[chemical structure]

5′-Z-VP isomer (i.e., cis-vinylphosphonate,

[chemical structure]

or mixtures thereof.
In one embodiment, the RNAi agent comprises a phosphorus-containing group at the 5′-end of the sense strand. In one embodiment, the RNAi agent comprises a phosphorus-containing group at the 5′-end of the antisense strand.

[0360] In one embodiment, the RNAi agent comprises a 5′-P. In one embodiment, the RNAi agent comprises a 5′-P in the antisense strand.

[0361] In one embodiment, the RNAi agent comprises a 5′-PS. In one embodiment, the RNAi agent comprises a 5′-PS in the antisense strand.

[0362] In one embodiment, the RNAi agent comprises a 5′-VP. In one embodiment, the RNAi agent comprises a 5′-VP in the antisense strand. In one embodiment, the RNAi agent comprises a 5′-E-VP in the antisense strand. In one embodiment, the RNAi agent comprises a 5′-Z-VP in the antisense strand.

[0363] In one embodiment, the RNAi agent comprises a 5′-PS₂. In one embodiment, the RNAi agent comprises a 5′-PS₂ in the antisense strand.

[0364] In one embodiment, the RNAi agent comprises a 5′-PS₂. In one embodiment, the RNAi agent comprises a 5′-deoxy-5′-C-malonyl in the antisense strand.

[0365] In one embodiment, B1 is 2′-OMe or 2′-F, n¹ is 8, T1 is 2′F, n² is 3, B2 is 2′-OMe, n³ is 7, n⁴ is 0, B3 is 2′OMe, n⁵ is 3, B1′ is 2′-OMe or 2′-F, q¹ is 9, T1′ is 2′-F, q¹ is 1, B2′ is 2′-OMe or 2′-F, q³ is 4, T2′ is 2′-F, q⁴ is 2, B3′ is 2′-OMe or 2′-F, q⁵ is 5, T3′ is 2′-F, q⁶ is 1, B4′ is 2′-OMe, and q⁷ is 1. The RNAi agent also comprises a 5′-PS.

[0366] In one embodiment, B1 is 2′-OMe or 2′-F, n¹ is 8, T1 is 2′F, n² is 3, B2 is 2′-OMe, n³ is 7, n⁴ is 0, B3 is 2′OMe, n⁵ is 3, B1′ is 2′-OMe or 2′-F, q¹ is 9, T1′ is 2′-F, q² is 1, B2′ is 2′-OMe or 2′-F, q³ is 4, T2′ is 2′-F, q⁴ is 2, B3′ is 2′-OMe or 2′-F, q⁵ is 5, T3′ is 2′-F, q⁶ is 1, B4′ is 2′-OMe, and q⁷ is 1. The RNAi agent also comprises a 5′-P.

[0367] In one embodiment, B1 is 2′-OMe or 2′-F, n¹ is 8, T1 is 2′F, n² is 3, B2 is 2′-OMe, n³ is 7, n⁴ is 0, B3 is 2′OMe, n⁵ is 3, B1′ is 2′-OMe or 2′-F, q¹ is 9, T1′ is 2′-F, q² is 1, B2′ is 2′-OMe or 2′-F, q³ is 4, T2′ is 2′-F, q⁴ is 2, B3′ is 2′-OMe or 2′-F, q⁵ is 5, T3′ is 2′-F, q⁶ is 1, B4′ is 2′-OMe, and q⁷ is 1. The RNAi agent also comprises a 5′-VP. The 5′-VP may be 5′-E-VP, 5′-Z-VP, or combination thereof.

[0368] In one embodiment, B1 is 2′-OMe or 2′-F, n¹ is 8, T1 is 2′F, n² is 3, B2 is 2′-OMe, n³ is 7, n⁴ is 0, B3 is 2′OMe, n⁵ is 3, B1′ is 2′-OMe or 2′-F, q¹ is 9, T1′ is 2′-F, q² is 1, B2′ is 2′-OMe or 2′-F, q³ is 4, T2′ is 2′-F, q⁴ is 2, B3′ is 2′-OMe or 2′-F, q⁵ is 5, T3′ is 2′-F, q⁶ is 1, B4′ is 2′-OMe, and q⁷ is 1. The RNAi agent also comprises a 5′-PS₂.

[0369] In one embodiment, B1 is 2′-OMe or 2′-F, n¹ is 8, T1 is 2′F, n² is 3, B2 is 2′-OMe, n³ is 7, n⁴ is 0, B3 is 2′OMe, n⁵ is 3, B1′ is 2′-OMe or 2′-F, q¹ is 9, T1′ is 2′-F, q² is 1, B2′ is 2′-OMe or 2′-F, q³ is 4, T2′ is 2′-F, q⁴ is 2, B3′ is 2′-OMe or 2′-F, q⁵ is 5, T3′ is 2′-F, q⁶ is 1, B4′ is 2′-OMe, and q⁷ is 1. The RNAi agent also comprises a 5′-deoxy-5′-C-malonyl.

[0370] In one embodiment, B1 is 2′-OMe or 2′-F, n¹ is 8, T1 is 2′F, n² is 3, B2 is 2′-OMe, n³ is 7, n⁴ is 0, B3 is 2′-OMe, n⁵ is 3, B1′ is 2′-OMe or 2′-F, q¹ is 9, T1′ is 2′-F, q² is 1, B2′ is 2′-OMe or 2′-F, q³ is 4, T2′ is 2′-F, q⁴ is 2, B3′ is 2′-OMe or 2′-F, q⁵ is 5, T3′ is 2′-F, q⁶ is 1, B4′ is 2′-OMe, and q⁷ is 1; with two phosphorothioate internucleotide linkage modifications within position 1-5 of the sense strand (counting from the 5′-end of the sense strand), and two phosphorothioate internucleotide linkage modifications at positions 1 and 2 and two phosphorothioate internucleotide linkage modifications within positions 18-23 of the antisense strand (counting from the 5′-end of the antisense strand). The RNAi agent also comprises a 5′-P.

[0371] In one embodiment, B1 is 2′-OMe or 2′-F, n¹ is 8, T1 is 2′F, n² is 3, B2 is 2′-OMe, n³ is 7, n⁴ is 0, B3 is 2′-OMe, n⁵ is 3, B1′ is 2′-OMe or 2′-F, q¹ is 9, T1′ is 2′-F, q² is 1, B2′ is 2′-OMe or 2′-F, q³ is 4, T2′ is 2′-F, q⁴ is 2, B3′ is 2′-OMe or 2′-F, q⁵ is 5, T3′ is 2′-F, q⁶ is 1, B4′ is 2′-OMe, and q⁷ is 1; with two phosphorothioate internucleotide linkage modifications within position 1-5 of the sense strand (counting from the 5′-end of the sense strand), and two phosphorothioate internucleotide linkage modifications at positions 1 and 2 and two phosphorothioate internucleotide linkage modifications within positions 18-23 of the antisense strand (counting from the 5′-end of the antisense strand). The RNAi agent also comprises a 5′-PS.

[0372] In one embodiment, B1 is 2′-OMe or 2′-F, n¹ is 8, T1 is 2′F, n² is 3, B2 is 2′-OMe, n³ is 7, n⁴ is 0, B3 is 2′-OMe, n⁵ is 3, B1′ is 2′-OMe or 2′-F, q¹ is 9, T1′ is 2′-F, q² is 1, B2′ is 2′-OMe or 2′-F, q³ is 4, T2′ is 2′-F, q⁴ is 2, B3′ is 2′-OMe or 2′-F, q⁵ is 5, T3′ is 2′-F, q⁶ is 1, B4′ is 2′-OMe, and q⁷ is 1; with two phosphorothioate internucleotide linkage modifications within position 1-5 of the sense strand (counting from the 5′-end of the sense strand), and two phosphorothioate internucleotide linkage modifications at positions 1 and 2 and two phosphorothioate internucleotide linkage modifications within positions 18-23 of the antisense strand (counting from the 5′-end of the antisense strand). The RNAi agent also comprises a 5′-VP. The 5′-VP may be 5′-E-VP. 5′-Z-VP, or combination thereof.

[0373] In one embodiment, B1 is 2′-OMe or 2′-F, n¹ is 8, T1 is 2′F, n² is 3, B2 is 2′-OMe, n³ is 7, n⁴ is 0, B3 is 2′-OMe, n⁵ is 3, B1′ is 2′-OMe or 2′-F, q¹ is 9, T1′ is 2′-F, q² is 1, B2′ is 2′-OMe or 2′-F, q³ is 4, T2′ is 2′-F, q⁴ is 2, B3′ is 2′-OMe or 2′-F, q⁵ is 5, T3′ is 2′-F, q⁶ is 1, B4′ is 2′-OMe, and q⁷ is 1; with two phosphorothioate internucleotide linkage modifications within position 1-5 of the sense strand (counting from the 5′-end of the sense strand), and two phosphorothioate internucleotide linkage modifications at positions 1 and 2 and two phosphorothioate internucleotide linkage modifications within positions 18-23 of the antisense strand (counting from the 5′-end of the antisense strand). The RNAi agent also comprises a 5′-PS₂.

[0374] In one embodiment, B1 is 2′-OMe or 2′-F, n¹ is 8, T1 is 2′F, n² is 3, B2 is 2′-OMe, n³ is 7, n⁴ is 0, B3 is 2′-OMe, n⁵ is 3, B1′ is 2′-OMe or 2′-F, q¹ is 9, T1′ is 2′-F, q² is 1, B2′ is 2′-OMe or 2′-F, q³ is 4, T2′ is 2′-F, q⁴ is 2, B3′ is 2′-OMe or 2′-F, q⁵ is 5, T3′ is 2′-F, q⁶ is 1, B4′ is 2′-OMe, and q⁷ is 1; with two phosphorothioate internucleotide linkage modifications within position 1-5 of the sense strand (counting from the 5′-end of the sense strand), and two phosphorothioate internucleotide linkage modifications at positions 1 and 2 and two phosphorothioate internucleotide linkage modifications within positions 18-23 of the antisense strand (counting from the 5′-end of the antisense strand). The RNAi agent also comprises a 5′-deoxy-5′-C-malonyl.

[0375] In one embodiment, B1 is 2′-OMe or 2′-F, n¹ is 8, T1 is 2′F, n² is 3, B2 is 2′-OMe, n³ is 7, n⁴ is 0, B3 is 2′-OMe, n⁵ is 3, B1′ is 2′-OMe or 2′-F, q¹ is 9, T1′ is 2′-F, q² is 1, B2′ is 2′-OMe or 2′-F, q³ is 4, q⁴ is 0, B3′ is 2′-OMe or 2′-F, q⁵ is 7, T3′ is 2′-F, q⁶ is 1, B4′ is 2′-OMe, and q⁷ is 1. The RNAi agent also comprises a 5′-P.

[0376] In one embodiment, B1 is 2′-OMe or 2′-F, n¹ is 8, T1 is 2′F, n² is 3, B2 is 2′-OMe, n³ is 7, n⁴ is 0, B3 is 2′-OMe, n⁵ is 3, B1′ is 2′-OMe or 2′-F, q¹ is 9, T1′ is 2′-F, q² is 1, B2′ is 2′-OMe or 2′-F, q³ is 4, q⁴ is 0, B3′ is 2′-OMe or 2′-F, q⁵ is 7, T3′ is 2′-F, q⁶ is 1, B4′ is 2′-OMe, and q⁷ is 1. The dsRNA agent also comprises a 5′-PS.

[0377] In one embodiment, B1 is 2′-OMe or 2′-F, n¹ is 8, T1 is 2′F, n² is 3, B2 is 2′-OMe, n³ is 7, n⁴ is 0, B3 is 2′-OMe, n⁵ is 3, B1′ is 2′-OMe or 2′-F, q¹ is 9, T1′ is 2′-F, q² is 1, B2′ is 2′-OMe or 2′-F, q³ is 4, q⁴ is 0, B3′ is 2′-OMe or 2′-F, q⁵ is 7, T3′ is 2′-F, q⁶ is 1, B4′ is 2′-OMe, and q⁷ is 1. The RNAi agent also comprises a 5′-VP. The 5′-VP may be 5′-E-VP, 5′-Z-VP, or combination thereof.

[0378] In one embodiment, B1 is 2′-OMe or 2′-F, n¹ is 8, T1 is 2′F, n² is 3, B2 is 2′-OMe, n³ is 7, n⁴ is 0, B3 is 2′-OMe, n⁵ is 3, B1′ is 2′-OMe or 2′-F, q¹ is 9, T1′ is 2′-F, q² is 1, B2′ is 2′-OMe or 2′-F, q³ is 4, q⁴ is 0, B3′ is 2′-OMe or 2′-F, q⁵ is 7, T3′ is 2′-F, q⁶ is 1, B4′ is 2′-OMe, and q⁷ is 1. The RNAi agent also comprises a 5′-PS₂.

[0379] In one embodiment, B1 is 2′-OMe or 2′-F, n¹ is 8, T1 is 2′F, n² is 3, B2 is 2′-OMe, n³ is 7, n⁴ is 0, B3 is 2′-OMe, n⁵ is 3, B1′ is 2′-OMe or 2′-F, q¹ is 9, T1′ is 2′-F, q² is 1, B2′ is 2′-OMe or 2′-F, q³ is 4, q⁴ is 0, B3′ is 2′-OMe or 2′-F, q⁵ is 7, T3′ is 2′-F, q⁶ is 1, B4′ is 2′-OMe, and q⁷ is 1. The RNAi agent also comprises a 5′-deoxy-5′-C-malonyl.

[0380] In one embodiment, B1 is 2′-OMe or 2′-F, n¹ is 8, T1 is 2′F, n² is 3, B2 is 2′-OMe, n³ is 7, n⁴ is 0, B3 is 2′-OMe, n⁵ is 3, B1′ is 2′-OMe or 2′-F, q¹ is 9, T1′ is 2′-F, q² is 1, B2′ is 2′-OMe or 2′-F, q³ is 4, q⁴ is 0, B3′ is 2′-OMe or 2′-F, q⁵ is 7, T3′ is 2′-F, q⁶ is 1, B4′ is 2′-OMe, and q⁷ is 1; with two phosphorothioate internucleotide linkage modifications within position 1-5 of the sense strand (counting from the 5′-end), and two phosphorothioate internucleotide linkage modifications at positions 1 and 2 and two phosphorothioate internucleotide linkage modifications within positions 18-23 of the antisense strand (counting from the 5′-end). The RNAi agent also comprises a 5′-P.

[0381] In one embodiment, B1 is 2′-OMe or 2′-F, n¹ is 8, T1 is 2′F, n² is 3, B2 is 2′-OMe, n³ is 7, n⁴ is 0, B3 is 2′-OMe, n⁵ is 3, B1′ is 2′-OMe or 2′-F, q¹ is 9, T1′ is 2′-F, q² is 1, B2′ is 2′-OMe or 2′-F, q³ is 4, q⁴ is 0, B3′ is 2′-OMe or 2′-F, q⁵ is 7, T3′ is 2′-F, q⁶ is 1, B4′ is 2′-OMe, and q⁷ is 1; with two phosphorothioate internucleotide linkage modifications within position 1-5 of the sense strand (counting from the 5′-end), and two phosphorothioate internucleotide linkage modifications at positions 1 and 2 and two phosphorothioate internucleotide linkage modifications within positions 18-23 of the antisense strand (counting from the 5′-end). The RNAi agent also comprises a 5′-PS.

[0382] In one embodiment, B1 is 2′-OMe or 2′-F, n¹ is 8, T1 is 2′F, n² is 3, B2 is 2′-OMe, n³ is 7, n⁴ is 0, B3 is 2′-OMe, n⁵ is 3, B1′ is 2′-OMe or 2′-F, q¹ is 9, T1′ is 2′-F, q² is 1, B2′ is 2′-OMe or 2′-F, q³ is 4, q⁴ is 0, B3′ is 2′-OMe or 2′-F, q⁵ is 7, T3′ is 2′-F, q⁶ is 1, B4′ is 2′-OMe, and q⁷ is 1; with two phosphorothioate internucleotide linkage modifications within position 1-5 of the sense strand (counting from the 5′-end), and two phosphorothioate internucleotide linkage modifications at positions 1 and 2 and two phosphorothioate internucleotide linkage modifications within positions 18-23 of the antisense strand (counting from the 5′-end). The RNAi agent also comprises a 5′-VP. The 5′-VP may be 5′-E-VP. 5′-Z-VP, or combination thereof.

[0383] In one embodiment, B1 is 2′-OMe or 2′-F, n¹ is 8, T1 is 2′F, n² is 3, B2 is 2′-OMe, n³ is 7, n⁴ is 0, B3 is 2′-OMe, n⁵ is 3, B1′ is 2′-OMe or 2′-F, q¹ is 9, T1′ is 2′-F, q² is 1, B2′ is 2′-OMe or 2′-F, q³ is 4, q⁴ is 0, B3′ is 2′-OMe or 2′-F, q⁵ is 7, T3′ is 2′-F, q⁶ is 1, B4′ is 2′-OMe, and q⁷ is 1; with two phosphorothioate internucleotide linkage modifications within position 1-5 of the sense strand (counting from the 5′-end), and two phosphorothioate internucleotide linkage modifications at positions 1 and 2 and two phosphorothioate internucleotide linkage modifications within positions 18-23 of the antisense strand (counting from the 5′-end). The RNAi agent also comprises a 5′-PS₂.

[0384] In one embodiment, B1 is 2′-OMe or 2′-F, n¹ is 8, T1 is 2′F, n² is 3, B2 is 2′-OMe, n³ is 7, n⁴ is 0, B3 is 2′-OMe, n⁵ is 3, B1′ is 2′-OMe or 2′-F, q¹ is 9, T1′ is 2′-F, q² is 1, B2′ is 2′-OMe or 2′-F, q³ is 4, q⁴ is 0, B3′ is 2′-OMe or 2′-F, q⁵ is 7, T3′ is 2′-F, q⁶ is 1, B4′ is 2′-OMe, and q⁷ is 1; with two phosphorothioate internucleotide linkage modifications within position 1-5 of the sense strand (counting from the 5′-end), and two phosphorothioate internucleotide linkage modifications at positions 1 and 2 and two phosphorothioate internucleotide linkage modifications within positions 18-23 of the antisense strand (counting from the 5′-end). The RNAi agent also comprises a 5′-deoxy-5′-C-malonyl.

[0385] In one embodiment, B1 is 2′-OMe or 2′-F, n¹ is 8, T1 is 2′F, n² is 3, B2 is 2′-OMe, n³ is 7, n⁴ is 0, B3 is 2′OMe, n⁵ is 3, B1′ is 2′-OMe or 2′-F, q¹ is 9, T1′ is 2′-F, q¹ is 1, B2′ is 2′-OMe or 2′-F, q³ is 4, T2′ is 2′-F, q⁴ is 2, B3′ is 2′-OMe or 2′-F, q⁵ is 5, T3′ is 2′-F, q⁶ is 1, B4′ is 2′-F, and q⁷ is 1. The RNAi agent also comprises a 5′-P.

[0386] In one embodiment, B1 is 2′-OMe or 2′-F, n¹ is 8, T1 is 2′F, n² is 3, B2 is 2′-OMe, n³ is 7, n⁴ is 0, B3 is 2′OMe, n⁵ is 3, B1′ is 2′-OMe or 2′-F, q¹ is 9, T1′ is 2′-F, q² is 1, B2′ is 2′-OMe or 2′-F, q³ is 4, T2′ is 2′-F, q⁴ is 2, B3′ is 2′-OMe or 2′-F, q⁵ is 5, T3′ is 2′-F, q⁶ is 1, B4′ is 2′-F, and q⁷ is 1. The RNAi agent also comprises a 5′-PS.

[0387] In one embodiment, B1 is 2′-OMe or 2′-F, n¹ is 8, T1 is 2′F, n² is 3, B2 is 2′-OMe, n³ is 7, n⁴ is 0, B3 is 2′OMe, n⁵ is 3, B1′ is 2′-OMe or 2′-F, q¹ is 9, T1′ is 2′-F, q² is 1, B2′ is 2′-OMe or 2′-F, q³ is 4, T2′ is 2′-F, q⁴ is 2, B3′ is 2′-OMe or 2′-F, q⁵ is 5, T3′ is 2′-F, q⁶ is 1, B4′ is 2′-F, and q⁷ is 1. The RNAi agent also comprises a 5′-VP. The 5′-VP may be 5′-E-VP, 5′-Z-VP, or combination thereof.

[0388] In one embodiment, B1 is 2′-OMe or 2′-F, n¹ is 8, T1 is 2′F, n² is 3, B2 is 2′-OMe, n³ is 7, n⁴ is 0, B3 is 2′OMe, n⁵ is 3, B1′ is 2′-OMe or 2′-F, q¹ is 9, T1′ is 2′-F, q² is 1, B2′ is 2′-OMe or 2′-F, q³ is 4, T2′ is 2′-F, q⁴ is 2, B3′ is 2′-OMe or 2′-F, q⁵ is 5, T3′ is 2′-F, q⁶ is 1, B4′ is 2′-F, and q⁷ is 1. The dsRNAi RNA agent also comprises a 5′-PS₂.

[0389] In one embodiment, B1 is 2′-OMe or 2′-F, n¹ is 8, T1 is 2′F, n² is 3, B2 is 2′-OMe, n³ is 7, n⁴ is 0, B3 is 2′OMe, n⁵ is 3, B1′ is 2′-OMe or 2′-F, q¹ is 9, T1′ is 2′-F, q² is 1, B2′ is 2′-OMe or 2′-F, q³ is 4, T2′ is 2′-F, q⁴ is 2, B3′ is 2′-OMe or 2′-F, q⁵ is 5, T3′ is 2′-F, q⁶ is 1, B4′ is 2′-F, and q⁷ is 1. The RNAi agent also comprises a 5′-deoxy-5′-C-malonyl.

[0390] In one embodiment, B1 is 2′-OMe or 2′-F, n¹ is 8, T1 is 2′F, n² is 3, B2 is 2′-OMe, n³ is 7, n⁴ is 0, B3 is 2′-OMe, n⁵ is 3, B1′ is 2′-OMe or 2′-F, q¹ is 9, T1′ is 2′-F, q² is 1, B2′ is 2′-OMe or 2′-F, q³ is 4, T2′ is 2′-F, q⁴ is 2, B3′ is 2′-OMe or 2′-F, q⁵ is 5, T3′ is 2′-F, q⁶ is 1, B4′ is 2′-F, and q⁷ is 1; with two phosphorothioate internucleotide linkage modifications within position 1-5 of the sense strand (counting from the 5′-end of the sense strand), and two phosphorothioate internucleotide linkage modifications at positions 1 and 2 and two phosphorothioate internucleotide linkage modifications within positions 18-23 of the antisense strand (counting from the 5′-end of the antisense strand). The RNAi agent also comprises a 5′-P.

[0391] In one embodiment, B1 is 2′-OMe or 2′-F, n¹ is 8, T1 is 2′F, n² is 3, B2 is 2′-OMe, n³ is 7, n⁴ is 0, B3 is 2′-OMe, n⁵ is 3, B1′ is 2′-OMe or 2′-F, q¹ is 9, T1′ is 2′-F, q² is 1, B2′ is 2′-OMe or 2′-F, q³ is 4, T2′ is 2′-F, q⁴ is 2, B3′ is 2′-OMe or 2′-F, q⁵ is 5, T3′ is 2′-F, q⁶ is 1, B4′ is 2′-F, and q⁷ is 1; with two phosphorothioate internucleotide linkage modifications within position 1-5 of the sense strand (counting from the 5′-end of the sense strand), and two phosphorothioate internucleotide linkage modifications at positions 1 and 2 and two phosphorothioate internucleotide linkage modifications within positions 18-23 of the antisense strand (counting from the 5′-end of the antisense strand). The RNAi agent also comprises a 5′-PS.

[0392] In one embodiment, B1 is 2′-OMe or 2′-F, n¹ is 8, T1 is 2′F, n² is 3, B2 is 2′-OMe, n³ is 7, n⁴ is 0, B3 is 2′-OMe, n⁵ is 3, B1′ is 2′-OMe or 2′-F, q¹ is 9, T1′ is 2′-F, q² is 1, B2′ is 2′-OMe or 2′-F, q³ is 4, T2′ is 2′-F, q⁴ is 2, B3′ is 2′-OMe or 2′-F, q⁵ is 5, T3′ is 2′-F, q⁶ is 1, B4′ is 2′-F, and q⁷ is 1; with two phosphorothioate internucleotide linkage modifications within position 1-5 of the sense strand (counting from the 5′-end of the sense strand), and two phosphorothioate internucleotide linkage modifications at positions 1 and 2 and two phosphorothioate internucleotide linkage modifications within positions 18-23 of the antisense strand (counting from the 5′-end of the antisense strand). The RNAi agent also comprises a 5′-VP. The 5′-VP may be 5′-E-VP, 5′-Z-VP, or combination thereof.

[0393] In one embodiment, B1 is 2′-OMe or 2′-F, n¹ is 8, T1 is 2′F, n² is 3, B2 is 2′-OMe, n³ is 7, n⁴ is 0, B3 is 2′-OMe, n⁵ is 3, B1′ is 2′-OMe or 2′-F, q¹ is 9, T1′ is 2′-F, q² is 1, B2′ is 2′-OMe or 2′-F, q³ is 4, T2′ is 2′-F, q⁴ is 2, B3′ is 2′-OMe or 2′-F, q⁵ is 5, T3′ is 2′-F, q⁶ is 1, B4′ is 2′-F, and q⁷ is 1; with two phosphorothioate internucleotide linkage modifications within position 1-5 of the sense strand (counting from the 5′-end of the sense strand), and two phosphorothioate internucleotide linkage modifications at positions 1 and 2 and two phosphorothioate internucleotide linkage modifications within positions 18-23 of the antisense strand (counting from the 5′-end of the antisense strand). The RNAi agent also comprises a 5′-PS₂.

[0394] In one embodiment, B1 is 2′-OMe or 2′-F, n¹ is 8, T1 is 2′F, n² is 3, B2 is 2′-OMe, n³ is 7, n⁴ is 0, B3 is 2′-OMe, n⁵ is 3, B1′ is 2′-OMe or 2′-F, q¹ is 9, T1′ is 2′-F, q² is 1, B2′ is 2′-OMe or 2′-F, q³ is 4, T2′ is 2′-F, q⁴ is 2, B3′ is 2′-OMe or 2′-F, q⁵ is 5, T3′ is 2′-F, q⁶ is 1, B4′ is 2′-F, and q⁷ is 1; with two phosphorothioate internucleotide linkage modifications within position 1-5 of the sense strand (counting from the 5′-end of the sense strand), and two phosphorothioate internucleotide linkage modifications at positions 1 and 2 and two phosphorothioate internucleotide linkage modifications within positions 18-23 of the antisense strand (counting from the 5′-end of the antisense strand). The RNAi agent also comprises a 5′-deoxy-5′-C-malonyl.

[0395] In one embodiment, B1 is 2′-OMe or 2′-F, n¹ is 8, T1 is 2′F, n² is 3, B2 is 2′-OMe, n³ is 7, n⁴ is 0, B3 is 2′-OMe, n⁵ is 3, B1′ is 2′-OMe or 2′-F, q¹ is 9, T1′ is 2′-F, q² is 1, B2′ is 2′-OMe or 2′-F, q³ is 4, q⁴ is 0, B3′ is 2′-OMe or 2′-F, q⁵ is 7, T3′ is 2′-F, q⁶ is 1, B4′ is 2′-F, and q⁷ is 1. The RNAi agent also comprises a 5′-P.

[0396] In one embodiment, B1 is 2′-OMe or 2′-F, n¹ is 8, T1 is 2′F, n² is 3, B2 is 2′-OMe, n³ is 7, n⁴ is 0, B3 is 2′-OMe, n⁵ is 3, B1′ is 2′-OMe or 2′-F, q¹ is 9, T1′ is 2′-F, q² is 1, B2′ is 2′-OMe or 2′-F, q³ is 4, q⁴ is 0, B3′ is 2′-OMe or 2′-F, q⁵ is 7, T3′ is 2′-F, q⁶ is 1, B4′ is 2′-F, and q⁷ is 1. The RNAi agent also comprises a 5′-PS.

[0397] In one embodiment, B1 is 2′-OMe or 2′-F, n¹ is 8, T1 is 2′F, n² is 3, B2 is 2′-OMe, n³ is 7, n⁴ is 0, B3 is 2′-OMe, n⁵ is 3, B1′ is 2′-OMe or 2′-F, q¹ is 9, T1′ is 2′-F, q² is 1, B2′ is 2′-OMe or 2′-F, q³ is 4, q⁴ is 0, B3′ is 2′-OMe or 2′-F, q⁵ is 7, T3′ is 2′-F, q⁶ is 1, B4′ is 2′-F, and q⁷ is 1. The RNAi agent also comprises a 5′-VP. The 5′-VP may be 5′-E-VP, 5′-Z-VP, or combination thereof.

[0398] In one embodiment, B1 is 2′-OMe or 2′-F, n¹ is 8, T1 is 2′F, n² is 3, B2 is 2′-OMe, n³ is 7, n⁴ is 0, B3 is 2′-OMe, n⁵ is 3, B1′ is 2′-OMe or 2′-F, q¹ is 9, T1′ is 2′-F, q² is 1, B2′ is 2′-OMe or 2′-F, q³ is 4, q⁴ is 0, B3′ is 2′-OMe or 2′-F, q⁵ is 7, T3′ is 2′-F, q⁶ is 1, B4′ is 2′-F, and q⁷ is 1. The RNAi agent also comprises a 5′-PS₂.

[0399] In one embodiment, B1 is 2′-OMe or 2′-F, n¹ is 8, T1 is 2′F, n² is 3, B2 is 2′-OMe, n³ is 7, n⁴ is 0, B3 is 2′-OMe, n⁵ is 3, B1′ is 2′-OMe or 2′-F, q¹ is 9, T1′ is 2′-F, q² is 1, B2′ is 2′-OMe or 2′-F, q³ is 4, q⁴ is 0, B3′ is 2′-OMe or 2′-F, q⁵ is 7, T3′ is 2′-F, q⁶ is 1, B4′ is 2′-F, and q⁷ is 1. The RNAi agent also comprises a 5′-deoxy-5′-C-malonyl.

[0400] In one embodiment, B1 is 2′-OMe or 2′-F, n¹ is 8, T1 is 2′F, n² is 3, B2 is 2′-OMe, n³ is 7, n⁴ is 0, B3 is 2′-OMe, n⁵ is 3, B1′ is 2′-OMe or 2′-F, q¹ is 9, T1′ is 2′-F, q² is 1, B2′ is 2′-OMe or 2′-F, q³ is 4, q⁴ is 0, B3′ is 2′-OMe or 2′-F, q⁵ is 7, T3′ is 2′-F, q⁶ is 1, B4′ is 2′-F, and q⁷ is 1; with two phosphorothioate internucleotide linkage modifications within position 1-5 of the sense strand (counting from the 5′-end of the sense strand), and two phosphorothioate internucleotide linkage modifications at positions 1 and 2 and two phosphorothioate internucleotide linkage modifications within positions 18-23 of the antisense strand (counting from the 5′-end of the antisense strand). The RNAi agent also comprises a 5′-P.

[0401] In one embodiment, B1 is 2′-OMe or 2′-F, n¹ is 8, T1 is 2′F, n² is 3, B2 is 2′-OMe, n³ is 7, n⁴ is 0, B3 is 2′-OMe, n⁵ is 3, B1′ is 2′-OMe or 2′-F, q¹ is 9, T1′ is 2′-F, q² is 1, B2′ is 2′-OMe or 2′-F, q³ is 4, q⁴ is 0, B3′ is 2′-OMe or 2′-F, q⁵ is 7, T3′ is 2′-F, q⁶ is 1, B4′ is 2′-F, and q⁷ is 1; with two phosphorothioate internucleotide linkage modifications within position 1-5 of the sense strand (counting from the 5′-end of the sense strand), and two phosphorothioate internucleotide linkage modifications at positions 1 and 2 and two phosphorothioate internucleotide linkage modifications within positions 18-23 of the antisense strand (counting from the 5′-end of the antisense strand). The RNAi agent also comprises a 5′-PS.

[0402] In one embodiment, B1 is 2′-OMe or 2′-F, n¹ is 8, T1 is 2′F, n² is 3, B2 is 2′-OMe, n³ is 7, n⁴ is 0, B3 is 2′-OMe, n⁵ is 3, B1′ is 2′-OMe or 2′-F, q¹ is 9, T1′ is 2′-F, q² is 1, B2′ is 2′-OMe or 2′-F, q³ is 4, q⁴ is 0, B3′ is 2′-OMe or 2′-F, q⁵ is 7, T3′ is 2′-F, q⁶ is 1, B4′ is 2′-F, and q⁷ is 1; with two phosphorothioate internucleotide linkage modifications within position 1-5 of the sense strand (counting from the 5′-end of the sense strand), and two phosphorothioate internucleotide linkage modifications at positions 1 and 2 and two phosphorothioate internucleotide linkage modifications within positions 18-23 of the antisense strand (counting from the 5′-end of the antisense strand). The RNAi agent also comprises a 5′-VP. The 5′-VP may be 5′-E-VP. 5′-Z-VP, or combination thereof.

[0403] In one embodiment, B1 is 2′-OMe or 2′-F, n¹ is 8, T1 is 2′F, n² is 3, B2 is 2′-OMe, n³ is 7, n⁴ is 0, B3 is 2′-OMe, n⁵ is 3, B1′ is 2′-OMe or 2′-F, q¹ is 9, T1′ is 2′-F, q² is 1, B2′ is 2′-OMe or 2′-F, q³ is 4, q⁴ is 0, B3′ is 2′-OMe or 2′-F, q⁵ is 7, T3′ is 2′-F, q⁶ is 1, B4′ is 2′-F, and q⁷ is 1; with two phosphorothioate internucleotide linkage modifications within position 1-5 of the sense strand (counting from the 5′-end of the sense strand), and two phosphorothioate internucleotide linkage modifications at positions 1 and 2 and two phosphorothioate internucleotide linkage modifications within positions 18-23 of the antisense strand (counting from the 5′-end of the antisense strand). The RNAi agent also comprises a 5′-PS₂.

[0404] In one embodiment, B1 is 2′-OMe or 2′-F, n¹ is 8, T1 is 2′F, n² is 3, B2 is 2′-OMe, n³ is 7, n⁴ is 0, B3 is 2′-OMe, n⁵ is 3, B1′ is 2′-OMe or 2′-F, q¹ is 9, T1′ is 2′-F, q² is 1, B2′ is 2′-OMe or 2′-F, q³ is 4, q⁴ is 0, B3′ is 2′-OMe or 2′-F, q⁵ is 7, T3′ is 2′-F, q⁶ is 1, B4′ is 2′-F, and q⁷ is 1; with two phosphorothioate internucleotide linkage modifications within position 1-5 of the sense strand (counting from the 5′-end of the sense strand), and two phosphorothioate internucleotide linkage modifications at positions 1 and 2 and two phosphorothioate internucleotide linkage modifications within positions 18-23 of the antisense strand (counting from the 5′-end of the antisense strand). The RNAi agent also comprises a 5′-deoxy-5′-C-malonyl.

[0405] In one embodiment, B1 is 2′-OMe or 2′-F, n¹ is 8, T1 is 2′F, n¹ is 3, B2 is 2′-OMe, n³ is 7, n⁴ is 0, B3 is 2′-OMe, n⁵ is 3, B1′ is 2′-OMe or 2′-F, q¹ is 9, T1′ is 2′-F, q² is 1, B2′ is 2′-OMe or 2′-F, q³ is 4, T2′ is 2′-F, q⁴ is 2, B3′ is 2′-OMe or 2′-F, q⁵ is 5, T3′ is 2′-F, q⁶ is 1, B4′ is 2′-OMe, and q⁷ is 1; with two phosphorothioate internucleotide linkage modifications within position 1-5 of the sense strand (counting from the 5′-end of the sense strand), and two phosphorothioate internucleotide linkage modifications at positions 1 and 2 and two phosphorothioate internucleotide linkage modifications within positions 18-23 of the antisense strand (counting from the 5′-end of the antisense strand). The RNAi agent also comprises a 5′-P and a targeting ligand. In one embodiment, the 5′-P is at the 5′-end of the antisense strand, and the targeting ligand is at the 3′-end of the sense strand.

[0406] In one embodiment, B1 is 2′-OMe or 2′-F, n¹ is 8, T1 is 2′F, n² is 3, B2 is 2′-OMe, n³ is 7, n⁴ is 0, B3 is 2′-OMe, n⁵ is 3, B1′ is 2′-OMe or 2′-F, q¹ is 9, T1′ is 2′-F, q² is 1, B2′ is 2′-OMe or 2′-F, q³ is 4, T2′ is 2′-F, q⁴ is 2, B3′ is 2′-OMe or 2′-F, q⁵ is 5, T3′ is 2′-F, q⁶ is 1, B4′ is 2′-OMe, and q⁷ is 1; with two phosphorothioate internucleotide linkage modifications within position 1-5 of the sense strand (counting from the 5′-end of the sense strand), and two phosphorothioate internucleotide linkage modifications at positions 1 and 2 and two phosphorothioate internucleotide linkage modifications within positions 18-23 of the antisense strand (counting from the 5′-end of the antisense strand). The RNAi agent also comprises a 5′-PS and a targeting ligand. In one embodiment, the 5′-PS is at the 5′-end of the antisense strand, and the targeting ligand is at the 3′-end of the sense strand.

[0407] In one embodiment, B1 is 2′-OMe or 2′-F, n¹ is 8, T1 is 2′F, n² is 3, B2 is 2′-OMe, n³ is 7, n⁴ is 0, B3 is 2′-OMe, n⁵ is 3, B1′ is 2′-OMe or 2′-F, q¹ is 9, T1′ is 2′-F, q² is 1, B2′ is 2′-OMe or 2′-F, q³ is 4, T2′ is 2′-F, q⁴ is 2, B3′ is 2′-OMe or 2′-F, q⁵ is 5, T3′ is 2′-F, q⁶ is 1, B4′ is 2′-OMe, and q⁷ is 1; with two phosphorothioate internucleotide linkage modifications within position 1-5 of the sense strand (counting from the 5′-end of the sense strand), and two phosphorothioate internucleotide linkage modifications at positions 1 and 2 and two phosphorothioate internucleotide linkage modifications within positions 18-23 of the antisense strand (counting from the 5′-end of the antisense strand). The RNAi agent also comprises a 5′-VP (e.g., a 5′-E-VP, 5′-Z-VP, or combination thereof), and a targeting ligand.

[0408] In one embodiment, the 5′-VP is at the 5′-end of the antisense strand, and the targeting ligand is at the 3′-end of the sense strand.

[0409] In one embodiment, B1 is 2′-OMe or 2′-F, n¹ is 8, T1 is 2′F, n¹ is 3, B2 is 2′-OMe, n³ is 7, n⁴ is 0, B3 is 2′-OMe, n⁵ is 3, B1′ is 2′-OMe or 2′-F, q¹ is 9, T1′ is 2′-F, q² is 1, B2′ is 2′-OMe or 2′-F, q³ is 4, T2′ is 2′-F, q⁴ is 2, B3′ is 2′-OMe or 2′-F, q⁵ is 5, T3′ is 2′-F, q⁶ is 1, B4′ is 2′-OMe, and q⁷ is 1; with two phosphorothioate internucleotide linkage modifications within position 1-5 of the sense strand (counting from the 5′-end of the sense strand), and two phosphorothioate internucleotide linkage modifications at positions 1 and 2 and two phosphorothioate internucleotide linkage modifications within positions 18-23 of the antisense strand (counting from the 5′-end of the antisense strand). The RNAi agent also comprises a 5′-PS₂ and a targeting ligand. In one embodiment, the 5′-PS₂ is at the 5′-end of the antisense strand, and the targeting ligand is at the 3′-end of the sense strand. In one embodiment, B1 is 2′-OMe or 2′-F, n¹ is 8, T1 is 2′F, n² is 3, B2 is 2′-OMe, n³ is 7, n⁴ is 0, B3 is 2′-OMe, n⁵ is 3, B1′ is 2′-OMe or 2′-F, q¹ is 9, T1′ is 2′-F, q² is 1, B2′ is 2′-OMe or 2′-F, q³ is 4, T2′ is 2′-F, q⁴ is 2, B3′ is 2′-OMe or 2′-F, q⁵ is 5, T3′ is 2′-F, q⁶ is 1, B4′ is 2′-OMe, and q⁷ is 1; with two phosphorothioate internucleotide linkage modifications within position 1-5 of the sense strand (counting from the 5′-end of the sense strand), and two phosphorothioate internucleotide linkage modifications at positions 1 and 2 and two phosphorothioate internucleotide linkage modifications within positions 18-23 of the antisense strand (counting from the 5′-end of the antisense strand). The RNAi agent also comprises a 5′-deoxy-5′-C-malonyl and a targeting ligand. In one embodiment, the 5′-deoxy-5′-C-malonyl is at the 5′-end of the antisense strand, and the targeting ligand is at the 3′-end of the sense strand.

[0410] In one embodiment, B1 is 2′-OMe or 2′-F, n¹ is 8, T1 is 2′F, n² is 3, B2 is 2′-OMe, n³ is 7, n⁴ is 0, B3 is 2′-OMe, n⁵ is 3, B1′ is 2′-OMe or 2′-F, q¹ is 9, T1′ is 2′-F, q² is 1, B2′ is 2′-OMe or 2′-F, q³ is 4, q⁴ is 0, B3′ is 2′-OMe or 2′-F, q⁵ is 7, T3′ is 2′-F, q⁶ is 1, B4′ is 2′-OMe, and q⁷ is 1; with two phosphorothioate internucleotide linkage modifications within position 1-5 of the sense strand (counting from the 5′-end), and two phosphorothioate internucleotide linkage modifications at positions 1 and 2 and two phosphorothioate internucleotide linkage modifications within positions 18-23 of the antisense strand (counting from the 5′-end). The RNAi agent also comprises a 5′-P and a targeting ligand. In one embodiment, the 5′-P is at the 5′-end of the antisense strand, and the targeting ligand is at the 3′-end of the sense strand.

[0411] In one embodiment, B1 is 2′-OMe or 2′-F, n¹ is 8, T1 is 2′F, n² is 3, B2 is 2′-OMe, n³ is 7, n⁴ is 0, B3 is 2′-OMe, n⁵ is 3, B1′ is 2′-OMe or 2′-F, q¹ is 9, T1′ is 2′-F, q² is 1, B2′ is 2′-OMe or 2′-F, q³ is 4, q⁴ is 0, B3′ is 2′-OMe or 2′-F, q⁵ is 7, T3′ is 2′-F, q⁶ is 1, B4′ is 2′-OMe, and q⁷ is 1; with two phosphorothioate internucleotide linkage modifications within position 1-5 of the sense strand (counting from the 5′-end), and two phosphorothioate internucleotide linkage modifications at positions 1 and 2 and two phosphorothioate internucleotide linkage modifications within positions 18-23 of the antisense strand (counting from the 5′-end). The RNAi agent also comprises a 5′-PS and a targeting ligand. In one embodiment, the 5′-PS is at the 5′-end of the antisense strand, and the targeting ligand is at the 3′-end of the sense strand.

[0412] In one embodiment, B1 is 2′-OMe or 2′-F, n¹ is 8, T1 is 2′F, n² is 3, B2 is 2′-OMe, n³ is 7, n⁴ is 0, B3 is 2′-OMe, n⁵ is 3, B1′ is 2′-OMe or 2′-F, q¹ is 9, T1′ is 2′-F, q² is 1, B2′ is 2′-OMe or 2′-F, q³ is 4, q⁴ is 0, B3′ is 2′-OMe or 2′-F, q⁵ is 7, T3′ is 2′-F, q⁶ is 1, B4′ is 2′-OMe, and q⁷ is 1; with two phosphorothioate internucleotide linkage modifications within position 1-5 of the sense strand (counting from the 5′-end), and two phosphorothioate internucleotide linkage modifications at positions 1 and 2 and two phosphorothioate internucleotide linkage modifications within positions 18-23 of the antisense strand (counting from the 5′-end). The RNAi agent also comprises a 5′-VP (e.g., a 5′-E-VP. 5′-Z-VP, or combination thereof) and a targeting ligand. In one embodiment, the 5′-VP is at the 5′-end of the antisense strand, and the targeting ligand is at the 3′-end of the sense strand.

[0413] In one embodiment, B1 is 2′-OMe or 2′-F, n¹ is 8, T1 is 2′F, n² is 3, B2 is 2′-OMe, n³ is 7, n⁴ is 0, B3 is 2′-OMe, n⁵ is 3, B1′ is 2′-OMe or 2′-F, q¹ is 9, T1′ is 2′-F, q² is 1, B2′ is 2′-OMe or 2′-F, q³ is 4, q⁴ is 0, B3′ is 2′-OMe or 2′-F, q⁵ is 7, T3′ is 2′-F, q⁶ is 1, B4′ is 2′-OMe, and q⁷ is 1; with two phosphorothioate internucleotide linkage modifications within position 1-5 of the sense strand (counting from the 5′-end), and two phosphorothioate internucleotide linkage modifications at positions 1 and 2 and two phosphorothioate internucleotide linkage modifications within positions 18-23 of the antisense strand (counting from the 5′-end). The RNAi agent also comprises a 5′-PS₂ and a targeting ligand. In one embodiment, the 5′-PS₂ is at the 5′-end of the antisense strand, and the targeting ligand is at the 3′-end of the sense strand.

[0414] In one embodiment, B1 is 2′-OMe or 2′-F, n¹ is 8, T1 is 2′F, n² is 3, B2 is 2′-OMe, n³ is 7, n⁴ is 0, B3 is 2′-OMe, n⁵ is 3, B1′ is 2′-OMe or 2′-F, q¹ is 9, T1′ is 2′-F, q² is 1, B2′ is 2′-OMe or 2′-F, q³ is 4, q⁴ is 0, B3′ is 2′-OMe or 2′-F, q⁵ is 7, T3′ is 2′-F, q⁶ is 1, B4′ is 2′-OMe, and q⁷ is 1; with two phosphorothioate internucleotide linkage modifications within position 1-5 of the sense strand (counting from the 5′-end), and two phosphorothioate internucleotide linkage modifications at positions 1 and 2 and two phosphorothioate internucleotide linkage modifications within positions 18-23 of the antisense strand (counting from the 5′-end). The RNAi agent also comprises a 5′-deoxy-5′-C-malonyl and a targeting ligand. In one embodiment, the 5′-deoxy-5′-C-malonyl is at the 5′-end of the antisense strand, and the targeting ligand is at the 3′-end of the sense strand.

[0415] In one embodiment, B1 is 2′-OMe or 2′-F, n¹ is 8, T1 is 2′F, n² is 3, B2 is 2′-OMe, n³ is 7, n⁴ is 0, B3 is 2′-OMe, n⁵ is 3, B1′ is 2′-OMe or 2′-F, q¹ is 9, T1′ is 2′-F, q² is 1, B2′ is 2′-OMe or 2′-F, q³ is 4, T2′ is 2′-F, q⁴ is 2, B3′ is 2′-OMe or 2′-F, q⁵ is 5, T3′ is 2′-F, q⁶ is 1, B4′ is 2′-F, and q⁷ is 1; with two phosphorothioate internucleotide linkage modifications within position 1-5 of the sense strand (counting from the 5′-end of the sense strand), and two phosphorothioate internucleotide linkage modifications at positions 1 and 2 and two phosphorothioate internucleotide linkage modifications within positions 18-23 of the antisense strand (counting from the 5′-end of the antisense strand). The RNAi agent also comprises a 5′-P and a targeting ligand. In one embodiment, the 5′-P is at the 5′-end of the antisense strand, and the targeting ligand is at the 3′-end of the sense strand.

[0416] In one embodiment, B1 is 2′-OMe or 2′-F, n¹ is 8, T1 is 2′F, n¹ is 3, B2 is 2′-OMe, n³ is 7, n⁴ is 0, B3 is 2′-OMe, n⁵ is 3, B1′ is 2′-OMe or 2′-F, q¹ is 9, T1′ is 2′-F, q² is 1, B2′ is 2′-OMe or 2′-F, q³ is 4, T2′ is 2′-F, q⁴ is 2, B3′ is 2′-OMe or 2′-F, q⁵ is 5, T3′ is 2′-F, q⁶ is 1, B4′ is 2′-F, and q⁷ is 1; with two phosphorothioate internucleotide linkage modifications within position 1-5 of the sense strand (counting from the 5′-end of the sense strand), and two phosphorothioate internucleotide linkage modifications at positions 1 and 2 and two phosphorothioate internucleotide linkage modifications within positions 18-23 of the antisense strand (counting from the 5′-end of the antisense strand). The RNAi agent also comprises a 5′-PS and a targeting ligand. In one embodiment, the 5′-PS is at the 5′-end of the antisense strand, and the targeting ligand is at the 3′-end of the sense strand.

[0417] In one embodiment, B1 is 2′-OMe or 2′-F, n¹ is 8, T1 is 2′F, n² is 3, B2 is 2′-OMe, n³ is 7, n⁴ is 0, B3 is 2′-OMe, n⁵ is 3, B1′ is 2′-OMe or 2′-F, q¹ is 9, T1′ is 2′-F, q² is 1, B2′ is 2′-OMe or 2′-F, q³ is 4, T2′ is 2′-F, q⁴ is 2, B3′ is 2′-OMe or 2′-F, q⁵ is 5, T3′ is 2′-F, q⁶ is 1, B4′ is 2′-F, and q⁷ is 1; with two phosphorothioate internucleotide linkage modifications within position 1-5 of the sense strand (counting from the 5′-end of the sense strand), and two phosphorothioate internucleotide linkage modifications at positions 1 and 2 and two phosphorothioate internucleotide linkage modifications within positions 18-23 of the antisense strand (counting from the 5′-end of the antisense strand). The RNAi agent also comprises a 5′-VP (e.g., a 5′-E-VP. 5′-Z-VP, or combination thereof) and a targeting ligand. In one embodiment, the 5′-VP is at the 5′-end of the antisense strand, and the targeting ligand is at the 3′-end of the sense strand.

[0418] In one embodiment, B1 is 2′-OMe or 2′-F, n¹ is 8, T1 is 2′F, n² is 3, B2 is 2′-OMe, n³ is 7, n⁴ is 0, B3 is 2′-OMe, n⁵ is 3, B1′ is 2′-OMe or 2′-F, q¹ is 9, T1′ is 2′-F, q² is 1, B2′ is 2′-OMe or 2′-F, q³ is 4, T2′ is 2′-F, q⁴ is 2, B3′ is 2′-OMe or 2′-F, q⁵ is 5, T3′ is 2′-F, q⁶ is 1, B4′ is 2′-F, and q⁷ is 1; with two phosphorothioate internucleotide linkage modifications within position 1-5 of the sense strand (counting from the 5′-end of the sense strand), and two phosphorothioate internucleotide linkage modifications at positions 1 and 2 and two phosphorothioate internucleotide linkage modifications within positions 18-23 of the antisense strand (counting from the 5′-end of the antisense strand). The RNAi agent also comprises a 5′-PS₂ and a targeting ligand. In one embodiment, the 5′-PS₂ is at the 5′-end of the antisense strand, and the targeting ligand is at the 3′-end of the sense strand.

[0419] In one embodiment, B1 is 2′-OMe or 2′-F, n¹ is 8, T1 is 2′F, n² is 3, B2 is 2′-OMe, n³ is 7, n⁴ is 0, B3 is 2′-OMe, n⁵ is 3, B1′ is 2′-OMe or 2′-F, q¹ is 9, T1′ is 2′-F, q² is 1, B2′ is 2′-OMe or 2′-F, q³ is 4, T2′ is 2′-F, q⁴ is 2, B3′ is 2′-OMe or 2′-F, q⁵ is 5, T3′ is 2′-F, q⁶ is 1, B4′ is 2′-F, and q⁷ is 1; with two phosphorothioate internucleotide linkage modifications within position 1-5 of the sense strand (counting from the 5′-end of the sense strand), and two phosphorothioate internucleotide linkage modifications at positions 1 and 2 and two phosphorothioate internucleotide linkage modifications within positions 18-23 of the antisense strand (counting from the 5′-end of the antisense strand). The RNAi agent also comprises a 5′-deoxy-5′-C-malonyl and a targeting ligand. In one embodiment, the 5′-deoxy-5′-C-malonyl is at the 5′-end of the antisense strand, and the targeting ligand is at the 3′-end of the sense strand.

[0420] In one embodiment, B1 is 2′-OMe or 2′-F, n¹ is 8, T1 is 2′F, n² is 3, B2 is 2′-OMe, n³ is 7, n⁴ is 0, B3 is 2′-OMe, n⁵ is 3, B1′ is 2′-OMe or 2′-F, q¹ is 9, T1′ is 2′-F, q² is 1, B2′ is 2′-OMe or 2′-F, q³ is 4, q⁴ is 0, B3′ is 2′-OMe or 2′-F, q⁵ is 7, T3′ is 2′-F, q⁶ is 1, B4′ is 2′-F, and q⁷ is 1; with two phosphorothioate internucleotide linkage modifications within position 1-5 of the sense strand (counting from the 5′-end of the sense strand), and two phosphorothioate internucleotide linkage modifications at positions 1 and 2 and two phosphorothioate internucleotide linkage modifications within positions 18-23 of the antisense strand (counting from the 5′-end of the antisense strand). The RNAi agent also comprises a 5′-P and a targeting ligand. In one embodiment, the 5′-P is at the 5′-end of the antisense strand, and the targeting ligand is at the 3′-end of the sense strand.

[0421] In one embodiment, B1 is 2′-OMe or 2′-F, n¹ is 8, T1 is 2′F, n² is 3, B2 is 2′-OMe, n³ is 7, n⁴ is 0, B3 is 2′-OMe, n⁵ is 3, B1′ is 2′-OMe or 2′-F, q¹ is 9, T1′ is 2′-F, q² is 1, B2′ is 2′-OMe or 2′-F, q³ is 4, q⁴ is 0, B3′ is 2′-OMe or 2′-F, q⁵ is 7, T3′ is 2′-F, q⁶ is 1, B4′ is 2′-F, and q⁷ is 1; with two phosphorothioate internucleotide linkage modifications within position 1-5 of the sense strand (counting from the 5′-end of the sense strand), and two phosphorothioate internucleotide linkage modifications at positions 1 and 2 and two phosphorothioate internucleotide linkage modifications within positions 18-23 of the antisense strand (counting from the 5′-end of the antisense strand). The RNAi agent also comprises a 5′-PS and a targeting ligand. In one embodiment, the 5′-PS is at the 5′-end of the antisense strand, and the targeting ligand is at the 3′-end of the sense strand.

[0422] In one embodiment, B1 is 2′-OMe or 2′-F, n¹ is 8, T1 is 2′F, n² is 3, B2 is 2′-OMe, n³ is 7, n⁴ is 0, B3 is 2′-OMe, n⁵ is 3, B1′ is 2′-OMe or 2′-F, q¹ is 9, T1′ is 2′-F, q² is 1, B2′ is 2′-OMe or 2′-F, q³ is 4, q⁴ is 0, B3′ is 2′-OMe or 2′-F, q⁵ is 7, T3′ is 2′-F, q⁶ is 1, B4′ is 2′-F, and q⁷ is 1; with two phosphorothioate internucleotide linkage modifications within position 1-5 of the sense strand (counting from the 5′-end of the sense strand), and two phosphorothioate internucleotide linkage modifications at positions 1 and 2 and two phosphorothioate internucleotide linkage modifications within positions 18-23 of the antisense strand (counting from the 5′-end of the antisense strand). The RNAi agent also comprises a 5′-VP (e.g., a 5′-E-VP, 5′-Z-VP, or combination thereof) and a targeting ligand. In one embodiment, the 5′-VP is at the 5′-end of the antisense strand, and the targeting ligand is at the 3′-end of the sense strand.

[0423] In one embodiment, B1 is 2′-OMe or 2′-F, n¹ is 8, T1 is 2′F, n² is 3, B2 is 2′-OMe, n³ is 7, n⁴ is 0, B3 is 2′-OMe, n⁵ is 3, B1′ is 2′-OMe or 2′-F, q¹ is 9, T1′ is 2′-F, q² is 1, B2′ is 2′-OMe or 2′-F, q³ is 4, q⁴ is 0, B3′ is 2′-OMe or 2′-F, q⁵ is 7, T3′ is 2′-F, q⁶ is 1, B4′ is 2′-F, and q⁷ is 1; with two phosphorothioate internucleotide linkage modifications within position 1-5 of the sense strand (counting from the 5′-end of the sense strand), and two phosphorothioate internucleotide linkage modifications at positions 1 and 2 and two phosphorothioate internucleotide linkage modifications within positions 18-23 of the antisense strand (counting from the 5′-end of the antisense strand). The RNAi agent also comprises a 5′-PS₂ and a targeting ligand. In one embodiment, the 5′-PS₂ is at the 5′-end of the antisense strand, and the targeting ligand is at the 3′-end of the sense strand.

[0424] In one embodiment, B1 is 2′-OMe or 2′-F, n¹ is 8, T1 is 2′F, n² is 3, B2 is 2′-OMe, n³ is 7, n⁴ is 0, B3 is 2′-OMe, n⁵ is 3, B1′ is 2′-OMe or 2′-F, q¹ is 9, T1′ is 2′-F, q² is 1, B2′ is 2′-OMe or 2′-F, q³ is 4, q⁴ is 0, B3′ is 2′-OMe or 2′-F, q⁵ is 7, T3′ is 2′-F, q⁶ is 1, B4′ is 2′-F, and q⁷ is 1; with two phosphorothioate internucleotide linkage modifications within position 1-5 of the sense strand (counting from the 5′-end of the sense strand), and two phosphorothioate internucleotide linkage modifications at positions 1 and 2 and two phosphorothioate internucleotide linkage modifications within positions 18-23 of the antisense strand (counting from the 5′-end of the antisense strand). The RNAi agent also comprises a 5′-deoxy-5′-C-malonyl and a targeting ligand. In one embodiment, the 5′-deoxy-5′-C-malonyl is at the 5′-end of the antisense strand, and the targeting ligand is at the 3′-end of the sense strand.

[0425] In a particular embodiment, an RNAi agent of the present invention comprises:
[0426] (a) a sense strand having:
   [0427] (i) a length of 21 nucleotides;
   [0428] (ii) an ASGPR ligand attached to the 3′-end, wherein said ASGPR ligand comprises three GalNAc derivatives attached through a trivalent branched linker; and
   [0429] (iii) 2′-F modifications at positions 1, 3, 5, 7, 9 to 11, 13, 17, 19, and 21, and 2′-OMe modifications at positions 2, 4, 6, 8, 12, 14 to 16, 18, and 20 (counting from the 5′ end); and
[0430] (b) an antisense strand having:
   [0431] (i) a length of 23 nucleotides;
   [0432] (ii) 2′-OMe modifications at positions 1, 3, 5, 9, 11 to 13, 15, 17, 19, 21, and 23, and 2′F modifications at positions 2, 4, 6 to 8, 10, 14, 16, 18, 20, and 22 (counting from the 5′ end); and
   [0433] (iii) phosphorothioate internucleotide linkages between nucleotide positions 21 and 22, and between nucleotide positions 22 and 23 (counting from the 5′ end);
[0434] wherein the dsRNA agents have a two nucleotide overhang at the 3′-end of the antisense strand, and a blunt end at the 5′-end of the antisense strand.

[0435] In another particular embodiment, an RNAi agent of the present invention comprises:
[0436] (a) a sense strand having:
[0437] (i) a length of 21 nucleotides;
[0438] (ii) an ASGPR ligand attached to the 3′-end, wherein said ASGPR ligand comprises three GalNAc derivatives attached through a trivalent branched linker;
   [0439] (iii) 2′-F modifications at positions 1, 3, 5, 7, 9 to 11, 13, 15, 17, 19, and 21, and 2′-OMe modifications at positions 2, 4, 6, 8, 12, 14, 16, 18, and 20 (counting from the 5′ end); and
   [0440] (iv) phosphorothioate internucleotide linkages between nucleotide positions 1 and 2, and between nucleotide positions 2 and 3 (counting from the 5′ end); and
[0441] (b) an antisense strand having:
   [0442] (i) a length of 23 nucleotides;
[0443] (ii) 2′-OMe modifications at positions 1, 3, 5, 7, 9, 11 to 13, 15, 17, 19, and 21 to 23, and 2′F modifications at positions 2, 4, 6, 8, 10, 14, 16, 18, and 20 (counting from the 5′ end); and
[0444] (iii) phosphorothioate internucleotide linkages between nucleotide positions 1 and 2, between nucleotide positions 2 and 3, between nucleotide positions 21 and 22, and between nucleotide positions 22 and 23 (counting from the 5′ end);
   wherein the RNAi agents have a two nucleotide overhang at the 3′-end of the antisense strand, and a blunt end at the 5′-end of the antisense strand.

[0445] In another particular embodiment, a RNAi agent of the present invention comprises:
[0446] (a) a sense strand having:
   [0447] (i) a length of 21 nucleotides;
[0448] (ii) an ASGPR ligand attached to the 3′-end, wherein said ASGPR ligand comprises three GalNAc derivatives attached through a trivalent branched linker;
[0449] (iii) 2′-OMe modifications at positions 1 to 6, 8, 10, and 12 to 21, 2′-F modifications at positions 7, and 9, and a deoxy-nucleotide (e.g. dT) at position 11 (counting from the 5′ end); and
   [0450] (iv) phosphorothioate internucleotide linkages between nucleotide positions 1 and 2, and between nucleotide positions 2 and 3 (counting from the 5′ end); and
[0451] (b) an antisense strand having:
   [0452] (i) a length of 23 nucleotides;
[0453] (ii) 2′-OMe modifications at positions 1, 3, 7, 9, 11, 13, 15, 17, and 19 to 23, and 2′-F modifications at positions 2, 4 to 6, 8, 10, 12, 14, 16, and 18 (counting from the 5′ end); and
[0454] (iii) phosphorothioate internucleotide linkages between nucleotide positions 1 and 2, between nucleotide positions 2 and 3, between nucleotide positions 21 and 22, and between nucleotide positions 22 and 23 (counting from the 5′ end);
   wherein the RNAi agents have a two nucleotide overhang at the 3′-end of the antisense strand, and a blunt end at the 5′-end of the antisense strand.

[0455] In another particular embodiment, a RNAi agent of the present invention comprises:
[0456] (a) a sense strand having:
   [0457] (i) a length of 21 nucleotides;
[0458] (ii) an ASGPR ligand attached to the 3′-end, wherein said ASGPR ligand comprises three GalNAc derivatives attached through a trivalent branched linker;
   [0459] (iii) 2′-OMe modifications at positions 1 to 6, 8, 10, 12, 14, and 16 to 21, and 2′-F modifications at positions 7, 9, 11, 13, and 15; and
   [0460] (iv) phosphorothioate internucleotide linkages between nucleotide positions 1 and 2, and between nucleotide positions 2 and 3 (counting from the 5′ end);
      and
[0461] (b) an antisense strand having:
   [0462] (i) a length of 23 nucleotides;
[0463] (ii) 2′-OMe modifications at positions 1, 5, 7, 9, 11, 13, 15, 17, 19, and 21 to 23, and 2′-F modifications at positions 2 to 4, 6, 8, 10, 12, 14, 16, 18, and 20 (counting from the 5′ end); and
[0464] (iii) phosphorothioate internucleotide linkages between nucleotide positions 1 and 2, between nucleotide positions 2 and 3, between nucleotide positions 21 and 22, and between nucleotide positions 22 and 23 (counting from the 5′ end);
   wherein the RNAi agents have a two nucleotide overhang at the 3′-end of the antisense strand, and a blunt end at the 5′-end of the antisense strand.

[0465] In another particular embodiment, a RNAi agent of the present invention comprises:
[0466] (a) a sense strand having:
   [0467] (i) a length of 21 nucleotides;
[0468] (ii) an ASGPR ligand attached to the 3′-end, wherein said ASGPR ligand comprises three GalNAc derivatives attached through a trivalent branched linker;
   [0469] (iii) 2′-OMe modifications at positions 1 to 9, and 12 to 21, and 2′-F modifications at positions 10, and 11; and
   [0470] (iv) phosphorothioate internucleotide linkages between nucleotide positions 1 and 2, and between nucleotide positions 2 and 3 (counting from the 5′ end);
      and
[0471] (b) an antisense strand having:
   [0472] (i) a length of 23 nucleotides;
[0473] (ii) 2′-OMe modifications at positions 1, 3, 5, 7, 9, 11 to 13, 15, 17, 19, and 21 to 23, and 2′-F modifications at positions 2, 4, 6, 8, 10, 14, 16, 18, and 20 (counting from the 5′ end); and
[0474] (iii) phosphorothioate internucleotide linkages between nucleotide positions 1 and 2, between nucleotide positions 2 and 3, between nucleotide positions 21 and 22, and between nucleotide positions 22 and 23 (counting from the 5′ end);
   wherein the RNAi agents have a two nucleotide overhang at the 3′-end of the antisense strand, and a blunt end at the 5′-end of the antisense strand.

[0475] In another particular embodiment, a RNAi agent of the present invention comprises:
[0476] (a) a sense strand having:
   [0477] (i) a length of 21 nucleotides;
[0478] (ii) an ASGPR ligand attached to the 3′-end, wherein said ASGPR ligand comprises three GalNAc derivatives attached through a trivalent branched linker;
   [0479] (iii) 2′-F modifications at positions 1, 3, 5, 7, 9 to 11, and 13, and 2′-OMe modifications at positions 2, 4, 6, 8, 12, and 14 to 21; and
   [0480] (iv) phosphorothioate internucleotide linkages between nucleotide positions 1 and 2, and between nucleotide positions 2 and 3 (counting from the 5′ end);
      and
[0481] (b) an antisense strand having:
   [0482] (i) a length of 23 nucleotides;
[0483] (ii) 2′-OMe modifications at positions 1, 3, 5 to 7, 9, 11 to 13, 15, 17 to 19, and 21 to 23, and 2′-F modifications at positions 2, 4, 8, 10, 14, 16, and 20 (counting from the 5′ end); and
[0484] (iii) phosphorothioate internucleotide linkages between nucleotide positions 1 and 2, between nucleotide positions 2 and 3, between nucleotide positions 21 and 22, and between nucleotide positions 22 and 23 (counting from the 5′ end);
   wherein the RNAi agents have a two nucleotide overhang at the 3′-end of the antisense strand, and a blunt end at the 5′-end of the antisense strand.

[0485] In another particular embodiment, a RNAi agent of the present invention comprises:
[0486] (a) a sense strand having:
   [0487] (i) a length of 21 nucleotides;
[0488] (ii) an ASGPR ligand attached to the 3′-end, wherein said ASGPR ligand comprises three GalNAc derivatives attached through a trivalent branched linker;
   [0489] (iii) 2′-OMe modifications at positions 1, 2, 4, 6, 8, 12, 14, 15, 17, and 19 to 21, and 2′-F modifications at positions 3, 5, 7, 9 to 11, 13, 16, and 18; and
   [0490] (iv) phosphorothioate internucleotide linkages between nucleotide positions 1 and 2, and between nucleotide positions 2 and 3 (counting from the 5′ end);
      and
[0491] (b) an antisense strand having:
   [0492] (i) a length of 25 nucleotides;
[0493] (ii) 2′-OMe modifications at positions 1, 4, 6, 7, 9, 11 to 13, 15, 17, and 19 to 23, 2′-F modifications at positions 2, 3, 5, 8, 10, 14, 16, and 18, and deoxy-nucleotides (e.g. dT) at positions 24 and 25 (counting from the 5′ end); and
   [0494] (iii) phosphorothioate internucleotide linkages between nucleotide positions 1 and 2, between nucleotide positions 2 and 3, between nucleotide positions 21 and 22, and between nucleotide positions 22 and 23 (counting from the 5′ end);
      wherein the RNAi agents have a four nucleotide overhang at the 3′-end of the antisense strand, and a blunt end at the 5′-end of the antisense strand.

[0495] In another particular embodiment, a RNAi agent of the present invention comprises:
[0496] (a) a sense strand having:
   [0497] (i) a length of 21 nucleotides;
[0498] (ii) an ASGPR ligand attached to the 3′-end, wherein said ASGPR ligand comprises three GalNAc derivatives attached through a trivalent branched linker;
   [0499] (iii) 2′-OMe modifications at positions 1 to 6, 8, and 12 to 21, and 2′-F modifications at positions 7, and 9 to 11; and
   [0500] (iv) phosphorothioate internucleotide linkages between nucleotide positions 1 and 2, and between nucleotide positions 2 and 3 (counting from the 5′ end);
      and
[0501] (b) an antisense strand having:
   [0502] (i) a length of 23 nucleotides;
[0503] (ii) 2′-OMe modifications at positions 1, 3 to 5, 7, 8, 10 to 13, 15, and 17 to 23, and 2′-F modifications at positions 2, 6, 9, 14, and 16 (counting from the 5′ end); and
[0504] (iii) phosphorothioate internucleotide linkages between nucleotide positions 1 and 2, between nucleotide positions 2 and 3, between nucleotide positions 21 and 22, and between nucleotide positions 22 and 23 (counting from the 5′ end);
   wherein the RNAi agents have a two nucleotide overhang at the 3′-end of the antisense strand, and a blunt end at the 5′-end of the antisense strand.

[0505] In another particular embodiment, a RNAi agent of the present invention comprises:
[0506] (a) a sense strand having:
   [0507] (i) a length of 21 nucleotides;
[0508] (ii) an ASGPR ligand attached to the 3′-end, wherein said ASGPR ligand comprises three GalNAc derivatives attached through a trivalent branched linker;
   [0509] (iii) 2′-OMe modifications at positions 1 to 6, 8, and 12 to 21, and 2′-F modifications at positions 7, and 9 to 11; and
   [0510] (iv) phosphorothioate internucleotide linkages between nucleotide positions 1 and 2, and between nucleotide positions 2 and 3 (counting from the 5′ end);
      and
[0511] (b) an antisense strand having:
   [0512] (i) a length of 23 nucleotides;
[0513] (ii) 2′-OMe modifications at positions 1, 3 to 5, 7, 10 to 13, 15, and 17 to 23, and 2′-F modifications at positions 2, 6, 8, 9, 14, and 16 (counting from the 5′ end); and
[0514] (iii) phosphorothioate internucleotide linkages between nucleotide positions 1 and 2, between nucleotide positions 2 and 3, between nucleotide positions 21 and 22, and between nucleotide positions 22 and 23 (counting from the 5′ end);
   wherein the RNAi agents have a two nucleotide overhang at the 3′-end of the antisense strand, and a blunt end at the 5′-end of the antisense strand.

[0515] In another particular embodiment, a RNAi agent of the present invention comprises:
[0516] (a) a sense strand having:
   [0517] (i) a length of 19 nucleotides;
[0518] (ii) an ASGPR ligand attached to the 3′-end, wherein said ASGPR ligand comprises three GalNAc derivatives attached through a trivalent branched linker;
   [0519] (iii) 2′-OMe modifications at positions 1 to 4, 6, and 10 to 19, and 2′-F modifications at positions 5, and 7 to 9; and
   [0520] (iv) phosphorothioate internucleotide linkages between nucleotide positions 1 and 2, and between nucleotide positions 2 and 3 (counting from the 5′ end);
      and
[0521] (b) an antisense strand having:
   [0522] (i) a length of 21 nucleotides;
[0523] (ii) 2′-OMe modifications at positions 1, 3 to 5, 7, 10 to 13, 15, and 17 to 21, and 2′-F modifications at positions 2, 6, 8, 9, 14, and 16 (counting from the 5′ end); and
[0524] (iii) phosphorothioate internucleotide linkages between nucleotide positions 1 and 2, between nucleotide positions 2 and 3, between nucleotide positions 19 and 20, and between nucleotide positions 20 and 21 (counting from the 5′ end);
   wherein the RNAi agents have a two nucleotide overhang at the 3′-end of the antisense strand, and a blunt end at the 5′-end of the antisense strand.

[0525] In certain embodiments, the iRNA for use in the methods of the invention is an agent selected from agents listed in any one of Tables 2-7. These agents may further comprise a ligand.

### III. iRNAs Conjugated to Ligands

[0526] Another modification of the RNA of an iRNA of the invention involves chemically linking to the iRNA one or more ligands, moieties or conjugates that enhance the activity, cellular distribution, or cellular uptake of the iRNA e.g., into a cell. Such moieties include but are not limited to lipid moieties such as a cholesterol moiety (Letsinger et al., Proc. Natl. Acid. Sci. USA, 1989, 86:6553-6556). In other embodiments, the ligand is cholic acid (Manoharan et al., Biorg. Med. Chem. Let., 1994, 4:1053-1060), a thioether, e.g., beryl-S-tritylthiol (Manoharan et al., Ann. N.Y. Acad. Sci., 1992, 660:306-309; Manoharan et al., Biorg. Med. Chem. Let., 1993, 3:2765-2770), a thiocholesterol (Oberhauser et al., Nucl. Acids Res., 1992, 20:533-538), an aliphatic chain, e.g., dodecandiol or undecyl residues (Saison-Behmoaras et al., EMBO J, 1991, 10:1111-1118; Kabanov et al., FEBS Lett., 1990, 259:327-330; Svinarchuk et al., Biochimie, 1993, 75:49-54), a phospholipid, e.g., di-hexadecyl-rac-glycerol or triethyl-ammonium 1,2-di-O-hexadecyl-rac-glycero-3-phosphonate (Manoharan et al., Tetrahedron Lett., 1995, 36:3651-3654; Shea et al., Nucl. Acids Res., 1990, 18:3777-3783), a polyamine or a polyethylene glycol chain (Manoharan et al., Nucleosides & Nucleotides, 1995, 14:969-973), or adamantane acetic acid (Manoharan et al., Tetrahedron Lett., 1995, 36:3651-3654), a palmityl moiety (Mishra et al., Biochim. Biophys. Acta, 1995, 1264:229-237), or an octadecylamine or hexylamino-carbonyloxycholesterol moiety (Crooke et al., J. Pharmacol. Exp. Ther., 1996, 277:923-937).

[0527] In certain embodiments, a ligand alters the distribution, targeting, or lifetime of an iRNA agent into which it is incorporated. In some embodiments a ligand provides an enhanced affinity for a selected target, e.g., molecule, cell or cell type, compartment, e.g., a cellular or organ compartment, tissue, organ or region of the body, as, e.g., compared to a species absent such a ligand. In some embodiments, ligands do not take part in duplex pairing in a duplexed nucleic acid.

[0528] Ligands can include a naturally occurring substance, such as a protein (e.g., human serum albumin (HSA), low-density lipoprotein (LDL), or globulin); carbohydrate (e.g., a dextran, pullulan, chitin, chitosan, inulin, cyclodextrin, N-acetylglucosamine, N-acetylgalactosamine, or hyaluronic acid); or a lipid. The ligand can also be a recombinant or synthetic molecule, such as a synthetic polymer, e.g., a synthetic polyamino acid. Examples of polyamino acids include polyamino acid is a polylysine (PLL), poly L-aspartic acid, poly L-glutamic acid, styrene-maleic acid anhydride copolymer, poly(L-lactide-co-glycolied) copolymer, divinyl ether-maleic anhydride copolymer, N-(2-hydroxypropyl) methacrylamide copolymer (HMPA), polyethylene glycol (PEG), polyvinyl alcohol (PVA), polyurethane, poly(2-ethylacryllic acid), N-isopropylacrylamide polymers, or polyphosphazine. Example of polyamines include: polyethylenimine, polylysine (PLL), spermine spermidine, polyamine, pseudopeptide-polyamine, peptidomimetic polyamine, dendrimer polyamine, arginine, amidine, protamine, cationic lipid, cationic porphyrin, quaternary salt of a polyamine, or an alpha helical peptide.

[0529] Ligands can also include targeting groups, e.g., a cell or tissue targeting agent, e.g., a lectin, glycoprotein, lipid or protein, e.g., an antibody, that binds to a specified cell type such as a kidney cell. A targeting group can be a thyrotropin, melanotropin, lectin, glycoprotein, surfactant protein A, Mucin carbohydrate, multivalent lactose, multivalent galactose, N-acetyl-galactosamine, N-acetyl-glucosamine multivalent mannose, multivalent fucose, glycosylated polyaminoacids, multivalent galactose, transferrin, bisphosphonate, polyglutamate, polyaspartate, a lipid, cholesterol, a steroid, bile acid, folate, vitamin B12, vitamin A, biotin, or an RGD peptide or RGD peptide mimetic. In certain embodiments, the ligand is a multivalent galactose, e.g., an N-acetyl-galactosamine.

[0530] Other examples of ligands include dyes, intercalating agents (e.g. acridines), cross-linkers (e.g. psoralene, mitomycin C), porphyrins (TPPC4, texaphyrin, Sapphyrin), polycyclic aromatic hydrocarbons (e.g., phenazine, dihydrophenazine), artificial endonucleases (e.g. EDTA), lipophilic molecules, e.g., cholesterol, cholic acid, adamantane acetic acid, 1-pyrene butyric acid, dihydrotestosterone, 1,3-Bis-O (hexadecyl)glycerol, geranyloxyhexyl group, hexadecylglycerol, borneol, menthol, 1,3-propanediol, heptadecyl group, palmitic acid, myristic acid, O3-(oleoyl) lithocholic acid, O3-(oleoyl) cholenic acid, dimethoxytrityl, or phenoxazine) and peptide conjugates (e.g., antennapedia peptide, Tat peptide), alkylating agents, phosphate, amino, mercapto, PEG (e.g., PEG-40K), MPEG, [MPEG]2, polyamino, alkyl, substituted alkyl, radiolabeled markers, enzymes, haptens (e.g. biotin), transport/absorption facilitators (e.g., aspirin, vitamin E, folic acid), synthetic ribonucleases (e.g., imidazole, bisimidazole, histamine, imidazole clusters, acridine-imidazole conjugates, Eu3+ complexes of tetraazamacrocycles), dinitrophenyl, HRP, or AP.

[0531] Ligands can be proteins, e.g., glycoproteins, or peptides, e.g., molecules having a specific affinity for a co-ligand, or antibodies e.g., an antibody, that binds to a specified cell type such as a hepatic cell. Ligands can also include hormones and hormone receptors. They can also include non-peptidic species, such as lipids, lectins, carbohydrates, vitamins, cofactors, multivalent lactose, multivalent galactose, N-acetyl-galactosamine, N-acetyl-glucosamine multivalent mannose, or multivalent fucose. The ligand can be, for example, a lipopolysaccharide, an activator of p38 MAP kinase, or an activator of NF-κB.

[0532] The ligand can be a substance, e.g., a drug, which can increase the uptake of the iRNA agent into the cell, for example, by disrupting the cell's cytoskeleton, e.g., by disrupting the cell's microtubules, microfilaments, or intermediate filaments. The drug can be, for example, taxol, vincristine, vinblastine, cytochalasin, nocodazole, japlakinolide, latrunculin A, phalloidin, swinholide A, indanocine, or myoservin.

[0533] In some embodiments, a ligand attached to an iRNA as described herein acts as a pharmacokinetic modulator (PK modulator). PK modulators include lipophiles, bile acids, steroids, phospholipid analogues, peptides, protein binding agents, PEG, vitamins, etc. Exemplary PK modulators include, but are not limited to, cholesterol, fatty acids, cholic acid, lithocholic acid, dialkylglycerides, diacylglyceride, phospholipids, sphingolipids, naproxen, ibuprofen, vitamin E, biotin. Oligonucleotides that comprise a number of phosphorothioate linkages are also known to bind to serum protein, thus short oligonucleotides, e.g., oligonucleotides of about 5 bases, 10 bases, 15 bases, or 20 bases, comprising multiple of phosphorothioate linkages in the backbone are also amenable to the present invention as ligands (e.g. as PK modulating ligands). In addition, aptamers that bind serum components (e.g. serum proteins) are also suitable for use as PK modulating ligands in the embodiments described herein.

[0534] Ligand-conjugated iRNAs of the invention may be synthesized by the use of an oligonucleotide that bears a pendant reactive functionality, such as that derived from the attachment of a linking molecule onto the oligonucleotide (described below). This reactive oligonucleotide may be reacted directly with commercially-available ligands, ligands that are synthesized bearing any of a variety of protecting groups, or ligands that have a linking moiety attached thereto.

[0535] The oligonucleotides used in the conjugates of the present invention may be conveniently and routinely made through the well-known technique of solid-phase synthesis. Equipment for such synthesis is sold by several vendors including, for example, Applied Biosystems® (Foster City, Calif.). Any other methods for such synthesis known in the art may additionally or alternatively be employed. It is also known to use similar techniques to prepare other oligonucleotides, such as the phosphorothioates and alkylated derivatives.

[0536] In the ligand-conjugated iRNAs and ligand-molecule bearing sequence-specific linked nucleosides of the present invention, the oligonucleotides and oligonucleosides may be assembled on a suitable DNA synthesizer utilizing standard nucleotide or nucleoside precursors, or nucleotide or nucleoside conjugate precursors that already bear the linking moiety, ligand-nucleotide or nucleoside-conjugate precursors that already bear the ligand molecule, or non-nucleoside ligand-bearing building blocks.

[0537] When using nucleotide-conjugate precursors that already bear a linking moiety, the synthesis of the sequence-specific linked nucleosides is typically completed, and the ligand molecule is then reacted with the linking moiety to form the ligand-conjugated oligonucleotide. In some embodiments, the oligonucleotides or linked nucleosides of the present invention are synthesized by an automated synthesizer using phosphoramidites derived from ligand-nucleoside conjugates in addition to the standard phosphoramidites and non-standard phosphoramidites that are commercially available and routinely used in oligonucleotide synthesis.

### A. Lipid Conjugates

[0538] In certain embodiments, the ligand or conjugate is a lipid or lipid-based molecule. In one embodiment, such a lipid or lipid-based molecule binds a serum protein, e.g., human serum albumin (HSA). An HSA binding ligand allows for distribution of the conjugate to a target tissue, e.g., a non-kidney target tissue of the body. For example, the target tissue can be the liver, including parenchymal cells of the liver. Other molecules that can bind HSA can also be used as ligands. For example, naproxen or aspirin can be used. A lipid or lipid-based ligand can (a) increase resistance to degradation of the conjugate, (b) increase targeting or transport into a target cell or cell membrane, or (c) can be used to adjust binding to a serum protein, e.g., HSA.

[0539] A lipid based ligand can be used to inhibit, e.g., control the binding of the conjugate to a target tissue. For example, a lipid or lipid-based ligand that binds to HSA more strongly will be less likely to be targeted to the kidney and therefore less likely to be cleared from the body. A lipid or lipid-based ligand that binds to HSA less strongly can be used to target the conjugate to the kidney.

[0540] In certain embodiments, the lipid based ligand binds HSA. In one embodiment, it binds HSA with a sufficient affinity such that the conjugate will be distributed to a non-kidney tissue. However, it is preferred that the affinity not be so strong that the HSA-ligand binding cannot be reversed.

[0541] In other embodiments, the lipid based ligand binds HSA weakly or not at all. In one embodiment, the conjugate will be distributed to the kidney. Other moieties that target to kidney cells can also be used in place of, or in addition to, the lipid based ligand.

[0542] In another aspect, the ligand is a moiety, e.g., a vitamin, which is taken up by a target cell, e.g., a proliferating cell. These are particularly useful for treating disorders characterized by unwanted cell proliferation, e.g., of the malignant or non-malignant type, e.g., cancer cells. Exemplary vitamins include vitamin A, E, and K. Other exemplary vitamins include are B vitamin, e.g., folic acid, B12, riboflavin, biotin, pyridoxal or other vitamins or nutrients taken up by target cells such as liver cells. Also included are HSA and low density lipoprotein (LDL).

### B. Cell Permeation Agents

[0543] In another aspect, the ligand is a cell-permeation agent, such as, a helical cell-permeation agent. In one embodiment, the agent is amphipathic. An exemplary agent is a peptide such as tat or antennopedia. If the agent is a peptide, it can be modified, including a peptidylmimetic, invertomers, non-peptide or pseudo-peptide linkages, and use of D-amino acids. In one embodiment, the helical agent is an alpha-helical agent, which has a lipophilic and a lipophobic phase.

[0544] The ligand can be a peptide or peptidomimetic. A peptidomimetic (also referred to herein as an oligopeptidomimetic) is a molecule capable of folding into a defined three-dimensional structure similar to a natural peptide. The attachment of peptide and peptidomimetics to iRNA agents can affect pharmacokinetic distribution of the iRNA, such as by enhancing cellular recognition and absorption. The peptide or peptidomimetic moiety can be about 5-50 amino acids long, e.g., about 5, 10, 15, 20, 25, 30, 35, 40, 45, or 50 amino acids long.

[0545] A peptide or peptidomimetic can be, for example, a cell permeation peptide, cationic peptide, amphipathic peptide, or hydrophobic peptide (e.g., consisting primarily of Tyr. Trp, or Phe). The peptide moiety can be a dendrimer peptide, constrained peptide or crosslinked peptide. In another alternative, the peptide moiety can include a hydrophobic membrane translocation sequence (MTS). An exemplary hydrophobic MTS-containing peptide is RFGF having the amino acid sequence AAVALLPAVLLALLAP (SEQ ID NO: 14). An RFGF analogue (e.g., amino acid sequence AALLPVLLAAP (SEQ ID NO:15) containing a hydrophobic MTS can also be a targeting moiety. The peptide moiety can be a “delivery” peptide, which can carry large polar molecules including peptides, oligonucleotides, and protein across cell membranes. For example, sequences from the HIV Tat protein (GRKKRRQRRRPPQ (SEQ ID NO:16) and the Drosophila Antennapedia protein (RQIKIWFQNRRMKWKK (SEQ ID NO: 17) have been found to be capable of functioning as delivery peptides. A peptide or peptidomimetic can be encoded by a random sequence of DNA, such as a peptide identified from a phage-display library, or one-bead-one-compound (OBOC) combinatorial library (Lam et al., Nature, 354:82-84, 1991). Examples of a peptide or peptidomimetic tethered to a dsRNA agent via an incorporated monomer unit for cell targeting purposes is an arginine-glycine-aspartic acid (RGD)-peptide, or RGD mimic. A peptide moiety can range in length from about 5 amino acids to about 40 amino acids. The peptide moieties can have a structural modification, such as to increase stability or direct conformational properties. Any of the structural modifications described below can be utilized.

[0546] An RGD peptide for use in the compositions and methods of the invention may be linear or cyclic, and may be modified, e.g., glycosylated or methylated, to facilitate targeting to a specific tissue(s). RGD-containing peptides and peptidiomimemtics may include D-amino acids, as well as synthetic RGD mimics. In addition to RGD, one can use other moieties that target the integrin ligand, e.g., PECAM-1 or VEGF.

[0547] A “cell permeation peptide” is capable of permeating a cell, e.g., a microbial cell, such as a bacterial or fungal cell, or a mammalian cell, such as a human cell. A microbial cell-permeating peptide can be, for example, an α-helical linear peptide (e.g., LL-37 or Ceropin P1), a disulfide bond-containing peptide (e.g., α-defensin, β-defensin or bactenecin), or a peptide containing only one or two dominating amino acids (e.g., PR-39 or indolicidin). A cell permeation peptide can also include a nuclear localization signal (NLS). For example, a cell permeation peptide can be a bipartite amphipathic peptide, such as MPG, which is derived from the fusion peptide domain of HIV-1 gp41 and the NLS of SV40 large T antigen (Simeoni et al., Nucl. Acids Res. 31:2717-2724, 2003).

### C. Carbohydrate Conjugates

[0548] In some embodiments of the compositions and methods of the invention, an iRNA further comprises a carbohydrate. The carbohydrate conjugated iRNA is advantageous for the in vivo delivery of nucleic acids, as well as compositions suitable for in vivo therapeutic use, as described herein. As used herein, “carbohydrate” refers to a compound which is either a carbohydrate per se made up of one or more monosaccharide units having at least 6 carbon atoms (which can be linear, branched or cyclic) with an oxygen, nitrogen or sulfur atom bonded to each carbon atom; or a compound having as a part thereof a carbohydrate moiety made up of one or more monosaccharide units each having at least six carbon atoms (which can be linear, branched or cyclic), with an oxygen, nitrogen or sulfur atom bonded to each carbon atom. Representative carbohydrates include the sugars (mono-, di-, tri-, and oligosaccharides containing from about 4, 5, 6, 7, 8, or 9 monosaccharide units), and polysaccharides such as starches, glycogen, cellulose and polysaccharide gums. Specific monosaccharides include C5 and above (e.g., C5, C6, C7, or C8) sugars; di- and trisaccharides include sugars having two or three monosaccharide units (e.g., C5, C6, C7, or C8).

[0549] In certain embodiments, a carbohydrate conjugate for use in the compositions and methods of the invention is a monosaccharide.

[0550] In certain embodiments, the monosaccharide is an N-acetylgalactosamine (GalNAc). GalNAc conjugates, which comprise one or more N-acetylgalactosamine (GalNAc) derivatives, are described, for example, in U.S. Pat. No. 8,106,022, the entire content of which is hereby incorporated herein by reference. In some embodiments, the GalNAc conjugate serves as a ligand that targets the iRNA to particular cells. In some embodiments, the GalNAc conjugate targets the iRNA to liver cells, e.g., by serving as a ligand for the asialoglycoprotein receptor of liver cells (e.g., hepatocytes).

[0551] In some embodiments, the carbohydrate conjugate comprises one or more GalNAc derivatives. The GalNAc derivatives may be attached via a linker, e.g., a bivalent or trivalent branched linker. In some embodiments the GalNAc conjugate is conjugated to the 3′ end of the sense strand. In some embodiments, the GalNAc conjugate is conjugated to the iRNA agent (e.g., to the 3′ end of the sense strand) via a linker, e.g., a linker as described herein. In some embodiments the GalNAc conjugate is conjugated to the 5′ end of the sense strand. In some embodiments, the GalNAc conjugate is conjugated to the iRNA agent (e.g., to the 5′ end of the sense strand) via a linker, e.g., a linker as described herein.

[0552] In certain embodiments of the invention, the GalNAc or GalNAc derivative is attached to an iRNA agent of the invention via a monovalent linker. In some embodiments, the GalNAc or GalNAc derivative is attached to an iRNA agent of the invention via a bivalent linker. In yet other embodiments of the invention, the GalNAc or GalNAc derivative is attached to an iRNA agent of the invention via a trivalent linker. In other embodiments of the invention, the GalNAc or GalNAc derivative is attached to an iRNA agent of the invention via a tetravalent linker.

[0553] In certain embodiments, the double stranded RNAi agents of the invention comprise one GalNAc or GalNAc derivative attached to the iRNA agent. In certain embodiments, the double stranded RNAi agents of the invention comprise a plurality (e.g., 2, 3, 4, 5, or 6) GalNAc or GalNAc derivatives, each independently attached to a plurality of nucleotides of the double stranded RNAi agent through a plurality of monovalent linkers.

[0554] In some embodiments, for example, when the two strands of an iRNA agent of the invention are part of one larger molecule connected by an uninterrupted chain of nucleotides between the 3′-end of one strand and the 5′-end of the respective other strand forming a hairpin loop comprising, a plurality of unpaired nucleotides, each unpaired nucleotide within the hairpin loop may independently comprise a GalNAc or GalNAc derivative attached via a monovalent linker. The hairpin loop may also be formed by an extended overhang in one strand of the duplex.

[0555] In some embodiments, for example, when the two strands of an iRNA agent of the invention are part of one larger molecule connected by an uninterrupted chain of nucleotides between the 3′-end of one strand and the 5′-end of the respective other strand forming a hairpin loop comprising, a plurality of unpaired nucleotides, each unpaired nucleotide within the hairpin loop may independently comprise a GalNAc or GalNAc derivative attached via a monovalent linker. The hairpin loop may also be formed by an extended overhang in one strand of the duplex.

[0556] In one embodiment, a carbohydrate conjugate for use in the compositions and methods of the invention is selected from the group consisting of:

[chemical structure]

[chemical structure]

[chemical structure]

[chemical structure]

[chemical structure]

[chemical structure]

[chemical structure]

[chemical structure]

[chemical structure]

[0557] In another embodiment, a carbohydrate conjugate for use in the compositions and methods of the invention is a monosaccharide. In one embodiment, the monosaccharide is an N-acetylgalactosamine, such as

[chemical structure]

[0558] In some embodiments, the RNAi agent is attached to the carbohydrate conjugate via a linker as shown in the following schematic, wherein X is O or S.

[chemical structure]

[0559] In some embodiments, the RNAi agent is conjugated to L96 as defined in Table 1 and shown below:

[chemical structure]

[0560] Another representative carbohydrate conjugate for use in the embodiments described herein includes, but is not limited to,

[chemical structure]

(Formula XXXVI), when one of X or Y is an oligonucleotide, the other is a hydrogen.

[0561] In some embodiments, a suitable ligand is a ligand disclosed in WO 2019/055633, the entire contents of which are incorporated herein by reference. In one embodiment the ligand comprises the structure below:

[chemical structure]

[0562] In certain embodiments of the invention, the GalNAc or GalNAc derivative is attached to an iRNA agent of the invention via a monovalent linker. In some embodiments, the GalNAc or GalNAc derivative is attached to an iRNA agent of the invention via a bivalent linker. In yet other embodiments of the invention, the GalNAc or GalNAc derivative is attached to an iRNA agent of the invention via a trivalent linker.

[0563] In one embodiment, the double stranded RNAi agents of the invention comprise one or more GalNAc or GalNAc derivative attached to the iRNA agent. The GalNAc may be attached to any nucleotide via a linker on the sense strand or antisense strand. The GalNac may be attached to the 5′-end of the sense strand, the 3′ end of the sense strand, the 5′-end of the antisense strand, or the 3′-end of the antisense strand. In one embodiment, the GalNAc is attached to the 3′ end of the sense strand, e.g., via a trivalent linker.

[0564] In other embodiments, the double stranded RNAi agents of the invention comprise a plurality (e.g., 2, 3, 4, 5, or 6) GalNAc or GalNAc derivatives, each independently attached to a plurality of nucleotides of the double stranded RNAi agent through a plurality of linkers, e.g., monovalent linkers.

[0565] In some embodiments, for example, when the two strands of an iRNA agent of the invention is part of one larger molecule connected by an uninterrupted chain of nucleotides between the 3′-end of one strand and the 5′-end of the respective other strand forming a hairpin loop comprising, a plurality of unpaired nucleotides, each unpaired nucleotide within the hairpin loop may independently comprise a GalNAc or GalNAc derivative attached via a monovalent linker.

[0566] In some embodiments, the carbohydrate conjugate further comprises one or more additional ligands as described above, such as, but not limited to, a PK modulator or a cell permeation peptide.

[0567] Additional carbohydrate conjugates and linkers suitable for use in the present invention include those described in PCT Publication Nos. WO 2014/179620 and WO 2014/179627, the entire contents of each of which are incorporated herein by reference.

### D. Linkers

[0568] In some embodiments, the conjugate or ligand described herein can be attached to an iRNA oligonucleotide with various linkers that can be cleavable or non-cleavable.

[0569] The term “linker” or “linking group” means an organic moiety that connects two parts of a compound, e.g., covalently attaches two parts of a compound. Linkers typically comprise a direct bond or an atom such as oxygen or sulfur, a unit such as NR8, C(O), C(O) NH, SO, SO₂, SO₂NH or a chain of atoms, such as, but not limited to, substituted or unsubstituted alkyl, substituted or unsubstituted alkenyl, substituted or unsubstituted alkynyl, arylalkyl, arylalkenyl, arylalkynyl, heteroarylalkyl, heteroarylalkenyl, heteroarylalkynyl, heterocyclylalkyl, heterocyclylalkenyl, heterocyclylalkynyl, aryl, heteroaryl, heterocyclyl, cycloalkyl, cycloalkenyl, alkylarylalkyl, alkylarylalkenyl, alkylarylalkynyl, alkenylarylalkyl, alkenylarylalkenyl, alkenylarylalkynyl, alkynylarylalkyl, alkynylarylalkenyl, alkynylarylalkynyl, alkylheteroarylalkyl, alkylheteroarylalkenyl, alkylheteroarylalkynyl, alkenylheteroarylalkyl, alkenylheteroarylalkenyl, alkenylheteroarylalkynyl, alkynylheteroarylalkyl, alkynylheteroarylalkenyl, alkynylheteroarylalkynyl, alkylheterocyclylalkyl, alkylheterocyclylalkenyl, alkylhererocyclylalkynyl, alkenylheterocyclylalkyl, alkenylheterocyclylalkenyl, alkenylheterocyclylalkynyl, alkynylheterocyclylalkyl, alkynylheterocyclylalkenyl, alkynylheterocyclylalkynyl, alkylaryl, alkenylaryl, alkynylaryl, alkylheteroaryl, alkenylheteroaryl, alkynylhereroaryl, which one or more methylenes can be interrupted or terminated by O, S, S(O), SO₂, N(R8), C(O), substituted or unsubstituted aryl, substituted or unsubstituted heteroaryl, or substituted or unsubstituted heterocyclic; where R8 is hydrogen, acyl, aliphatic, or substituted aliphatic. In one embodiment, the linker is about 1-24 atoms, 2-24, 3-24, 4-24, 5-24, 6-24, 6-18, 7-18, 8-18, 7-17, 8-17, 6-16, 7-17, or 8-16 atoms.

[0570] A cleavable linking group is one which is sufficiently stable outside the cell, but which upon entry into a target cell is cleaved to release the two parts the linker is holding together. In an exemplary embodiment, the cleavable linking group is cleaved at least about 10 times, 20, times, 30 times, 40 times, 50 times, 60 times, 70 times, 80 times, 90 times, or more, or at least 100 times faster in a target cell or under a first reference condition (which can, e.g., be selected to mimic or represent intracellular conditions) than in the blood of a subject, or under a second reference condition (which can, e.g., be selected to mimic or represent conditions found in the blood or serum).

[0571] Cleavable linking groups are susceptible to cleavage agents, e.g., pH, redox potential, or the presence of degradative molecules. Generally, cleavage agents are more prevalent or found at higher levels or activities inside cells than in serum or blood. Examples of such degradative agents include: redox agents which are selected for particular substrates or which have no substrate specificity, including, e.g., oxidative or reductive enzymes or reductive agents such as mercaptans, present in cells, that can degrade a redox cleavable linking group by reduction; esterases; endosomes or agents that can create an acidic environment, e.g., those that result in a pH of five or lower; enzymes that can hydrolyze or degrade an acid cleavable linking group by acting as a general acid, peptidases (which can be substrate specific), and phosphatases.

[0572] A cleavable linkage group, such as a disulfide bond can be susceptible to pH. The pH of human serum is 7.4, while the average intracellular pH is slightly lower, ranging from about 7.1-7.3. Endosomes have a more acidic pH, in the range of 5.5-6.0, and lysosomes have an even more acidic pH at around 5.0. Some linkers will have a cleavable linking group that is cleaved at a selected pH. thereby releasing a cationic lipid from the ligand inside the cell, or into the desired compartment of the cell.

[0573] A linker can include a cleavable linking group that is cleavable by a particular enzyme. The type of cleavable linking group incorporated into a linker can depend on the cell to be targeted. For example, a liver-targeting ligand can be linked to a cationic lipid through a linker that includes an ester group. Liver cells are rich in esterases, and therefore the linker will be cleaved more efficiently in liver cells than in cell types that are not esterase-rich. Other cell-types rich in esterases include cells of the lung, renal cortex, and testis.

[0574] Linkers that contain peptide bonds can be used when targeting cell types rich in peptidases. such as liver cells and synoviocytes.

[0575] In general, the suitability of a candidate cleavable linking group can be evaluated by testing the ability of a degradative agent (or condition) to cleave the candidate linking group. It will also be desirable to also test the candidate cleavable linking group for the ability to resist cleavage in the blood or when in contact with other non-target tissue. Thus, one can determine the relative susceptibility to cleavage between a first and a second condition, where the first is selected to be indicative of cleavage in a target cell and the second is selected to be indicative of cleavage in other tissues or biological fluids, e.g., blood or serum. The evaluations can be carried out in cell free systems, in cells, in cell culture, in organ or tissue culture, or in whole animals. It can be useful to make initial evaluations in cell-free or culture conditions and to confirm by further evaluations in whole animals. In certain embodiments, useful candidate compounds are cleaved at least about 2, 4, 10, 20, 30, 40, 50, 60, 70, 80, 90, or 100 times faster in the cell (or under in vitro conditions selected to mimic intracellular conditions) as compared to blood or serum (or under in vitro conditions selected to mimic extracellular conditions).

i. Redox Cleavable Linking Groups

[0576] In certain embodiments, a cleavable linking group is a redox cleavable linking group that is cleaved upon reduction or oxidation. An example of reductively cleavable linking group is a disulphide linking group (—S—S—). To determine if a candidate cleavable linking group is a suitable “reductively cleavable linking group.” or for example is suitable for use with a particular iRNA moiety and particular targeting agent one can look to methods described herein. For example, a candidate can be evaluated by incubation with dithiothreitol (DTT), or other reducing agent using reagents know in the art, which mimic the rate of cleavage which would be observed in a cell, e.g., a target cell. The candidates can also be evaluated under conditions which are selected to mimic blood or serum conditions. In one, candidate compounds are cleaved by at most about 10% in the blood. In other embodiments, useful candidate compounds are degraded at least about 2, 4, 10, 20, 30, 40, 50, 60, 70, 80, 90, or about 100 times faster in the cell (or under in vitro conditions selected to mimic intracellular conditions) as compared to blood (or under in vitro conditions selected to mimic extracellular conditions). The rate of cleavage of candidate compounds can be determined using standard enzyme kinetics assays under conditions chosen to mimic intracellular media and compared to conditions chosen to mimic extracellular media.

ii. Phosphate-Based Cleavable Linking Groups

[0577] In other embodiments, a cleavable linker comprises a phosphate-based cleavable linking group. A phosphate-based cleavable linking group is cleaved by agents that degrade or hydrolyze the phosphate group. An example of an agent that cleaves phosphate groups in cells are enzymes such as phosphatases in cells. Examples of phosphate-based linking groups are —O—P(O)(ORk)-O—, —O—P(S)(ORk)-O—, —O—P(S)(SRk)-O—, —S—P(O)(ORk)-O—, —O—P(O)(ORk)-S—, —S—P(O)(ORk)-S—, —O—P(S)(ORk)-S—, —S—P(S)(ORk)-O—, —O—P(O)(Rk)-O—, —O—P(S)(Rk)-O—, —S—P(O)(Rk)-O—, —S—P(S)(Rk)-O—, —S—P(O)(Rk)-S—, —O—P(S)(Rk)-S—, wherein Rk at each occurrence can be, independently, C1-C20 alkyl, C1-C20 haloalkyl, C6-C10 aryl, or C7-C12 aralkyl. Exemplary embodiments include —O—P(O)(OH)—O—, —O—P(S)(OH)—O—, —O—P(S)(SH)—O—, —S—P(O)(OH)—O—, —O—P(O)(OH)—S—, —S—P(O)(OH)—S—, —O—P(S)(OH)—S—, —S—P(S)(OH)—O—, —O—P(O)(H)—O—, —O—P(S)(H)—O—, —S—P(O)(H)—O, —S—P(S)(H)—O—, —S—P(O)(H)—S—, and —O—P(S)(H)—S—. In certain embodiments a phosphate-based linking group is —O—P(O)(OH)—O—. These candidates can be evaluated using methods analogous to those described above.\

iii. Acid Cleavable Linking Groups

[0578] In other embodiments, a cleavable linker comprises an acid cleavable linking group. An acid cleavable linking group is a linking group that is cleaved under acidic conditions. In certain embodiments acid cleavable linking groups are cleaved in an acidic environment with a pH of about 6.5 or lower (e.g., about 6.0, 5.5, 5.0, or lower), or by agents such as enzymes that can act as a general acid. In a cell, specific low pH organelles, such as endosomes and lysosomes can provide a cleaving environment for acid cleavable linking groups. Examples of acid cleavable linking groups include but are not limited to hydrazones, esters, and esters of amino acids. Acid cleavable groups can have the general formula —C═NN—, C(O)O, or —OC(O). An exemplary embodiment is when the carbon attached to the oxygen of the ester (the alkoxy group) is an aryl group, substituted alkyl group, or tertiary alkyl group such as dimethyl pentyl or t-butyl. These candidates can be evaluated using methods analogous to those described above.

iv. Ester-Based Linking Groups

[0579] In other embodiments, a cleavable linker comprises an ester-based cleavable linking group. An ester-based cleavable linking group is cleaved by enzymes such as esterases and amidases in cells. Examples of ester-based cleavable linking groups include, but are not limited to, esters of alkylene, alkenylene and alkynylene groups. Ester cleavable linking groups have the general formula —C(O)O—, or —OC(O)—. These candidates can be evaluated using methods analogous to those described above.

v. Peptide-Based Cleaving Groups

[0580] In yet other embodiments, a cleavable linker comprises a peptide-based cleavable linking group. A peptide-based cleavable linking group is cleaved by enzymes such as peptidases and proteases in cells. Peptide-based cleavable linking groups are peptide bonds formed between amino acids to yield oligopeptides (e.g., dipeptides, tripeptides etc.) and polypeptides. Peptide-based cleavable groups do not include the amide group (—C(O)NH—). The amide group can be formed between any alkylene, alkenylene or alkynelene. A peptide bond is a special type of amide bond formed between amino acids to yield peptides and proteins. The peptide based cleavage group is generally limited to the peptide bond (i.e., the amide bond) formed between amino acids yielding peptides and proteins and does not include the entire amide functional group. Peptide-based cleavable linking groups have the general formula —NHCHRAC(O)NHCHRBC(O)—, where RA and RB are the R groups of the two adjacent amino acids. These candidates can be evaluated using methods analogous to those described above.

[0581] In some embodiments, an iRNA of the invention is conjugated to a carbohydrate through a linker. Non-limiting examples of iRNA carbohydrate conjugates with linkers of the compositions and methods of the invention include, but are not limited to,

[chemical structure]

[chemical structure]

[chemical structure]

when one of X or Y is an oligonucleotide, the other is a hydrogen.

[0582] In certain embodiments of the compositions and methods of the invention, a ligand is one or more “GalNAc” (N-acetylgalactosamine) derivatives attached through a bivalent or trivalent branched linker.

[0583] In one embodiment, a dsRNA of the invention is conjugated to a bivalent or trivalent branched linker selected from the group of structures shown in any of formula (XLV)-(XLVI):

[chemical structure]

wherein:
[0584] q2A, q2B, q3A, q3B, q4A, q4B, q5A, q5B and q5C represent independently for each occurrence 0-20 and wherein the repeating unit can be the same or different; P^{2A}, P^{2B}, P^{3A}, P^{3B}, P^{4A}, P^{4B}, P^{5A}, P^{5B}, P^{5C}, T^{2A}, T^{2B}, T^{3A}, T^{3B}, T^{4A}, T^{4B}, T^{4A}, T^{5B}, T^{5C} are each independently for each occurrence absent, CO, NH, O, S, OC(O), NHC(O), CH₂, CH₂NH or CH₂; Q^{2A}, Q^{2B}, Q^{3A}, Q^{3B}, Q^{4A}, Q^{4B}, Q^{5A}, Q^{5B}, Q^{5C} are independently for each occurrence absent, alkylene, substituted alkylene wherein one or more methylenes can be interrupted or terminated by one or more of O, S, S(O), SO₂, N(R^{N}), C(R′)═C(R″), C≡C or C(O);
[0585] R^{2A}, R^{2B}, R^{3A}, R^{3B}, R^{4A}, R^{4B}, R^{5A}, R^{5B}, R^{5C} are each independently for each occurrence absent, NH, O, S, CH₂, C(O) O, C(O)NH, NHCH(R^{a})C(O), —C(O)—CH(R^{a})—NH—, CO, CH═N—O,

[chemical structure]

or heterocyclyl; L^{2A}, L^{2B}, L^{3A}, L^{3B}, L^{4A}, L^{4B}, L^{5A}, L^{5B} and L^{5C} represent the ligand; i.e. each independently for each occurrence a monosaccharide (such as GalNAc), disaccharide, trisaccharide, tetrasaccharide, oligosaccharide, or polysaccharide; and Ra is H or amino acid side chain. Trivalent conjugating GalNAc derivatives are particularly useful for use with RNAi agents for inhibiting the expression of a target gene, such as those of formula (XLIX):

[chemical structure]

wherein L^{5A}, L^{5B} and L^{5C} represent a monosaccharide, such as GalNAc derivative.

[0586] Examples of suitable bivalent and trivalent branched linker groups conjugating GalNAc derivatives include, but are not limited to, the structures recited above as formulas II, VII, XI, X, and XIII.

[0587] Representative U.S. Patents that teach the preparation of RNA conjugates include, but are not limited to, U.S. Pat. Nos. 4,828,979; 4,948,882; 5,218,105; 5,525,465; 5,541,313; 5,545,730; 5,552,538; 5,578,717, 5,580,731; 5,591,584; 5,109,124; 5,118,802; 5,138,045; 5,414,077; 5,486,603; 5,512,439; 5,578,718; 5,608,046; 4,587,044; 4,605,735; 4,667,025; 4,762,779; 4,789,737; 4,824,941; 4,835,263; 4,876,335; 4,904,582; 4,958,013; 5,082,830; 5,112,963; 5,214,136; 5,082,830; 5,112,963; 5,214,136; 5,245,022; 5,254,469; 5,258,506; 5,262,536; 5,272,250; 5,292,873; 5,317,098; 5,371,241, 5,391,723; 5,416,203, 5,451,463; 5,510,475; 5,512,667; 5,514,785; 5,565,552; 5,567,810; 5,574,142; 5,585,481; 5,587,371; 5,595,726; 5,597,696; 5,599,923; 5,599,928; 5,688,941; 6,294,664; 6,320,017; 6,576,752; 6,783,931; 6,900,297; 7,037,646; and 8,106,022, the entire contents of each of which are hereby incorporated herein by reference.

[0588] It is not necessary for all positions in a given compound to be uniformly modified, and in fact more than one of the aforementioned modifications can be incorporated in a single compound or even at a single nucleoside within an iRNA. The present invention also includes iRNA compounds that are chimeric compounds.

[0589] “Chimeric” iRNA compounds or “chimeras,” in the context of this invention, are iRNA compounds, such as, dsRNAi agents, that contain two or more chemically distinct regions, each made up of at least one monomer unit, i.e., a nucleotide in the case of a dsRNA compound. These iRNAs typically contain at least one region wherein the RNA is modified so as to confer upon the iRNA increased resistance to nuclease degradation, increased cellular uptake, or increased binding affinity for the target nucleic acid. An additional region of the iRNA can serve as a substrate for enzymes capable of cleaving RNA: DNA or RNA: RNA hybrids. By way of example, RNase H is a cellular endonuclease which cleaves the RNA strand of an RNA: DNA duplex. Activation of RNase H, therefore, results in cleavage of the RNA target, thereby greatly enhancing the efficiency of iRNA inhibition of gene expression. Consequently, comparable results can often be obtained with shorter iRNAs when chimeric dsRNAs are used, compared to phosphorothioate deoxy dsRNAs hybridizing to the same target region. Cleavage of the RNA target can be routinely detected by gel electrophoresis and, if necessary, associated nucleic acid hybridization techniques known in the art.

[0590] In certain instances, the RNA of an iRNA can be modified by a non-ligand group. A number of non-ligand molecules have been conjugated to iRNAs in order to enhance the activity, cellular distribution or cellular uptake of the iRNA, and procedures for performing such conjugations are available in the scientific literature. Such non-ligand moieties have included lipid moieties, such as cholesterol (Kubo, T. et al., Biochem. Biophys. Res. Comm., 2007, 365(1):54-61; Letsinger et al., Proc. Natl. Acad. Sci. USA, 1989, 86:6553), cholic acid (Manoharan et al., Bioorg. Med. Chem. Lett., 1994, 4:1053), a thioether, e.g., hexyl-S-tritylthiol (Manoharan et al., Ann. N.Y. Acad. Sci., 1992, 660:306; Manoharan et al., Bioorg. Med. Chem. Let., 1993, 3:2765), a thiocholesterol (Oberhauser et al., Nucl. Acids Res., 1992, 20:533), an aliphatic chain, e.g., dodecandiol or undecyl residues (Saison-Behmoaras et al., EMBO J., 1991, 10:111; Kabanov et al., FEBS Lett., 1990, 259:327; Svinarchuk et al., Biochimie, 1993, 75:49), a phospholipid, e.g., di-hexadecyl-rac-glycerol or triethylammonium 1,2-di-O-hexadecyl-rac-glycero-3-H-phosphonate (Manoharan et al., Tetrahedron Lett., 1995, 36:3651; Shea et al., Nucl. Acids Res., 1990, 18:3777), a polyamine or a polyethylene glycol chain (Manoharan et al., Nucleosides & Nucleotides, 1995, 14:969), or adamantane acetic acid (Manoharan et al., Tetrahedron Lett., 1995, 36:3651), a palmityl moiety (Mishra et al., Biochim. Biophys. Acta, 1995, 1264:229), or an octadecylamine or hexylamino-carbonyl-oxycholesterol moiety (Crooke et al., J. Pharmacol. Exp. Ther., 1996, 277:923). Representative United States patents that teach the preparation of such RNA conjugates have been listed above. Typical conjugation protocols involve the synthesis of RNAs bearing an aminolinker at one or more positions of the sequence. The amino group is then reacted with the molecule being conjugated using appropriate coupling or activating reagents. The conjugation reaction can be performed either with the RNA still bound to the solid support or following cleavage of the RNA, in solution phase. Purification of the RNA conjugate by HPLC typically affords the pure conjugate.

### IV. Delivery of an iRNA of the Invention

[0591] The delivery of an iRNA of the invention to a cell e.g., a cell within a subject, such as a human subject (e.g., a subject in need thereof, such as a subject susceptible to or diagnosed with an

[0592] AGT-associated disorder, e.g., hypertension, can be achieved in a number of different ways. For example, delivery may be performed by contacting a cell with an iRNA of the invention either in vitro or in vivo. In vivo delivery may also be performed directly by administering a composition comprising an iRNA, e.g., a dsRNA, to a subject. Alternatively, in vivo delivery may be performed indirectly by administering one or more vectors that encode and direct the expression of the iRNA.

[0593] These alternatives are discussed further below.

[0594] In general, any method of delivering a nucleic acid molecule (in vitro or in vivo) can be adapted for use with an iRNA of the invention (see e.g., Akhtar S. and Julian R L. (1992) Trends Cell. Biol. 2(5):139-144 and WO94/02595, which are incorporated herein by reference in their entireties). For in vivo delivery, factors to consider in order to deliver an iRNA molecule include, for example, biological stability of the delivered molecule, prevention of non-specific effects, and accumulation of the delivered molecule in the target tissue. RNA interference has also shown success with local delivery to the CNS by direct injection (Dorn, G., et al. (2004) Nucleic Acids 32:049; Tan, P H., et al (2005) Gene Ther. 12:59-66; Makimura, H., et al (2002) BMC Neurosci. 3:18; Shishkina, G T., et al (2004) Neuroscience 129:521-528; Thakker, E R., et al (2004) Proc. Natl. Acad. Sci. U.S.A. 101:17270-17275; Akaneya, Y., et al (2005) J. Neurophysiol. 93:594-602). Modification of the RNA or the pharmaceutical carrier can also permit targeting of the iRNA to the target tissue and avoid undesirable off-target effects. iRNA molecules can be modified by chemical conjugation to lipophilic groups such as cholesterol to enhance cellular uptake and prevent degradation. For example, an iRNA directed against ApoB conjugated to a lipophilic cholesterol moiety was injected systemically into mice and resulted in knockdown of apoB mRNA in both the liver and jejunum (Soutschek, J., et al (2004) Nature 432:173-178).

[0595] In an alternative embodiment, the iRNA can be delivered using drug delivery systems such as a nanoparticle, a dendrimer, a polymer, liposomes, or a cationic delivery system. Positively charged cationic delivery systems facilitate binding of an iRNA molecule (negatively charged) and also enhance interactions at the negatively charged cell membrane to permit efficient uptake of an iRNA by the cell. Cationic lipids, dendrimers, or polymers can either be bound to an iRNA, or induced to form a vesicle or micelle (see e.g., Kim S H, et al (2008) Journal of Controlled Release 129(2):107-116) that encases an iRNA. The formation of vesicles or micelles further prevents degradation of the iRNA when administered systemically. Methods for making and administering cationic-iRNA complexes are well within the abilities of one skilled in the art (see e.g., Sorensen, D R, et al (2003) J. Mol. Biol 327:761-766; Verma, U N, et al (2003) Clin. Cancer Res. 9:1291-1300; Arnold, A S et al (2007) J. Hypertens. 25:197-205, which are incorporated herein by reference in their entirety). Some non-limiting examples of drug delivery systems useful for systemic delivery of iRNAs include DOTAP (Sorensen, D R., et al (2003), supra; Verma, U N, et al (2003), supra), “solid nucleic acid lipid particles” (Zimmermann, T S, et al (2006) Nature 441:111-114), cardiolipin (Chien, P Y, et al (2005) Cancer Gene Ther. 12:321-328; Pal, A, et al (2005) Int J. Oncol. 26:1087-1091), polyethyleneimine (Bonnet M E, et al (2008) Pharm. Res. August 16 Epub ahead of print; Aigner, A. (2006) J. Biomed. Biotechnol. 71659), Arg-Gly-Asp (RGD) peptides (Liu, S. (2006) Mol. Pharm. 3:472-487), and polyamidoamines (Tomalia, D A, et al (2007) Biochem. Soc. Trans. 35:61-67; Yoo, H., et al (1999) Pharm. Res. 16:1799-1804). In some embodiments, an iRNA forms a complex with cyclodextrin for systemic administration. Methods for administration and pharmaceutical compositions of iRNAs and cyclodextrins can be found in U.S. Pat. No. 7,427,605, which is herein incorporated by reference in its entirety. Certain aspects of the instant disclosure relate to a method of reducing the expression of an AGT gene in a cell, comprising contacting said cell with the double-stranded RNAi agent of the disclosure. In one embodiment, the cell is a hepatic cell, optionally a hepatocyte. In one embodiment, the cell is an extrahepatic cell.

A. Vector encoded iRNAs of the Invention

[0596] iRNA targeting the AGT gene can be expressed from transcription units inserted into DNA or RNA vectors (see, e.g., Couture, A, et al., TIG. (1996), 12:5-10; Skillern, A, et al., International PCT Publication No. WO 00/22113, Conrad, International PCT Publication No. WO 00/22114, and Conrad, U.S. Pat. No. 6,054,299). Expression can be transient (on the order of hours to weeks) or sustained (weeks to months or longer), depending upon the specific construct used and the target tissue or cell type. These transgenes can be introduced as a linear construct, a circular plasmid, or a viral vector, which can be an integrating or non-integrating vector. The transgene can also be constructed to permit it to be inherited as an extrachromosomal plasmid (Gassmann, et al., Proc. Natl. Acad. Sci. USA (1995)92:1292).

[0597] Viral vector systems which can be utilized with the methods and compositions described herein include, but are not limited to, (a) adenovirus vectors; (b) retrovirus vectors, including but not limited to lentiviral vectors, moloney murine leukemia virus, etc.; (c) adeno-associated virus vectors; (d) herpes simplex virus vectors; (e) SV 40 vectors; (f) polyoma virus vectors; (g) papilloma virus vectors; (h) picornavirus vectors; (i) pox virus vectors such as an orthopox, e.g., vaccinia virus vectors or avipox, e.g. canary pox or fowl pox; and (j) a helper-dependent or gutless adenovirus. Replication-defective viruses can also be advantageous. Different vectors will or will not become incorporated into the cells' genome. The constructs can include viral sequences for transfection, if desired. Alternatively, the construct can be incorporated into vectors capable of episomal replication, e.g. EPV and EBV vectors. Constructs for the recombinant expression of an iRNA will generally require regulatory elements, e.g., promoters, enhancers, etc., to ensure the expression of the iRNA in target cells. Other aspects to consider for vectors and constructs are known in the art.

### V. Pharmaceutical Compositions of the Invention

[0598] The present invention also includes pharmaceutical compositions and formulations which include the iRNAs of the invention. In one embodiment, provided herein are pharmaceutical compositions containing an iRNA, as described herein, and a pharmaceutically acceptable carrier. The pharmaceutical compositions containing the iRNA are useful for preventing or treating an AGT-associated disorder, e.g., hypertension.

[0599] Such pharmaceutical compositions are formulated based on the mode of delivery. One example is compositions that are formulated for systemic administration via parenteral delivery, e.g., by subcutaneous (SC), intramuscular (IM), or intravenous (IV) delivery. The pharmaceutical compositions of the invention may be administered in dosages sufficient to inhibit expression of an AGT gene.

[0600] In some embodiments, the pharmaceutical compositions of the invention are sterile. In another embodiment, the pharmaceutical compositions of the invention are pyrogen free.

[0601] The pharmaceutical compositions of the invention may be administered in dosages sufficient to inhibit expression of an AGT gene. In general, a suitable dose of an iRNA of the invention will be in the range of about 0.001 to about 200.0 milligrams per kilogram body weight of the recipient per day, generally in the range of about 1 to 50 mg per kilogram body weight per day. Typically, a suitable dose of an iRNA of the invention will be in the range of about 0.1 mg/kg to about 5.0 mg/kg, such as, about 0.3 mg/kg and about 3.0 mg/kg. A repeat-dose regimen may include administration of a therapeutic amount of iRNA on a regular basis, such as every month, once every 3-6 months, or once a year. In certain embodiments, the iRNA is administered about once per month to about once per six months.

[0602] After an initial treatment regimen, the treatments can be administered on a less frequent basis. Duration of treatment can be determined based on the severity of disease.

[0603] In other embodiments, a single dose of the pharmaceutical compositions can be long lasting, such that doses are administered at not more than 1, 2, 3, or 4 month intervals. In some embodiments of the invention, a single dose of the pharmaceutical compositions of the invention is administered about once per month. In other embodiments of the invention, a single dose of the pharmaceutical compositions of the invention is administered quarterly (i.e., about every three months). In other embodiments of the invention, a single dose of the pharmaceutical compositions of the invention is administered twice per year (i.e., about once every six months).

[0604] The skilled artisan will appreciate that certain factors can influence the dosage and timing required to effectively treat a subject, including but not limited to mutations present in the subject, previous treatments, the general health or age of the subject, and other diseases present. Moreover, treatment of a subject with a prophylactically or therapeutically effective amount, as appropriate, of a composition can include a single treatment or a series of treatments.

[0605] The pharmaceutical compositions of the present disclosure can be administered in a number of ways depending upon whether local or systemic treatment is desired and upon the area to be treated. Administration may be topical (including ophthalmic, vaginal, rectal, intranasal, transdermal), oral, or parenteral. Parenteral administration includes intravenous, intraarterial, subcutaneous, intraperitoneal or intramuscular injection or infusion; subdermal, e.g., via an implanted device; or intracranial, e.g., by intraparenchymal, intrathecal or intraventricular, administration.

[0606] The iRNA can be delivered in a manner to target a particular tissue, such as the liver.

[0607] Pharmaceutical compositions and formulations for topical administration can include transdermal patches, ointments, lotions, creams, gels, drops, suppositories, sprays, liquids and powders. Conventional pharmaceutical carriers, aqueous, powder or oily bases, thickeners and the like can be necessary or desirable. Coated condoms, gloves and the like can also be useful. Suitable topical formulations include those in which the RNAi agents featured in the disclosure are in admixture with a topical delivery agent such as lipids, liposomes, fatty acids, fatty acid esters, steroids, chelating agents and surfactants. Suitable lipids and liposomes include neutral (e.g., diolcoylphosphatidyl DOPE ethanolamine, dimyristoylphosphatidyl choline DMPC, distearolyphosphatidyl choline) negative (e.g., dimyristoylphosphatidyl glycerol DMPG) and cationic (e.g., dioleoyltetramethylaminopropyl DOTAP and dioleoylphosphatidyl ethanolamine DOTMA). RNAi agents featured in the disclosure can be encapsulated within liposomes or can form complexes thereto, in particular to cationic liposomes. Alternatively, RNAi agents can be complexed to lipids, in particular to cationic lipids. Suitable fatty acids and esters include but are not limited to arachidonic acid, oleic acid, eicosanoic acid, lauric acid, caprylic acid, capric acid, myristic acid, palmitic acid, stearic acid, linoleic acid, linolenic acid, dicaprate, tricaprate, monoolein, dilaurin, glyceryl 1-monocaprate, 1-dodecylazacycloheptan-2-one, an acylcarnitine, an acylcholine, or a C1-20 alkyl ester (e.g., isopropylmyristate IPM), monoglyceride, diglyceride or pharmaceutically acceptable salt thereof. Topical formulations are described in detail in U.S. Pat. No. 6,747,014, which is incorporated herein by reference.

[0608] In one embodiment, the siRNAs, double stranded RNA agents of the invention, are administered to a cell in a pharmaceutical composition by a topical route of administration. In one embodiment, the pharmaceutical composition may include an siRNA compound mixed with a topical delivery agent. The topical delivery agent can be a plurality of microscopic vesicles. The microscopic vesicles can be liposomes. In some embodiments the liposomes are cationic liposomes.

[0609] In another embodiment, the dsRNA agent is admixed with a topical penetration enhancer. In one embodiment, the topical penetration enhancer is a fatty acid. The fatty acid can be arachidonic acid, oleic acid, lauric acid, caprylic acid, capric acid, myristic acid, palmitic acid, stearic acid, linoleic acid, linolenic acid, dicaprate, tricaprate, monolein, dilaurin, glyceryl 1-monocaprate, 1-dodecylazacycloheptan-2-one, an acylcarnitine, an acylcholine, or a C1-10 alkyl ester, monoglyceride, diglyceride or pharmaceutically acceptable salt thereof.

[0610] In another embodiment, the topical penetration enhancer is a bile salt. The bile salt can be cholic acid, dehydrocholic acid, deoxycholic acid, glucholic acid, glycholic acid, glycodeoxycholic acid, taurocholic acid, taurodeoxycholic acid, chenodeoxycholic acid, ursodeoxycholic acid, sodium tauro-24,25-dihydro-fusidate, sodium glycodihydrofusidate, polyoxyethylene-9-lauryl ether or a pharmaceutically acceptable salt thereof.

[0611] In another embodiment, the penetration enhancer is a chelating agent. The chelating agent can be EDTA, citric acid, a salicyclate, a N-acyl derivative of collagen, laureth-9, an N-amino acyl derivative of a beta-diketone or a mixture thereof.

[0612] In another embodiment, the penetration enhancer is a surfactant, e.g., an ionic or nonionic surfactant. The surfactant can be sodium lauryl sulfate, polyoxyethylene-9-lauryl ether, polyoxyethylene-20-cetyl ether, a perfluorchemical emulsion or mixture thereof.

[0613] In another embodiment, the penetration enhancer can be selected from a group consisting of unsaturated cyclic ureas, 1-alkyl-alkones, 1-alkenylazacyclo-alakanones, steroidal anti-inflammatory agents and mixtures thereof. In yet another embodiment the penetration enhancer can be a glycol, a pyrrol, an azone, or a terpenes.

[0614] In one aspect, the invention features a pharmaceutical composition including an siRNA compound, e.g., a double-stranded siRNA compound, or ssiRNA compound, (e.g., a precursor, e.g., a larger siRNA compound which can be processed into a ssiRNA compound, or a DNA which encodes an siRNA compound, e.g., a double-stranded siRNA compound, or ssiRNA compound, or precursor thereof) in an injectable dosage form. In one embodiment, the injectable dosage form of the pharmaceutical composition includes sterile aqueous solutions or dispersions and sterile powders. In some embodiments the sterile solution can include a diluent such as water; saline solution; fixed oils, polyethylene glycols, glycerin, or propylene glycol.

[0615] The iRNA molecules of the invention can be incorporated into pharmaceutical compositions. Such compositions typically include one or more species of iRNA and a pharmaceutically acceptable carrier. As used herein the language “pharmaceutically acceptable carrier” is intended to include any and all solvents, dispersion media, coatings, antibacterial and antifungal agents, isotonic and absorption delaying agents, and the like, compatible with pharmaceutical administration to a cell, e.g., a liver cell. The use of such media and agents for pharmaceutically active substances is well known in the art. Except insofar as any conventional media or agent is incompatible with the active compound, use thereof in the compositions is contemplated. Supplementary active compounds can also be incorporated into the compositions.

[0616] Pharmaceutical compositions of the present invention include, but are not limited to, solutions, emulsions, and liposome-containing formulations. These compositions can be generated from a variety of components that include, but are not limited to, preformed liquids, self-emulsifying solids, and self-emulsifying semisolids. Formulations include those that target the liver.

[0617] The pharmaceutical formulations of the present invention, which can conveniently be presented in unit dosage form, can be prepared according to conventional techniques well known in the pharmaceutical industry. Such techniques include the step of bringing into association the active ingredients with the pharmaceutical carrier(s) or excipient(s). In general, the formulations are prepared by uniformly and intimately bringing into association the active ingredients with liquid carriers.

### A. Additional Formulations

i. Emulsions

[0618] The compositions of the present invention can be prepared and formulated as emulsions. Emulsions are typically heterogeneous systems of one liquid dispersed in another in the form of droplets usually exceeding 0.1 μm in diameter (see e.g., Ansel's Pharmaceutical Dosage Forms and Drug Delivery Systems, Allen, L V., Popovich N G., and Ansel H C., 2004, Lippincott Williams & Wilkins (8th ed.), New York, NY; Idson, in Pharmaceutical Dosage Forms, Lieberman, Rieger and Banker (Eds.), 1988, Marcel Dekker, Inc., New York, N.Y., volume 1, p. 199; Rosoff, in Pharmaceutical Dosage Forms, Lieberman, Rieger and Banker (Eds.), 1988, Marcel Dekker, Inc., New York, N.Y., Volume 1, p. 245; Block in Pharmaceutical Dosage Forms, Lieberman, Rieger and Banker (Eds.), 1988, Marcel Dekker, Inc., New York, N.Y., volume 2, p. 335; Higuchi et al., in Remington's Pharmaceutical Sciences, Mack Publishing Co., Easton, Pa., 1985, p. 301). Emulsions are often biphasic systems comprising two immiscible liquid phases intimately mixed and dispersed with each other. In general, emulsions can be of either the water-in-oil (w/o) or the oil-in-water (o/w) variety. When an aqueous phase is finely divided into and dispersed as minute droplets into a bulk oily phase, the resulting composition is called a water-in-oil (w/o) emulsion. Alternatively, when an oily phase is finely divided into and dispersed as minute droplets into a bulk aqueous phase, the resulting composition is called an oil-in-water (o/w) emulsion. Emulsions can contain additional components in addition to the dispersed phases, and the active drug which can be present as a solution either in the aqueous phase, oily phase or itself as a separate phase. Pharmaceutical excipients such as emulsifiers, stabilizers, dyes, and anti-oxidants can also be present in emulsions as needed.

[0619] Pharmaceutical emulsions can also be multiple emulsions that are comprised of more than two phases such as, for example, in the case of oil-in-water-in-oil (o/w/o) and water-in-oil-in-water (w/o/w) emulsions. Such complex formulations often provide certain advantages that simple binary emulsions do not. Multiple emulsions in which individual oil droplets of an o/w emulsion enclose small water droplets constitute a w/o/w emulsion. Likewise a system of oil droplets enclosed in globules of water stabilized in an oily continuous phase provides an o/w/o emulsion.

[0620] Emulsions are characterized by little or no thermodynamic stability. Often, the dispersed or discontinuous phase of the emulsion is well dispersed into the external or continuous phase and maintained in this form through the means of emulsifiers or the viscosity of the formulation. Other means of stabilizing emulsions entail the use of emulsifiers that can be incorporated into either phase of the emulsion. Emulsifiers can broadly be classified into four categories: synthetic surfactants, naturally occurring emulsifiers, absorption bases, and finely dispersed solids (see e.g., Ansel's Pharmaceutical Dosage Forms and Drug Delivery Systems, Allen, L V., Popovich N G., and Ansel HC., 2004, Lippincott Williams & Wilkins (8th ed.), New York, NY; Idson, in Pharmaceutical Dosage Forms, Lieberman, Rieger and Banker (Eds.), 1988, Marcel Dekker, Inc., New York, N. Y., volume 1, p. 199).

[0621] Synthetic surfactants, also known as surface active agents, have found wide applicability in the formulation of emulsions and have been reviewed in the literature (see e.g., Ansel's Pharmaceutical Dosage Forms and Drug Delivery Systems, Allen, L V., Popovich N G., and Ansel HC., 2004, Lippincott Williams & Wilkins (8th ed.), New York, NY; Rieger, in Pharmaceutical Dosage Forms, Lieberman, Rieger and Banker (Eds.), 1988, Marcel Dekker, Inc., New York, N. Y., volume 1, p. 285; Idson, in Pharmaceutical Dosage Forms, Lieberman, Rieger and Banker (Eds.), Marcel Dekker, Inc., New York, N.Y., 1988, volume 1, p. 199). Surfactants are typically amphiphilic and comprise a hydrophilic and a hydrophobic portion. The ratio of the hydrophilic to the hydrophobic nature of the surfactant has been termed the hydrophile/lipophile balance (HLB) and is a valuable tool in categorizing and selecting surfactants in the preparation of formulations. Surfactants can be classified into different classes based on the nature of the hydrophilic group: nonionic, anionic, cationic, and amphoteric (see e.g., Ansel's Pharmaceutical Dosage Forms and Drug Delivery Systems, Allen, L V., Popovich N G., and Ansel H C., 2004, Lippincott Williams & Wilkins (8th ed.), New York, NY Rieger, in Pharmaceutical Dosage Forms, Lieberman, Rieger and Banker (Eds.), 1988, Marcel Dekker, Inc., New York, N.Y., volume 1, p. 285).

[0622] A large variety of non-emulsifying materials are also included in emulsion formulations and contribute to the properties of emulsions. These include fats, oils, waxes, fatty acids, fatty alcohols, fatty esters, humectants, hydrophilic colloids, preservatives, and antioxidants (Block, in Pharmaceutical Dosage Forms, Lieberman, Rieger and Banker (Eds.), 1988, Marcel Dekker, Inc., New York, N.Y., volume 1, p. 335; Idson, in Pharmaceutical Dosage Forms, Lieberman, Rieger and Banker (Eds.), 1988, Marcel Dekker, Inc., New York, N.Y., volume 1, p. 199).

[0623] The application of emulsion formulations via dermatological, oral, and parenteral routes, and methods for their manufacture have been reviewed in the literature (see e.g., Ansel's Pharmaceutical Dosage Forms and Drug Delivery Systems, Allen, L V., Popovich N G., and Ansel H C., 2004, Lippincott Williams & Wilkins (8th ed.), New York, NY; Idson, in Pharmaceutical Dosage Forms, Lieberman, Rieger and Banker (Eds.), 1988, Marcel Dekker, Inc., New York, N.Y., volume 1, p. 199).

ii. Microemulsions

[0624] In one embodiment of the present invention, the compositions of iRNAs and nucleic acids are formulated as microemulsions. A microemulsion can be defined as a system of water, oil, and amphiphile which is a single optically isotropic and thermodynamically stable liquid solution (see e.g., Ansel's Pharmaceutical Dosage Forms and Drug Delivery Systems, Allen, L V., Popovich N G., and Ansel H C., 2004, Lippincott Williams & Wilkins (8th ed.), New York, NY; Rosoff, in Pharmaceutical Dosage Forms, Lieberman, Rieger and Banker (Eds.), 1988, Marcel Dekker, Inc., New York, N.Y., volume 1, p. 245). Typically microemulsions are systems that are prepared by first dispersing an oil in an aqueous surfactant solution and then adding a sufficient amount of a fourth component, generally an intermediate chain-length alcohol to form a transparent system. Therefore, microemulsions have also been described as thermodynamically stable, isotropically clear dispersions of two immiscible liquids that are stabilized by interfacial films of surface-active molecules (Leung and Shah, in: Controlled Release of Drugs: Polymers and Aggregate Systems, Rosoff, M., Ed., 1989, VCH Publishers, New York, pages 185-215).

iii. Microparticles

[0625] An iRNA of the invention may be incorporated into a particle, e.g., a microparticle. Microparticles can be produced by spray-drying, but may also be produced by other methods including lyophilization, evaporation, fluid bed drying, vacuum drying, or a combination of these techniques.

iv. Penetration Enhancers

[0626] In one embodiment, the present invention employs various penetration enhancers to effect the efficient delivery of nucleic acids, particularly iRNAs, to the skin of animals. Most drugs are present in solution in both ionized and nonionized forms. However, usually only lipid soluble or lipophilic drugs readily cross cell membranes. It has been discovered that even non-lipophilic drugs can cross cell membranes if the membrane to be crossed is treated with a penetration enhancer. In addition to aiding the diffusion of non-lipophilic drugs across cell membranes, penetration enhancers also enhance the permeability of lipophilic drugs.

[0627] Penetration enhancers can be classified as belonging to one of five broad categories, i.e., surfactants, fatty acids, bile salts, chelating agents, and non-chelating non-surfactants (see e.g., Malmsten, M. Surfactants and polymers in drug delivery, Informa Health Care, New York, NY, 2002; Lee et al., Critical Reviews in Therapeutic Drug Carrier Systems, 1991, p. 92). Each of the above mentioned classes of penetration enhancers and their use in manufacture of pharmaceutical compositions and delivery of pharmaceutical agents are well known in the art.

v. Excipients

[0628] In contrast to a carrier compound, a “pharmaceutical carrier” or “excipient” is a pharmaceutically acceptable solvent, suspending agent, or any other pharmacologically inert vehicle for delivering one or more nucleic acids to an animal. The excipient can be liquid or solid and is selected, with the planned manner of administration in mind, so as to provide for the desired bulk, consistency, etc., when combined with a nucleic acid and the other components of a given pharmaceutical composition. Such agent are well known in the art.

vi. Other Components

[0629] The compositions of the present invention can additionally contain other adjunct components conventionally found in pharmaceutical compositions, at their art-established usage levels. Thus, for example, the compositions can contain additional, compatible, pharmaceutically-active materials such as, for example, antipruritics, astringents, local anesthetics or anti-inflammatory agents, or can contain additional materials useful in physically formulating various dosage forms of the compositions of the present invention, such as dyes, flavoring agents, preservatives, antioxidants, opacifiers, thickening agents and stabilizers. However, such materials, when added, should not unduly interfere with the biological activities of the components of the compositions of the present invention. The formulations can be sterilized and, if desired, mixed with auxiliary agents, e.g., lubricants, preservatives, stabilizers, wetting agents, emulsifiers, salts for influencing osmotic pressure, buffers, colorings, flavorings, or aromatic substances, and the like which do not deleteriously interact with the nucleic acid(s) of the formulation.

[0630] Aqueous suspensions can contain substances which increase the viscosity of the suspension including, for example, sodium carboxymethylcellulose, sorbitol, or dextran. The suspension can also contain stabilizers.

[0631] In some embodiments, pharmaceutical compositions featured in the invention include (a) one or more iRNA and (b) one or more agents which function by a non-iRNA mechanism and which are useful in treating an AGT-associated disorder, e.g., hypertension.

[0632] Toxicity and prophylactic efficacy of such compounds can be determined by standard pharmaceutical procedures in cell cultures or experimental animals, e.g., for determining the LD50 (the dose lethal to 50% of the population) and the ED50 (the dose prophylactically effective in 50% of the population). The dose ratio between toxic and therapeutic effects is the therapeutic index and it can be expressed as the ratio LD50/ED50. Compounds that exhibit high therapeutic indices are preferred.

[0633] The data obtained from cell culture assays and animal studies can be used in formulating a range of dosage for use in humans. The dosage of compositions featured herein in the invention lies generally within a range of circulating concentrations that include the ED50, such as, an ED80 or ED90, with little or no toxicity. The dosage can vary within this range depending upon the dosage form employed and the route of administration utilized. For any compound used in the methods featured in the invention, the prophylactically effective dose can be estimated initially from cell culture assays. A dose can be formulated in animal models to achieve a circulating plasma concentration range of the compound or, when appropriate, of the polypeptide product of a target sequence (e.g., achieving a decreased concentration of the polypeptide) that includes the IC50 (i.e., the concentration of the test compound which achieves a half-maximal inhibition of symptoms) or higher levels of inhibition as determined in cell culture. Such information can be used to more accurately determine useful doses in humans. Levels in plasma can be measured, for example, by high performance liquid chromatography.

[0634] In addition to their administration, as discussed above, the iRNAs featured in the invention can be administered in combination with other known agents used for the prevention or treatment of an AGT-associated disorder, e.g., hypertension. In any event, the administering physician can adjust the amount and timing of iRNA administration on the basis of results observed using standard measures of efficacy known in the art or described herein.

### VI. Methods For Inhibiting AGT Expression

[0635] The present invention also provides methods of inhibiting expression of an AGT gene in a cell. The methods include contacting a cell with an RNAi agent, e.g., double stranded RNA agent, in an amount effective to inhibit expression of AGT in the cell, thereby inhibiting expression of AGT in the cell. In some embodiments of the disclosure, expression of an AGT gene is inhibited preferentially in the liver (e.g., hepatocytes).

[0636] Contacting of a cell with an iRNA, e.g., a double stranded RNA agent, may be done in vitro or in vivo. Contacting a cell in vivo with the iRNA includes contacting a cell or group of cells within a subject, e.g., a human subject, with the iRNA. Combinations of in vitro and in vivo methods of contacting a cell are also possible. Contacting a cell may be direct or indirect, as discussed above. Furthermore, contacting a cell may be accomplished via a targeting ligand, including any ligand described herein or known in the art. In some embodiments, the targeting ligand is a carbohydrate moiety, e.g., a GalNAcs ligand, or any other ligand that directs the RNAi agent to a site of interest.

[0637] The term “inhibiting.” as used herein, is used interchangeably with “reducing.” “silencing.” “downregulating”, “suppressing”, and other similar terms, and includes any level of inhibition.

[0638] The phrase “inhibiting expression of an AGT” is intended to refer to inhibition of expression of any AGT gene (such as, e.g., a mouse AGT gene, a rat AGT gene, a monkey AGT gene, or a human AGT gene) as well as variants or mutants of an AGT gene. Thus, the AGT gene may be a wild-type AGT gene, a mutant AGT gene, or a transgenic AGT gene in the context of a genetically manipulated cell, group of cells, or organism.

[0639] “Inhibiting expression of an AGT gene” includes any level of inhibition of an AGT gene, e.g., at least partial suppression of the expression of an AGT gene. The expression of the AGT gene may be assessed based on the level, or the change in the level, of any variable associated with AGT gene expression, e.g., AGT mRNA level or AGT protein level. This level may be assessed in an individual cell or in a group of cells, including, for example, a sample derived from a subject.

[0640] Inhibition may be assessed by a decrease in an absolute or relative level of one or more variables that are associated with AGT expression compared with a control level. The control level may be any type of control level that is utilized in the art, e.g., a pre-dose baseline level, or a level determined from a similar subject, cell, or sample that is untreated or treated with a control (such as, e.g., buffer only control or inactive agent control).

[0641] In some embodiments of the methods of the invention, expression of an AGT gene is inhibited by at least 50%, 55%, 60%, 65%, 70%, 75%, 80%, 85%, 90%, or 95%, or to below the level of detection of the assay. In some embodiments, expression of an AGT gene is inhibited by at least 70%. It is further understood that inhibition of AGT expression in certain tissues, e.g., in liver, without a significant inhibition of expression in other tissues, e.g., brain, may be desirable. In some embodiments, expression level is determined using the assay method provided in Example 2 with a 10 nM siRNA concentration in the appropriate species matched cell line.

[0642] In certain embodiments, inhibition of expression in vivo is determined by knockdown of the human gene in a rodent expressing the human gene, e.g., an AAV-infected mouse expressing the human target gene (i.e., AGT), e.g., when administered as a single dose, e.g., at 3 mg/kg at the nadir of RNA expression. Knockdown of expression of an endogenous gene in a model animal system can also be determined, e.g., after administration of a single dose at, e.g., 3 mg/kg at the nadir of RNA expression. Such systems are useful when the nucleic acid sequence of the human gene and the model animal gene are sufficiently close such that the human iRNA provides effective knockdown of the model animal gene. RNA expression in liver is determined using the PCR methods provided in Example 2.

[0643] Inhibition of the expression of an AGT gene may be manifested by a reduction of the amount of mRNA expressed by a first cell or group of cells (such cells may be present, for example, in a sample derived from a subject) in which an AGT gene is transcribed and which has or have been treated (e.g., by contacting the cell or cells with an iRNA of the invention, or by administering an iRNA of the invention to a subject in which the cells are or were present) such that the expression of an AGT gene is inhibited, as compared to a second cell or group of cells substantially identical to the first cell or group of cells but which has not or have not been so treated (control cell(s) not treated with an iRNA or not treated with an iRNA targeted to the gene of interest). In some embodiments, the inhibition is assessed by the method provided in Example 2 using a 10 nM siRNA concentration in the species matched cell line and expressing the level of mRNA in treated cells as a percentage of the level of mRNA in control cells, using the following formula:

$$\frac{( m R N A in control cells ) - ( m R N A in treated cells )}{( m R N A in control cells )} 100 \%$$

[0644] In other embodiments, inhibition of the expression of an AGT gene may be assessed in terms of a reduction of a parameter that is functionally linked to AGT gene expression, e.g., AGT protein level in blood or serum from a subject. AGT gene silencing may be determined in any cell expressing AGT, either endogenous or heterologous from an expression construct, and by any assay known in the art.

[0645] Inhibition of the expression of an AGT protein may be manifested by a reduction in the level of the AGT protein that is expressed by a cell or group of cells or in a subject sample (e.g., the level of protein in a blood sample derived from a subject). As explained above, for the assessment of mRNA suppression, the inhibition of protein expression levels in a treated cell or group of cells may similarly be expressed as a percentage of the level of protein in a control cell or group of cells, or the change in the level of protein in a subject sample, e.g., blood or serum derived therefrom.

[0646] A control cell, a group of cells, or subject sample that may be used to assess the inhibition of the expression of an AGT gene includes a cell, group of cells, or subject sample that has not yet been contacted with an RNAi agent of the invention. For example, the control cell, group of cells, or subject sample may be derived from an individual subject (e.g., a human or animal subject) prior to treatment of the subject with an RNAi agent or an appropriately matched population control.

[0647] The level of AGT mRNA that is expressed by a cell or group of cells may be determined using any method known in the art for assessing mRNA expression. In one embodiment, the level of expression of AGT in a sample is determined by detecting a transcribed polynucleotide, or portion thereof, e.g., mRNA of the AGT gene. RNA may be extracted from cells using RNA extraction techniques including, for example, using acid phenol/guanidine isothiocyanate extraction (RNAzol B; Biogenesis), RNeasy™ RNA preparation kits (Qiagen®) or PAXgene™ (PreAnalytix™, Switzerland). Typical assay formats utilizing ribonucleic acid hybridization include nuclear run-on assays, RT-PCR, RNase protection assays, northern blotting, in situ hybridization, and microarray analysis.

[0648] In some embodiments, the level of expression of AGT is determined using a nucleic acid probe. The term “probe”, as used herein, refers to any molecule that is capable of selectively binding to a specific AGT. Probes can be synthesized by one of skill in the art, or derived from appropriate biological preparations. Probes may be specifically designed to be labeled. Examples of molecules that can be utilized as probes include, but are not limited to, RNA, DNA, proteins, antibodies, and organic molecules.

[0649] Isolated mRNA can be used in hybridization or amplification assays that include, but are not limited to, Southern or northern analyses, polymerase chain reaction (PCR) analyses and probe arrays. One method for the determination of mRNA levels involves contacting the isolated mRNA with a nucleic acid molecule (probe) that can hybridize to AGT mRNA. In one embodiment, the mRNA is immobilized on a solid surface and contacted with a probe, for example by running the isolated mRNA on an agarose gel and transferring the mRNA from the gel to a membrane, such as nitrocellulose. In an alternative embodiment, the probe(s) are immobilized on a solid surface and the mRNA is contacted with the probe(s), for example, in an Affymetrix® gene chip array. A skilled artisan can readily adapt known mRNA detection methods for use in determining the level of AGT mRNA.

[0650] An alternative method for determining the level of expression of AGT in a sample involves the process of nucleic acid amplification or reverse transcriptase (to prepare cDNA) of for example mRNA in the sample, e.g., by RT-PCR (the experimental embodiment set forth in Mullis, 1987, U.S. Pat. No. 4,683,202), ligase chain reaction (Barany (1991) Proc. Natl. Acad. Sci. USA 88:189-193), self sustained sequence replication (Guatelli et al. (1990) Proc. Natl. Acad. Sci. USA 87:1874-1878), transcriptional amplification system (Kwoh et al. (1989) Proc. Natl. Acad. Sci. USA 86:1173-1177), Q-Beta Replicase (Lizardi et al. (1988) Bio/Technology 6:1197), rolling circle replication (Lizardi et al., U.S. Pat. No. 5,854,033) or any other nucleic acid amplification method, followed by the detection of the amplified molecules using techniques well known to those of skill in the art. These detection schemes are especially useful for the detection of nucleic acid molecules if such molecules are present in very low numbers. In particular aspects of the invention, the level of expression of AGT is determined by quantitative fluorogenic RT-PCR (i.e., the TaqMan™ System). In some embodiments, expression level is determined by the method provided in Example 2 using, e.g., a 10 nM siRNA concentration, in the species matched cell line.

[0651] The expression levels of AGT mRNA may be monitored using a membrane blot (such as used in hybridization analysis such as northern, Southern, dot, and the like), or microwells, sample tubes, gels, beads or fibers (or any solid support comprising bound nucleic acids). See U.S. Pat. Nos. 5,770,722, 5,874,219, 5,744,305, 5,677,195 and 5,445,934, which are incorporated herein by reference. The determination of AGT expression level may also comprise using nucleic acid probes in solution.

[0652] In some embodiments, the level of mRNA expression is assessed using branched DNA (bDNA) assays or real time PCR (qPCR). The use of these methods is described and exemplified in the Examples presented herein. In some embodiments, expression level is determined by the method provided in Example 2 using a 10 nM siRNA concentration in the species matched cell line.

[0653] The level of AGT protein expression may be determined using any method known in the art for the measurement of protein levels. Such methods include, for example, electrophoresis, capillary electrophoresis, high performance liquid chromatography (HPLC), thin layer chromatography (TLC), hyperdiffusion chromatography, fluid or gel precipitin reactions, absorption spectroscopy, a colorimetric assays, spectrophotometric assays, flow cytometry, immunodiffusion (single or double), immunoelectrophoresis, western blotting, radioimmunoassay (RIA), enzyme-linked immunosorbent assays (ELISAs), immunofluorescent assays, electrochemiluminescence assays, and the like.

[0654] In some embodiments, the efficacy of the methods of the invention are assessed by a decrease in AGT mRNA or protein level (e.g., in a liver biopsy).

[0655] In some embodiments, the efficacy of the methods of the invention can be monitored by detecting or monitoring a reduction in a symptom of an AGT-associate disorder. It is well within the ability of one skilled in the art to monitor efficacy of the methods by measuring any one of such parameters, or any combination of parameters.

[0656] In some embodiments of the methods of the invention, the iRNA is administered to a subject such that the iRNA is delivered to a specific site within the subject. The inhibition of expression of AGT may be assessed using measurements of the level or change in the level of AGT mRNA or AGT protein in a sample derived from fluid or tissue from the specific site within the subject (e.g., liver or blood).

[0657] As used herein, the terms detecting or determining a level of an analyte are understood to mean performing the steps to determine if a material, e.g., protein, RNA, is present. As used herein, methods of detecting or determining include detection or determination of an analyte level that is below the level of detection for the method used.

### VII. Prophylactic and Treatment Methods of the Invention

[0658] The present invention also provides methods of using an iRNA of the invention or a composition containing an iRNA of the invention to inhibit expression of AGT, thereby preventing or treating an AGT-associated disorder, e.g., hypertension. In the methods of the invention the cell may be contacted with the siRNA in vitro or in vivo, i.e., the cell may be within a subject.

[0659] A cell suitable for treatment using the methods of the invention may be any cell that expresses an AGT gene, e.g., a liver cell. A cell suitable for use in the methods of the invention may be a mammalian cell, e.g., a primate cell (such as a human cell, including human cell in a chimeric non-human animal, or a non-human primate cell, e.g., a monkey cell or a chimpanzee cell), or a non-primate cell. In certain embodiments, the cell is a human cell, e.g., a human liver cell. In the methods of the invention, AGT expression is inhibited in the cell by at least 50, 55, 60, 65, 70, 75, 80, 85, 90, or 95, or to a level below the level of detection of the assay.

[0660] The in vivo methods of the invention may include administering to a subject a composition containing an iRNA, where the iRNA includes a nucleotide sequence that is complementary to at least a part of an RNA transcript of the AGT gene of the mammal to which the RNAi agent is to be administered. The composition can be administered by any means known in the art including, but not limited to oral, intraperitoneal, or parenteral routes, including intracranial (e.g., intraventricular, intraparenchymal, and intrathecal), intravenous, intramuscular, subcutaneous, transdermal, airway (aerosol), nasal, rectal, intraocular (e.g., periocular, conjunctival, subtenon, intracameral, intravitreal, intraocular, anterior or posterior juxtascleral, subretinal, subconjunctival, retrobulbar, or intracanalicular injection), intravenous, intramuscular, subcutaneous, transdermal, airway (aerosol), and topical (including buccal and sublingual) administration.

[0661] In certain embodiments, the compositions are administered by intravenous infusion or injection. In certain embodiments, the compositions are administered by subcutaneous injection. In certain embodiments, the compositions are administered by intramuscular injection.

[0662] The mode of administration may be chosen based upon whether local or systemic treatment is desired and based upon the area to be treated. The route and site of administration may be chosen to enhance targeting.

[0663] In one aspect, the present invention also provides methods for inhibiting the expression of an AGT gene in a mammal. The methods include administering to the mammal a composition comprising a dsRNA that targets an AGT gene in a cell of the mammal and maintaining the mammal for a time sufficient to obtain degradation of the mRNA transcript of the AGT gene, thereby inhibiting expression of the AGT gene in the cell. Reduction in gene expression can be assessed by any methods known in the art and by methods, e.g. qRT-PCR, described herein, e.g., in Example 2. Reduction in protein production can be assessed by any methods known it the art, e.g. ELISA. In certain embodiments, a puncture liver biopsy sample serves as the tissue material for monitoring the reduction in the AGT gene or protein expression. In other embodiments, a blood sample serves as the subject sample for monitoring the reduction in the AGT protein expression.

[0664] The present invention further provides methods of treatment in a subject in need thereof, e.g., a subject diagnosed with an AGT-associated disorder, such as hypertension.

[0665] The present invention further provides methods of prophylaxis in a subject in need thereof. The treatment methods of the invention include administering an iRNA of the invention to a subject, e.g., a subject that would benefit from a reduction of AGT expression, in a prophylactically effective amount of a dsRNA targeting an AGT gene or a pharmaceutical composition comprising a dsRNA targeting an AGT gene.

[0666] In one aspect, the present invention provides methods of treating a subject having a disorder that would benefit from reduction in AGT expression, e.g., an AGT-associated disorder, such as high blood pressure, hypertension, borderline hypertension, primary hypertension, secondary hypertension isolated systolic or diastolic hypertension, pregnancy-associated hypertension, diabetic hypertension, resistant hypertension, refractory hypertension, paroxysmal hypertension, renovascular hypertension, Goldblatt hypertension, hypertension associated with low plasma renin activity or plasma renin concentration, ocular hypertension, glaucoma, pulmonary hypertension, portal hypertension, systemic venous hypertension, systolic hypertension, labile hypertension; hypertensive heart disease, hypertensive nephropathy, atherosclerosis, arteriosclerosis, vasculopathy, diabetic nephropathy, diabetic retinopathy, chronic heart failure, cardiomyopathy, diabetic cardiac myopathy, glomerulosclerosis, coarctation of the aorta, aortic aneurism, ventricular fibrosis, heart failure, myocardial infarction, angina, stroke, renal disease, renal failure, systemic sclerosis, intrauterine growth restriction (IUGR), fetal growth restriction, obesity, liver steatosis/fatty liver, non-alcoholic Steatohepatitis (NASH), non-alcoholic fatty liver disease (NAFLD); glucose intolerance, type 2 diabetes (non-insulin dependent diabetes), and metabolic syndrome.

[0667] In some embodiments, the RNAi agent is administered to a subject in an amount effective to inhibit AGT expression in a cell within the subject. The amount effective to inhibit AGT expression in a cell within a subject may be assessed using methods discussed above, including methods that involve assessment of the inhibition of AGT mRNA, AGT protein, or related variables, such as a reduction in the severity of a symptom of an AGT-associate disorder, e.g., reduction in the severity of edema swelling of the extremities, face, larynx, upper respiratory tract, abdomen, trunk, and genitals, prodrome; laryngeal swelling; nonpruritic rash; nausea; vomiting; or abdominal pain.

[0668] An iRNA of the invention may be administered as a “free iRNA.” A free iRNA is administered in the absence of a pharmaceutical composition. The naked iRNA may be in a suitable buffer solution. The buffer solution may comprise acetate, citrate, prolamine, carbonate, or phosphate, or any combination thereof. In one embodiment, the buffer solution is phosphate buffered saline (PBS). The pH and osmolarity of the buffer solution containing the iRNA can be adjusted such that it is suitable for administering to a subject.

[0669] Alternatively, an iRNA of the invention may be administered as a pharmaceutical composition, such as a dsRNA liposomal formulation.

[0670] Subjects that would benefit from an inhibition of AGT gene expression are subjects susceptible to or diagnosed with an AGT-associated disorder, such as high blood pressure, hypertension, borderline hypertension, primary hypertension, secondary hypertension isolated systolic or diastolic hypertension, pregnancy-associated hypertension, diabetic hypertension, resistant hypertension, refractory hypertension, paroxysmal hypertension, renovascular hypertension, Goldblatt hypertension, hypertension associated with low plasma renin activity or plasma renin concentration, ocular hypertension, glaucoma, pulmonary hypertension, portal hypertension, systemic venous hypertension, systolic hypertension, labile hypertension; hypertensive heart disease, hypertensive nephropathy, atherosclerosis, arteriosclerosis, vasculopathy, diabetic nephropathy, diabetic retinopathy, chronic heart failure, cardiomyopathy, diabetic cardiac myopathy, glomerulosclerosis, coarctation of the aorta, aortic aneurism, ventricular fibrosis, heart failure, myocardial infarction, angina, stroke, renal disease, renal failure, systemic sclerosis, intrauterine growth restriction (IUGR). fetal growth restriction, obesity, liver steatosis/fatty liver, non-alcoholic Steatohepatitis (NASH), non-alcoholic fatty liver disease (NAFLD); glucose intolerance, type 2 diabetes (non-insulin dependent diabetes), and metabolic syndrome. In an embodiment, the method includes administering a composition featured herein such that expression of the target ab AGT gene is decreased, such as for about 1, 2, 3, 4, 5, 6, 1-6, 1-3, or 3-6 months per dose. In certain embodiments, the composition is administered once every 3-6 months.

[0671] In one embodiment, the iRNAs useful for the methods and compositions featured herein specifically target RNAs (primary or processed) of the target AGT gene. Compositions and methods for inhibiting the expression of these genes using iRNAs can be prepared and performed as described herein.

[0672] Administration of the iRNA according to the methods of the invention may result prevention or treatment of an AGT-associated disorder, e.g., high blood pressure, hypertension, borderline hypertension, primary hypertension, secondary hypertension isolated systolic or diastolic hypertension, pregnancy-associated hypertension, diabetic hypertension, resistant hypertension, refractory hypertension, paroxysmal hypertension, renovascular hypertension, Goldblatt hypertension, hypertension associated with low plasma renin activity or plasma renin concentration, ocular hypertension, glaucoma, pulmonary hypertension, portal hypertension, systemic venous hypertension, systolic hypertension, labile hypertension; hypertensive heart disease, hypertensive nephropathy, atherosclerosis, arteriosclerosis, vasculopathy, diabetic nephropathy, diabetic retinopathy, chronic heart failure, cardiomyopathy, diabetic cardiac myopathy, glomerulosclerosis, coarctation of the aorta, aortic aneurism, ventricular fibrosis, heart failure, myocardial infarction, angina, stroke, renal disease, renal failure, systemic sclerosis, intrauterine growth restriction (IUGR), fetal growth restriction, obesity, liver steatosis/fatty liver, non-alcoholic Steatohepatitis (NASH), non-alcoholic fatty liver disease (NAFLD); glucose intolerance, type 2 diabetes (non-insulin dependent diabetes), and metabolic syndrome. Subjects can be administered a therapeutic amount of iRNA, such as about 0.01 mg/kg to about 200 mg/kg.

[0673] In one embodiment, the iRNA is administered subcutaneously, i.e., by subcutaneous injection. One or more injections may be used to deliver the desired dose of iRNA to a subject. The injections may be repeated over a period of time.

[0674] The administration may be repeated on a regular basis. In certain embodiments, after an initial treatment regimen, the treatments can be administered on a less frequent basis. A repeat-dose regimen may include administration of a therapeutic amount of iRNA on a regular basis, such as once per month to once a year. In certain embodiments, the iRNA is administered about once per month to about once every three months, or about once every three months to about once every six months.

[0675] The invention further provides methods and uses of an iRNA agent or a pharmaceutical composition thereof for treating a subject that would benefit from reduction and/or inhibition of AGT gene expression, e.g., a subject having an AGT-associated disorder, in combination with other pharmaceuticals and/or other therapeutic methods, e.g., with known pharmaceuticals and/or known therapeutic methods, such as, for example, those which are currently employed for treating these disorders.

[0676] Accordingly, in some aspects of the invention, the methods which include administration of an iRNA agent of the invention, further include administering to the subject one or more additional therapeutic agents. For example, in certain embodiments, an iRNA targeting AGT is administered in combination with, e.g., a diuretic, an angiotensin converting enzyme (ACE) inhibitor, an angiotensin II receptor antagonist, a beta-blocker, a vasodialator, a calcium channel blocker, an aldosterone antagonist, an alpha2-agonist, a renin inhibitor, an alpha-blocker, a peripheral acting adrenergic agent, a selective D1 receptor partial agonist, a nonselective alpha-adrenergic antagonist, a synthetic, a steroidal antimineralocorticoid agent, an angiotensin receptor-neprilysin inhibitors (ARNi), Entresto®, sacubitril/valsartan; or an endothelin receptor antagonist (ERA), sitaxentan, ambrisentan, atrasentan, BQ-123, zibotentan, bosentan, macitentan, and tezosentan; a combination of any of the foregoing; and a hypertension therapeutic agent formulated as a combination of agents.

[0677] The iRNA and additional therapeutic agents may be administered at the same time and/or in the same combination, e.g., parenterally, or the additional therapeutic agent can be administered as part of a separate composition or at separate times and/or by another method known in the art or described herein.

[0678] The iRNA agent and an additional therapeutic agent and/or treatment may be administered at the same time and/or in the same combination, e.g., parenterally, or the additional therapeutic agent can be administered as part of a separate composition or at separate times and/or by another method known in the art or described herein.

### A. Diagnostic Criteria, Risk Factors, and Treatments for Hypertension

[0679] Recently practice guidelines for prevention and treatment of hypertension were revised. Extensive reports were published by Reboussin et al. (Systematic Review for the 2017 ACC/AHA/AAPA/ABC/ACPM/AGS/APhA/ASH/ASPC/NMA/PCNA Guideline for the Prevention, Detection, Evaluation, and Management of High Blood Pressure in Adults: A Report of the American College of Cardiology/American Heart Association Task Force on Clinical Practice Guidelines. J Am Coll Cardiol. 2017 Nov. 7. pii: S0735-1097(17)41517-8. doi: 10.1016/j.jacc.2017.11.004.) and Whelton et al. (2017 ACC/AHA/AAPA/ABC/ACPM/AGS/APhA/ASH/ASPC/NMA/PCNA Guideline for the Prevention, Detection, Evaluation, and Management of High Blood Pressure in Adults: A Report of the American College of Cardiology/American Heart Association Task Force on Clinical Practice Guidelines. J Am Coll Cardiol. 2017 Nov. 7. pii: S0735-1097(17)41519-1. doi: 10.1016/j.jacc.2017.11.006.). Some highlights of the new Guidelines are provided below. However, the Guidelines should be understood as providing the knowledge of those of skill in the art regarding diagnostic and monitoring criteria and treatment for hypertension at the time of filing of this application and are incorporated herein by reference.

### 1. Diagnostic Criteria

[0680] Although a continuous association exists between higher blood pressure and increased cardiovascular disease risk, it is useful to categorize blood pressure levels for clinical and public health decision making. Blood pressure can be categorized into 4 levels on the basis of average blood pressure measured in a healthcare setting (office pressures): normal, elevated, and stage 1 or 2 hypertension as shown in the table below (from Whelton et al., 2017).

| Blood Pressure | Systolic Blood | | | Diastolic Blood | |
|---|---|---|---|---|---|
| Category | Pressure | | | Pressure | |
| Normal | <120 | mm Hg | and | <80 | mm Hg |
| Elevated | 120-129 | mm Hg | and | <80 | mm Hg |

Hypertension*

| | | | | | |
|---|---|---|---|---|---|
| Stage 1 | 130-139 | mm Hg | or | 80-89 | mm Hg |
| Stage 2 | ≥140 | mm Hg | or | ≥90 | mm Hg |

*Individuals with systolic blood pressure and diastolic blood pressure in 2 categories should be designated to the higher blood pressure category.

[0681] Blood pressure indicates blood pressure based on an average of ≥2 careful readings obtained on ≥2 occasions. Best practices for obtaining careful blood pressure readings are detailed in Whelton et al., 2017 and are known in the art.

[0682] This categorization differs from that previously recommended in the JNC 7 report (Chobanian et al; the National High Blood Pressure Education Program Coordinating Committee. Seventh Report of the Joint National Committee on Prevention, Detection, Evaluation, and Treatment of High Blood Pressure. Hypertension. 2003; 42:1206-52) with stage 1 hypertension now defined as a systolic blood pressure (SBP) of 130-139 or a diastolic blood pressure (DBP) of 80-89 mm Hg, and with stage 2 hypertension in the present document corresponding to stages 1 and 2 in the JNC 7 report. The rationale for this categorization is based on observational data related to the association between SBP/DBP and cardiovascular disease risk, randomized clinical trials of lifestyle modification to lower blood pressure, and randomized clinical trials of treatment with antihypertensive medication to prevent cardiovascular disease.

[0683] The increased risk of cardiovascular disease among adults with stage 2 hypertension is well established. An increasing number of individual studies and meta-analyses of observational data have reported a gradient of progressively higher cardiovascular disease risk going from normal blood pressure to elevated blood pressure and stage 1 hypertension. In many of these meta-analyses, the hazard ratios for coronary heart disease and stroke were between 1.1 and 1.5 for the comparison of SBP/DBP of 120-129/80-84 mm Hg versus <120/80 mm Hg and between 1.5 and 2.0 for the comparison of SBP/DBP of 130-139/85-89 mm Hg versus <120/80 mm Hg. This risk gradient was consistent across subgroups defined by sex and race/ethnicity. The relative increase in cardiovascular disease risk associated with higher blood pressure was attenuated but still present among older adults. Lifestyle modification and pharmacological antihypertensive treatment are recommended for individuals with elevated blood pressure and stages 1 and 2 hypertension. Clinical benefit can be obtained by a reduction of the stage of elevated blood pressure, even if blood pressure is not normalized by a treatment.

### 2. Risk Factors

[0684] Hypertension is a complex disease that results from a combination of factors including, but not limited to, genetics, lifestyle, diet, and secondary risk factors. Hypertension can also be associated with pregnancy. It is understood that due to the complex nature of hypertension, it is understood that multiple interventions may be required for treatment of hypertension. Moreover, non-pharmacological interventions, including modification of diet and lifestyle, can be useful for the prevention and treatment of hypertension. Further, an intervention may provide a clinical benefit without fully normalizing blood pressure in an individual.

a. Genetic Risk Factors

[0685] Several monogenic forms of hypertension have been identified, such as glucocorticoid-remediable aldosteronism, Liddle's syndrome, Gordon's syndrome, and others in which single-gene mutations fully explain the pathophysiology of hypertension, these disorders are rare. The current tabulation of known genetic variants contributing to blood pressure and hypertension includes more than 25 rare mutations and 120 single nucleotide polymorphisms. However, although genetic factors may contribute to hypertension in some individuals, it is estimated that genetic variation accounts for only about 3.5% of blood pressure variability.

b. Diet and Alcohol Consumption

[0686] Common environmental and lifestyle risk factors leading to hypertension include poor diet, insufficient physical activity, and excess alcohol consumption. These factors can lead to a person to become overweight or obese, further increasing the likelihood of developing or exacerbating hypertension. Elevated blood pressure is even more strongly correlated with increased waist-to-hip ratio or other measures of central fat distribution. Obesity at a young age and ongoing obesity is strongly correlated with hypertension later in life. Achieving a normal weight can reduce the risk of developing high blood pressure to that of a person who has never been obese.

[0687] Intake of sodium, potassium, magnesium, and calcium can also have a significant effect on blood pressure. Sodium intake is positively correlated with blood pressure and accounts for much of the age-related increase in blood pressure. Certain groups are more sensitive to increased sodium consumption than others including black and older adults (>65 years old), and those with a higher level of blood pressure or comorbidities such as chronic kidney disease, diabetes mellitus, or metabolic syndrome. In aggregate, these groups constitute more than half of all US adults. Salt sensitivity may be a marker for increased cardiovascular disease and all-cause mortality, independent of blood pressure. Currently, techniques for recognition of salt sensitivity are impractical in a clinical setting. Therefore, salt sensitivity is best considered as a group characteristic.

[0688] Potassium intake is inversely related to blood pressure and stroke, and a higher level of potassium seems to blunt the effect of sodium on blood pressure. A lower sodium-potassium ratio is associated with a lower blood pressure than that noted for corresponding levels of sodium or potassium on their own. A similar observation has been made for risk of cardiovascular disease.

[0689] Alcohol consumption has long been associated with high blood pressure. In the US, it has been estimated that alcohol consumption accounts for about 10% of the population burden of hypertension, with the burden being greater in men than women.

[0690] It is understood that changes in diet or alcohol consumption can be an aspect of prevention or treatment of hypertension.

c. Physical Activity

[0691] There is a well-established inverse correlation between physical activity/physical fitness and blood pressure levels. Even modest levels of physical activity have been demonstrated to be beneficial in decreasing hypertension.

[0692] It is understood that an increase in physical activity can be an aspect of prevention or treatment of hypertension.

d. Secondary Risk Factors

[0693] Secondary hypertension can underlie severe elevation of blood pressure, pharmacologically resistant hypertension, sudden onset of hypertension, increased blood pressure in patients with hypertension previously controlled on drug therapy, onset of diastolic hypertension in older adults, and target organ damage disproportionate to the duration or severity of the hypertension. Although secondary hypertension should be suspected in younger patients (<30 years of age) with elevated blood pressure, it is not uncommon for primary hypertension to manifest at a younger age, especially in blacks, and some forms of secondary hypertension, such as renovascular disease, are more common at older age (>65 years of age). Many of the causes of secondary hypertension are strongly associated with clinical findings or groups of findings that suggest a specific disorder. In such cases, treatment of the underlying condition may resolve the findings of elevated blood pressure without administering agents typically used for the treatment of hypertension.

e. Pregnancy

[0694] Pregnancy is a risk factor for high blood pressure, and high blood pressure during pregnancy is a risk factor for cardiovascular disease and hypertension later in life. A Report on pregnancy associated hypertension was published in 2013 by the American College of Obstetrics and Gynecology (ACOG) (American College of Obstetricians and Gynecologists, Task Force on Hypertension in Pregnancy. Hypertension in pregnancy. Report of the American College of Obstetricians and Gynecologists' Task Force on Hypertension in Pregnancy. Obstet Gynecol. 2013; 122:1122-31). Some highlights of the Report are provided below. However, the Report should be understood as providing the knowledge of those of skill in the art regarding diagnostic and monitoring criteria and treatment for hypertension in pregnancy at the time of filing of this application and are incorporated herein by reference.′

[0695] The diagnostic criteria for preeclampsia are provided in the table below (from Table 1 of the ACOG report, 2013).

| | |
|---|---|
| Blood Pressure | ≥140 mm Hg diastolic or ≥90 mm Hg diastolic on |
| | two occasions at least 4 hours apart after 20 weeks |
| | of gestation in a woman with a previously normal |
| | blood pressure |
| | ≥160 mm Hg systolic or ≥110 mm Hg diastolic, |
| | hypertension can be confirmed within a short |
| | interval (minutes) to facilitate timely |
| | antihypertensive therapy |

and

| | |
|---|---|
| Proteinurea | ≥300 mg per 24-hour urine collection (or this |
| | amount extrapolated for a timed collection) |
| | Or |
| | Protein/ creatinine ratio ≥0.3 (each measured as |
| | mg/dL) |

Or in the absence of proteinurea, new onset of hypertension
with the new onset of an of the following:

| | |
|---|---|
| Thrombocytopenia | Platelet count ≤100,000/microliter |
| Renal insufficiency | Serum creatinine concentration ≥1.1 mg/dL or a |
| | doubling of the serum creatinine concentration in |
| | the absence of other renal disease |
| Impaired liver | Elevated blood concentrations if liver transaminases |
| function | to twice normal concentration |
| Pulmonary edema | |
| Cerebral or visual | |
| symptoms | |

[0696] Blood Pressure management during pregnancy is complicated by the fact that many commonly used antihypertensive agents, including ACE inhibitors and ARBs, are contraindicated during pregnancy because of potential harm to the fetus. The goal of antihypertensive treatment during pregnancy includes prevention of severe hypertension and the possibility of prolonging gestation to allow the fetus more time to mature before delivery. A review of treatment for pregnancy-associated severe hypertension found insufficient evidence to recommend specific agents; rather, clinician experience was recommended in this setting (Duley L, Meher S, Jones L. Drugs for treatment of very high blood pressure during pregnancy. Cochrane Database Syst Rev. 2013; 7: CD001449.).

### 3. Treatments

[0697] Treatment of high blood pressure is complex as it is frequently present with other comorbidities, often including reduced renal function, for which the subject may also be undergoing treatment. Clinicians managing adults with high blood pressure should focus on overall patient health, with a particular emphasis on reducing the risk of future adverse cardiovascular disease outcomes. All patient risk factors need to be managed in an integrated fashion with a comprehensive set of nonpharmacological and pharmacological strategies. As patient blood pressure and risk of future cardiovascular disease events increase, blood pressure management should be intensified.

[0698] Whereas treatment of high blood pressure with blood pressure-lowering medications on the basis of blood pressure level alone is considered cost effective, use of a combination of absolute cardiovascular disease risk and blood pressure level to guide such treatment is more efficient and cost effective at reducing risk of cardiovascular disease than is use of blood pressure level alone. Many patients started on a single agent will subsequently require ≥2 drugs from different pharmacological classes to reach their blood pressure goals. Knowledge of the pharmacological mechanisms of action of each agent is important. Drug regimens with complementary activity, where a second antihypertensive agent is used to block compensatory responses to the initial agent or affect a different pressor mechanism, can result in additive lowering of blood pressure. For example, thiazide diuretics may stimulate the renin-angiotensin-aldosterone system. By adding an ACE inhibitor or ARB to the thiazide, an additive blood pressure lowering effect may be obtained. Use of combination therapy may also improve adherence. Several 2- and 3-fixed-dose drug combinations of antihypertensive drug therapy are available, with complementary mechanisms of action among the components.

[0699] Table 18 from Whelton et al. 2017 listing oral antihypertensive drugs is provided below. Classes of therapeutic agents for the treatment of high blood pressure and drugs that fall within those classes are provided. Dose ranges, frequencies, and comments are also provided.

| | | | | |
|---|---|---|---|---|
| | | Usual Dose, | | |
| | | Range | Daily | |
| Class | Drug | (mg/d)* | Frequency | Comments |

Primary agents

| | | | | |
|---|---|---|---|---|
| Thiazide or | Chlorthalidone | 12.5-25 | 1 | Chlorthalidone is |
| thiazide-type | Hydrochlorothiazide | 25-50 | 1 | preferred on the basis of |
| diuretics | Indapamide | 1.25-2.5 | 1 | prolonged half-life and proven |
| | Metolazone | 2.5-10 | 1 | trial reduction of CVD. |
| | | | | Monitor for |
| | | | | hyponatremia and |
| | | | | hypokalemia, uric acid and |
| | | | | calcium levels. |
| | | | | Use with caution in |
| | | | | patients with history of acute |
| | | | | gout unless patient is on uric |
| | | | | acid-lowering therapy. |
| ACE inhibitors | Benazepril | 10-40 | 1 or 2 | Do not use in |
| | Captopril | 12.5-150 | 2 or 3 | combination with ARBs or |
| | Enalapril | 5-40 | 1 or 2 | direct renin inhibitor |
| | Fosinopril | 10-40 | 1 | There is an increased |
| | Lisinopril | 10-40 | 1 | risk of hyperkalemia, |
| | Moexipril | 7.5-30 | 1 or 2 | especially in patents with CKD |
| | Perindopril | 4-16 | 1 | or in those on K⁺ supplements |
| | Quinapril | 10-80 | 1 or 2 | or K⁺ -sparing drugs. |
| | Ramipril | 2.5-10 | 1 or 2 | There is a risk of acute |
| | Trandolapril | 1-4 | 1 | renal failure in patients with |
| | | | | severe bilateral renal artery |
| | | | | stenosis. |
| | | | | Do no use if patient |
| | | | | has history of angioedema |
| | | | | with ACE inhibitors. |
| | | | | Avoid in pregnancy. |
| ARBs | Azilsartan | 40-80 | 1 | Do not use in |
| | Candesartan | 8-32 | 1 | combination with ACE |
| | Eprosartan | 600-800 | 1 or 2 | inhibitors or direct renin |
| | Irbesartan | 150-300 | 1 | inhibitors. |
| | Losartan | 50-100 | 1 or 2 | There is an increased |
| | Olmesartan | 20-40 | 1 | risk of hyperkalemia in CKD or |
| | Telmisartan | 20-80 | 1 | in those on K⁺ supplements or |
| | Valsartan | 80-320 | 1 | K⁺-sparing drugs. |
| | | | | There is a risk of acute |
| | | | | renal failure in patients with |
| | | | | severe bilateral renal artery |
| | | | | stenosis. |
| | | | | Do not use if patient |
| | | | | has history of angioedema with |
| | | | | ARBs. Patients with a history |
| | | | | of angioedema with an ACE |
| | | | | inhibitor can receive an ARB |
| | | | | beginning 6 weeks after ACE |
| | | | | inhibitor is discontinued. |
| | | | | Avoid in pregnancy. |
| CCB- | Amlodipine | 2.5-10 | 1 | Avoid use in patients |
| dihydropyridines | Felodipine | 5-10 | 1 | with HFrEF; amlodipine or |
| | Isradipine | 5-10 | 2 | felodipine may be used if |
| | Nicardipine SR | 5-20 | 1 | required |
| | Nifedipine LA | 60-120 | 1 | They are associated |
| | Nisoldipine | 30-90 | 1 | with dose-related pedal edema, |
| | | | | which is more common in |
| | | | | women than men. |
| CCB- | Diltiazem SR | 180-360 | 2 | Avoid routine use with |
| nondihydropyridines | Diltiazem ER | 120-480 | 1 | beta blockers because of |
| | Verapamil IR | 40-80 | 3 | increased risk of bradycardia |
| | Verapamil SR | 120-480 | 1 or 2 | and heart block. |
| | Verapamil-delayed | 100-480 | 1 (in the | Do not use in patients |
| | onset ER (various | | evening) | with HFrEF. |
| | forms) | | | There are drug |
| | | | | interactions with diltiazem and |
| | | | | verapamil (CYP3A4 major |
| | | | | substrate and moderate |
| | | | | inhibitor). |

Secondary agents

| | | | | |
|---|---|---|---|---|
| Diuretics-loop | Bumetanide | 0.5-4 | 2 | There are preferred |
| | Furosemide | 20-80 | 2 | diuretics in patients with |
| | Torsemide | 5-10 | 1 | symptomatic HF. They are |
| | | | | preferred over thiazides in |
| | | | | patients with moderate-to- |
| | | | | severe CKD (e.g., GFR <30 |
| | | | | mL/min). |
| Diuretics-potassium | Amiloride | 5-10 | 1 or 2 | These are monotherapy agents |
| sparing | Triamterene | 50-100 | 1 or 2 | and minimally effective |
| | | | | antihypertensive agents. |
| | | | | Combination therapy of |
| | | | | potassium-sparing diuretic |
| | | | | with a thiazide can be |
| | | | | considered in patients with |
| | | | | hypokalemia on thiazide |
| | | | | monotherapy. |
| | | | | Avoid in patients with |
| | | | | significate CKD (e.g. GFR <45 |
| | | | | mL/min). |
| Diuretics- | Eplerenone | 50-100 | 12 | These are preferred |
| aldosterone | Spironolactone | 25-100 | 1 | agents in primary aldosteronism |
| antagonists | | | | and resistant hypertension. |
| | | | | Spironolactone is |
| | | | | associated with greater risk of |
| | | | | gynecomastia and impotence as |
| | | | | compared with eplerenone. |
| | | | | This is common add- |
| | | | | on therapy in resistant |
| | | | | hypertension. |
| | | | | Avoid use with K⁺ |
| | | | | supplements, other K⁺-sparing |
| | | | | diuretics, or significant renal |
| | | | | dysfunction. |
| | | | | Eplerenone often |
| | | | | requires twice-daily dosing for |
| | | | | adequate BP lowering. |
| Beta blockers- | Atenolol | 25-100 | 12 | Beta blockers are not |
| cardioselective | Betaxolol | 5-20 | 1 | recommended as first-line |
| | Bisoprolol | 2.5-10 | 1 | agents unless the patient has |
| | Metoprolol tartrate | 100-400 | 2 | IHD or HF. |
| | Metoprolol | 50-200 | 1 | These are preferred in |
| | succinate | | | patients with bronchospastic |
| | | | | airway disease requiring a beta |
| | | | | blocker. |
| | | | | Bisoprolol and metoprolol |
| | | | | succinate are preferred in |
| | | | | patients with HFrEF. |
| | | | | Avoid abrupt cessation. |
| Beta blockers- | Nebivolol | 5-40 | 1 | Nebivolol induces |
| cardioselective and | | | | nitric oxide-inducesd |
| vasodilatory | | | | vasodilation. |
| | | | | Avoid abrupt cessation. |
| Beta blockers- | Nadolol | 40-120 | 1 | Avoid in patients with |
| noncardioselective | Propranolol IR | 160-480 | 2 | reactive airways disease. |
| | Propranolol LA | 80-320 | 1 | Avoid abrupt cessation. |
| Beta blockers- | Acebutolol | 200-800 | 2 | Generally avoid, especially in |
| intrinsic | Carteolol | 2.5-10 | 1 | patients with IHD or HF. |
| sympathomimetic | Penbutolol | 10-40 | 1 | Avoid abrupt cessation. |
| activity | Pindolol | 10-60 | 2 | |
| Beta blockers- | Carvedilol | 12.5-50 | 2 | Carvedilol is preferred |
| combined alpha-and | Carvedilol | 20-80 | 1 | in patients with HFrEF. |
| beta receptor | phosphate | | | Avoid abrupt cessation. |
| | Labetalol | 200-800 | 2 | |
| Direct renin | Aliskiren | 150-300 | 1 | Do not use in combination with |
| inhibitor | | | | ACE inhibitors or ARBs. |
| | | | | Aliskiren is very long acting. |
| | | | | There is an increased |
| | | | | risk of hyperkalemina in CKD |
| | | | | or in those on K⁺ supplements |
| | | | | or K⁺-sparing drugs. |
| | | | | Aliskiren may cause |
| | | | | acute renal failure in patients |
| | | | | with severe bilateral renal |
| | | | | artery stenosis. |
| | | | | Avoid in pregnancy. |
| Alpha-1-blockers | Doxazosin | 1-8 | 1 | These are associated |
| | Prazosin | 2-20 | 2 or 3 | with orthostatic hypotension, |
| | Terazosin | 1-20 | 1 or 2 | especially in older adults. |
| | | | | They may be considered as |
| | | | | second-line agent in patients |
| | | | | with concomitant BPH. |
| Central alpha₁- | Clonidine oral | 0.1-0.8 | 2 | These are generally |
| agonist and other | Clonidine patch | 0.1-0.3 | 1 weekly | reserved as last-line because of |
| centrally acting | Methyldopa | 250-1000 | 2 | significant CNS adverse effects, |
| drugs | Guanfacine | 0.5-2 | 1 | especially in older adults. |
| | | | | Avoid abrupt discontinuation of |
| | | | | clonidine, which may induce |
| | | | | hypertensive crisis; clonidine |
| | | | | must be tapered to avoid rebound |
| | | | | hypertension. |
| Direct vasodilators | Hydralazine | 250-200 | 2 or 3 | These are associated with sodium |
| | Minoxidil | 5-100 | 1-3 | and water retention and reflex |
| | | | | tachycardia; use with a diuretic |
| | | | | and beta blocker. |
| | | | | Hydralazine is associated with |
| | | | | drug-induced lupus-like syndrome |
| | | | | at higher doses. |
| | | | | Minoxidil is associated with |
| | | | | hirsutism and required a loop |
| | | | | diurestic. Minoxidil can induce |
| | | | | pericardial effusion. |

*Dosages may vary from those listed in the FDA approved labeling (available at https://dailymed.nlm.nih.gov/dailymed/). ACE indicates angiotensin-converting enzyme; ARB, angiotensin receptor blocker; BP, blood pressure; BPH, benign prostatic hyperplasia; CCB, calcium channel blocker; CKD, chronic kidney disease; CNS, central nervous system; CVD, cardiovascular disease; ER, extended release; GFR, glomerular filtration rate; HF, heart failure; HFrEF, heart failure with reduced ejection fraction; IHD, ischemic heart disease; IR, immediate release; LA, long-acting; and SR, sustained release. From, Chobanian et al. (2003) The JNC 7 Report. JAMA 289(19): 2560.

### VIII. Kits

[0700] In certain aspects, the instant disclosure provides kits that include a suitable container containing a pharmaceutical formulation of a siRNA compound, e.g., a double-stranded siRNA compound, or siRNA compound, (e.g., a precursor, e.g., a larger siRNA compound which can be processed into a siRNA compound, or a DNA which encodes an siRNA compound, e.g., a double-stranded siRNA compound, or ssiRNA compound, or precursor thereof).

[0701] Such kits include one or more dsRNA agent(s) and instructions for use, e.g., instructions for administering a prophylactically or therapeutically effective amount of a dsRNA agent(s). The dsRNA agent may be in a vial or a pre-filled syringe. The kits may optionally further comprise means for administering the dsRNA agent (e.g., an injection device, such as a pre-filled syringe), or means for measuring the inhibition of AGT (e.g., means for measuring the inhibition of AGT mRNA, AGT protein, and/or AGT activity). Such means for measuring the inhibition of AGT may comprise a means for obtaining a sample from a subject, such as, e.g., a plasma sample. The kits of the invention may optionally further comprise means for determining the therapeutically effective or prophylactically effective amount.

[0702] In certain embodiments the individual components of the pharmaceutical formulation may be provided in one container, e.g., a vial or a pre-filled syringe. Alternatively, it may be desirable to provide the components of the pharmaceutical formulation separately in two or more containers, e.g., one container for a siRNA compound preparation, and at least another for a carrier compound. The kit may be packaged in a number of different configurations such as one or more containers in a single box. The different components can be combined, e.g., according to instructions provided with the kit. The components can be combined according to a method described herein, e.g., to prepare and administer a pharmaceutical composition. The kit can also include a delivery device.

[0703] This invention is further illustrated by the following examples which should not be construed as limiting. The entire contents of all references, patents and published patent applications cited throughout this application, as well as the informal Sequence Listing and Figures, are hereby incorporated herein by reference.

### EXAMPLES

### Example 1. IRNA Synthesis

### Source of Reagents

[0704] Where the source of a reagent is not specifically given herein, such reagent can be obtained from any supplier of reagents for molecular biology at a quality/purity standard for application in molecular biology.

siRNA Design

[0705] siRNAs targeting the human angiotensinogen (AGT) gene (human: GenBank NM_001384479.1 or NM_000029.3, NCBI GeneID: 183) were designed using custom R and Python scripts. The human NM_001384479.1 REFSEQ mRNA, has a length of 2116 bases and the human NM_000029.3 REFSEQ mRNA, has a length of 2587 bases.

[0706] Detailed lists of the unmodified AGT sense and antisense strand nucleotide sequences are shown in Tables 2 and 4. Detailed lists of the modified AGT sense and antisense strand nucleotide sequences are shown in Tables 3 and 5.

[0707] It is to be understood that, throughout the application, a duplex name without a decimal is equivalent to a duplex name with a decimal which merely references the batch number of the duplex. For example, AD-959917 is equivalent to AD-959917.1.

siRNA Synthesis

[0708] siRNAs were designed, synthesized, and prepared using methods known in the art.

[0709] Briefly, siRNA sequences were synthesized on a 1 μmol scale using a Mermade 192 synthesizer (BioAutomation) with phosphoramidite chemistry on solid supports. The solid support was controlled pore glass (500-1000 Å) loaded with a custom GalNAc ligand (3′-GalNAc conjugates), universal solid support (AM Chemicals), or the first nucleotide of interest. Ancillary synthesis reagents and standard 2-cyanoethyl phosphoramidite monomers (2′-deoxy-2′-fluoro, 2′-O-methyl, RNA, DNA) were obtained from Thermo-Fisher (Milwaukee, WI), Hongene (China), or Chemgenes (Wilmington, MA, USA). Additional phosphoramidite monomers were procured from commercial suppliers, prepared in-house, or procured using custom synthesis from various CMOs. Phosphoramidites were prepared at a concentration of 100 mM in either acetonitrile or 9:1 acetonitrile: DMF and were coupled using 5-Ethylthio-1H-tetrazole (ETT, 0.25 M in acetonitrile) with a reaction time of 400 s. Phosphorothioate linkages were generated using a 100 mM solution of 3-((Dimethylamino-methylidene)amino)-3H-1,2,4-dithiazole-3-thione (DDTT, obtained from Chemgenes (Wilmington, MA, USA)) in anhydrous acetonitrile/pyridine (9:1 v/v). Oxidation time was 5 minutes. All sequences were synthesized with final removal of the DMT group (“DMT-Off”).

[0710] Upon completion of the solid phase synthesis, solid-supported oligoribonucleotides were treated with 300 μL of Methylamine (40% aqueous) at room temperature in 96 well plates for approximately 2 hours to afford cleavage from the solid support and subsequent removal of all additional base-labile protecting groups. For sequences containing any natural ribonucleotide linkages (2′-OH) protected with a tert-butyl dimethyl silyl (TBDMS) group, a second deprotection step was performed using TEA.3HF (triethylamine trihydrofluoride). To each oligonucleotide solution in aqueous methylamine was added 200 μL of dimethyl sulfoxide (DMSO) and 300 μL TEA.3HF and the solution was incubated for approximately 30 mins at 60° C. After incubation, the plate was allowed to come to room temperature and crude oligonucleotides were precipitated by the addition of 1 mL of 9:1 acetontrile: ethanol or 1:1 ethanol: isopropanol. The plates were then centrifuged at 4° C. for 45 mins and the supernatant carefully decanted with the aid of a multichannel pipette. The oligonucleotide pellet was resuspended in 20 mM NaOAc and subsequently desalted using a HiTrap size exclusion column (5 mL, GE Healthcare) on an Agilent LC system equipped with an autosampler, UV detector, conductivity meter, and fraction collector. Desalted samples were collected in 96 well plates and then analyzed by LC-MS and UV spectrometry to confirm identity and quantify the amount of material, respectively.

[0711] Duplexing of single strands was performed on a Tecan liquid handling robot. Sense and antisense single strands were combined in an equimolar ratio to a final concentration of 10 UM in 1x PBS in 96 well plates, the plate sealed, incubated at 100° C. for 10 minutes, and subsequently allowed to return slowly to room temperature over a period of 2-3 hours. The concentration and identity of each duplex was confirmed and then subsequently utilized for in vitro screening assays.

### Example 2. In Vitro Screening Methods

[0712] Cell culture and 384-well transfections Hep3b cells (ATCC, Manassas, VA) are grown to near confluence at 37° C. in an atmosphere of 5% CO₂ in Eagle's Minimum Essential Medium (Gibco) supplemented with 10% FBS (ATCC) before being released from the plate by trypsinization. Transfection is carried out by adding 7.5 μl of Opti-MEM plus 0.1 μl of Lipofectamine RNAiMax per well (Invitrogen, Carlsbad CA. cat #13778-150) to 2.5 μl of each siRNA duplex to an individual well in a 384-well plate. The mixture is then incubated at room temperature for 15 minutes. Forty μl of complete growth media without antibiotic containing ˜1.5×10⁴ cells are then added to the siRNA mixture. Cells are incubated for 24 hours prior to RNA purification. Single dose experiments are performed at 10 nM, 1 nM, and 0.1 nM final duplex concentration.

Total RNA Isolation Using DYNABEADS mRNA Isolation Kit (Invitrogen™, Part #: 610-12)

[0713] Cells are lysed in 75 μl of Lysis/Binding Buffer containing 3 μL of beads per well and mixed for 10 minutes on an electrostatic shaker. The washing steps are automated on a Biotek EL406, using a magnetic plate support. Beads are washed (in 90 μL) once in Buffer A, once in Buffer B, and twice in Buffer E, with aspiration steps in between. Following a final aspiration, complete 10 μL RT mixture is added to each well, as described below.

cDNA Synthesis Using ABI High Capacity cDNA Reverse Transcription Kit (Applied Biosystems, Foster City, CA, Cat #4368813)

[0714] A master mix of 1 μl 10× Buffer, 0.4 μl 25× dNTPs, 1 μl Random primers, 0.5 μl Reverse Transcriptase, 0.5 μl RNase inhibitor and 6.6 μl of H₂O per reaction are added per well. Plates are sealed, agitated for 10 minutes on an electrostatic shaker, and then incubated at 37 degrees C. for 2 hours. Following this, the plates are agitated at 80 degrees C. for 8 minutes.

### Real Time PCR

[0715] Two microlitre (μl) of cDNA are added to a master mix containing 0.5 μl of human GAPDH TaqMan Probe (4326317E), 0.5 μl human AGT, 2 μl nuclease-free water and 5 μl Lightcycler 480 probe master mix (Roche Cat #04887301001) per well in a 384 well plates (Roche cat #04887301001). Real time PCR is done in a LightCycler480 Real Time PCR system (Roche).

[0716] To calculate relative fold change, data are analyzed using the ΔΔCt method and normalized to assays performed with cells transfected with 10 nM AD-1955, or mock transfected cells. IC₅₀s are calculated using a 4 parameter fit model using XLFit and normalized to cells transfected with AD-1955 or mock-transfected. The sense and antisense sequences of AD-1955 are: sense: cuuAcGcuGAGuAcuucGAdTsdT (SEQ ID NO: 18) and antisense UCGAAGuACUcAGCGuAAGdTsdT (SEQ ID NO: 19).

TABLE 1
Abbreviations of nucleotide monomers used in nucleic acid sequence representation. It will
be understood that these monomers, when present in an oligonucleotide, are mutually linked by 5′-3′-
phosphodiester bonds; and it is understood that when the nucleotide contains a 2′-fluoro modification,
then the fluoro replaces the hydroxy at that position in the parent nucleotide (i.e., it is a 2′-deoxy-2′-
fluoronucleotide).

| Abbreviation | Nucleotide(s) |
|---|---|
| A | Adenosine-3′-phosphate |
| Ab | beta-L-adenosine-3′-phosphate |
| Abs | beta-L-adenosine-3′-phosphorothioate |
| Af | 2′-fluoroadenosine-3′-phosphate |
| Afs | 2′-fluoroadenosine-3′-phosphorothioate |
| As | adenosine-3′-phosphorothioate |
| C | cytidine-3′-phosphate |
| Cb | beta-L-cytidine-3′-phosphate |
| Cbs | beta-L-cytidine-3′-phosphorothioate |
| Cf | 2′-fluorocytidine-3′-phosphate |
| Cfs | 2′-fluorocytidine-3′-phosphorothioate |
| Cs | cytidine-3′-phosphorothioate |
| G | guanosine-3′-phosphate |
| Gb | beta-L-guanosine-3′-phosphate |
| Gbs | beta-L-guanosine-3′-phosphorothioate |
| Gf | 2′-fluoroguanosine-3′-phosphate |
| Gfs | 2′-fluoroguanosine-3′-phosphorothioate |
| Gs | guanosine-3′-phosphorothioate |
| T | 5′-methyluridine-3′-phosphate |
| Tf | 2′-fluoro-5-methyluridine-3′-phosphate |
| Tfs | 2′-fluoro-5-methyluridine-3′-phosphorothioate |
| Ts | 5′-methyluridine-3′-phosphorothioate |
| U | Uridine-3′-phosphate |
| Uf | 2′ -fluorouridine-3′-phosphate |
| Ufs | 2′-fluorouridine-3′-phosphorothioate |
| Us | uridine-3′-phosphorothioate |
| N | any nucleotide, modified or unmodified |
| a | 2′-O-methyladenosine-3′-phosphate |
| as | 2′-O-methyladenosine-3′-phosphorothioate |
| c | 2′-O-methylcytidine-3′-phosphate |
| cs | 2′-O-methylcytidine-3′-phosphorothioate |
| g | 2′-O-methylguanosine-3′-phosphate |
| gs | 2′-O-methylguanosine-3′-phosphorothioate |
| t | 2′-O-methyl-5-methyluridine-3′-phosphate |
| ts | 2′-O-methyl-5-methyluridine-3′-phosphorothioate |
| u | 2′-O-methyluridine-3′-phosphate |
| us | 2′-O-methyluridine-3′-phosphorothioate |
| s | phosphorothioate linkage |
| L10 | [chemical structure] |
| L96 | [chemical structure] |
| Y34 | [chemical structure] |
| Y44 | [chemical structure] |
| (Agn) | Adenosine-glycol nucleic acid (GNA) S-Isomer |
| (Cgn) | Cytidine-glycol nucleic acid (GNA) S-Isomer |
| (Ggn) | Guanosine-glycol nucleic acid (GNA) S-Isomer |
| (Tgn) | Thymidine-glycol nucleic acid (GNA) S-Isomer |
| P | Phosphate |
| VP | Vinyl-phosphonate |
| dA | 2′-deoxyadenosine-3′-phosphate |
| dAs | 2′-deoxyadenosine-3′-phosphorothioate |
| dC | 2′-deoxycytidine-3′-phosphate |
| dCs | 2′-deoxycytidine-3′-phosphorothioate |
| dG | 2′-deoxyguanosine-3′-phosphate |
| dGs | 2′-deoxyguanosine-3′-phosphorothioate |
| dT | 2′-deoxythimidine-3′-phosphate |
| dTs | 2′-deoxythimidine-3′-phosphorothioate |
| dU | 2′-deoxyuridine |
| dUs | 2′-deoxyuridine-3′-phosphorothioate |
| (C2p) | cytidine-2′-phosphate |
| (G2p) | guanosine-2′-phosphate |
| (U2p) | uridine-2′-phosphate |
| (A2p) | adenosine-2′-phosphate |
| (Chd) | 2′-O-hexadecyl-cytidine-3′-phosphate |
| (Ahd) | 2′-O-hexadecyl-adenosine-3′-phosphate |
| (Ghd) | 2′-O-hexadecyl-guanosine-3′-phosphate |
| (Uhd) | 2′-O-hexadecyl-uridine-3′-phosphate |

TABLE 2
Unmodified Sense and Antisense Strand Sequences of Angiotensinogen (AGT) dsRNA Agents

| | | SEQ | | | SEQ | |
|---|---|---|---|---|---|---|
| Duplex | | ID | Range in | | ID | Range in |
| Name | Sense Sequence 5′ to 3′ | NO: | NM_001384479.1 | Antisense Sequence 5′ to 3′ | NO: | NM_001384479.1 |
| AD- | AGAAGCUGCCGUUGUUCUGGU | 20 | 3-23 | ACCAGAACAACGGCAGCUUCUUC | 322 | 1-23 |
| 1632736 | | | | | | |
| AD- | GAAGCUGCCGUUGUUCUGGGU | 21 | 4-24 | ACCCAGAACAACGGCAGCUUCUU | 323 | 2-24 |
| 1632737 | | | | | | |
| AD- | AAGCUGCCGUUGUUCUGGGUU | 22 | 5-25 | AACCCAGAACAACGGCAGCUUCU | 324 | 3-25 |
| 1632738 | | | | | | |
| AD- | CUGCCGUUGUUCUGGGUACUU | 23 | 8-28 | AAGUACCCAGAACAACGGCAGCU | 325 | 6-28 |
| 1632741 | | | | | | |
| AD- | CGUUGUUCUGGGUACUACAGU | 24 | 12-32 | ACUGUAGUACCCAGAACAACGGC | 326 | 10-32 |
| 1632745 | | | | | | |
| AD- | CUGGGUACUACAGCAGAAGGU | 25 | 19-39 | ACCUUCUGCUGUAGUACCCAGAA | 327 | 17-39 |
| 1632752 | | | | | | |
| AD | UACUACAGCAGAAGGGUAUGU | 26 | 24-44 | ACAUACCCUUCUGCUGUAGUACC | 328 | 22-44 |
| 1632757 | | | | | | |
| AD- | ACUACAGCAGAAGGGUAUGCU | 27 | 25-45 | AGCAUACCCUUCUGCUGUAGUAC | 329 | 23-45 |
| 1632758 | | | | | | |
| AD- | CUACAGCAGAAGGGUAUGCGU | 28 | 26-46 | ACGCAUACCCUUCUGCUGUAGUA | 330 | 24-46 |
| 1632759 | | | | | | |
| AD- | UACAGCAGAAGGGUAUGCGGU | 29 | 27-47 | ACCGCAUACCCUUCUGCUGUAGU | 331 | 25-47 |
| 1632760 | | | | | | |
| AD- | ACAGCAGAAGGGUAUGCGGAU | 30 | 28-48 | AUCCGCAUACCCUUCUGCUGUAG | 332 | 26-48 |
| 1632761 | | | | | | |
| AD- | AGCAGAAGGGUAUGCGGAAGU | 31 | 30-50 | ACUUCCGCAUACCCUUCUGCUGU | 333 | 28-50 |
| 1632763 | | | | | | |
| AD- | AUCCACAAUGAGAGUACCUGU | 32 | 173-193 | ACAGGUACUCUCAUUGUGGAUGA | 334 | 171-193 |
| 1632852 | | | | | | |
| AD- | ACAAUGAGAGUACCUGUGAGU | 33 | 177-197 | ACUCACAGGUACUCUCAUUGUGG | 335 | 175-197 |
| 1632856 | | | | | | |
| AD- | UUCAUACCUGCUCCAAUUCAU | 34 | 239-259 | AUGAAUUGGAGCAGGUAUGAAGG | 336 | 237-259 |
| 1632898 | | | | | | |
| AD- | UCAUACCUGCUCCAAUUCAGU | 35 | 240-260 | ACUGAAUUGGAGCAGGUAUGAAG | 337 | 238-260 |
| 1632899 | | | | | | |
| AD- | CAUACCUGCUCCAAUUCAGGU | 36 | 241-261 | ACCUGAAUUGGAGCAGGUAUGAA | 338 | 239-261 |
| 1632900 | | | | | | |
| AD- | UGGAUGAAAAGGCCCUACAGU | 37 | 276-296 | ACUGUAGGGCCUUUUCAUCCACA | 339 | 274-296 |
| 1632915 | | | | | | |
| AD- | GGAUGAAAAGGCCCUACAGGU | 38 | 277-297 | ACCUGUAGGGCCUUUUCAUCCAC | 340 | 275-297 |
| 1632916 | | | | | | |
| AD- | GUGCUAGUCGCUGCAAAACUU | 39 | 305-325 | AAGUUUUGCAGCGACUAGCACCA | 341 | 303-325 |
| 1632944 | | | | | | |
| AD- | UGCUAGUCGCUGCAAAACUUU | 40 | 306-326 | AAAGUUUUGCAGCGACUAGCACC | 342 | 304-326 |
| 1632945 | | | | | | |
| AD- | GCUAGUCGCUGCAAAACUUGU | 41 | 307-327 | ACAAGUUUUGCAGCGACUAGCAC | 343 | 305-327 |
| 1632946 | | | | | | |
| AD- | UGCAAAACUUGACACCGAAGU | 42 | 316-336 | ACUUCGGUGUCAAGUUUUGCAGC | 344 | 314-336 |
| 1632955 | | | | | | |
| AD- | GCAAAACUUGACACCGAAGAU | 43 | 317-337 | AUCUUCGGUGUCAAGUUUUGCAG | 345 | 315-337 |
| 1632956 | | | | | | |
| AD- | UUGACACCGAAGACAAGUUGU | 44 | 324-344 | ACAACUUGUCUUCGGUGUCAAGU | 346 | 322-344 |
| 1632963 | | | | | | |
| AD- | UGACACCGAAGACAAGUUGAU | 45 | 325-345 | AUCAACUUGUCUUCGGUGUCAAG | 347 | 323-345 |
| 1632964 | | | | | | |
| AD- | ACACCGAAGACAAGUUGAGGU | 46 | 327-347 | ACCUCAACUUGUCUUCGGUGUCA | 348 | 325-347 |
| 1632966 | | | | | | |
| AD- | CACCGAAGACAAGUUGAGGGU | 47 | 328-348 | ACCCUCAACUUGUCUUCGGUGUC | 349 | 326-348 |
| 1632967 | | | | | | |
| AD- | AAGUUGAGGGCCGCAAUGGUU | 48 | 338-358 | AACCAUUGCGGCCCUCAACUUGU | 350 | 336-358 |
| 1632977 | | | | | | |
| AD- | GGGAUGCUGGCCAACUUCUUU | 49 | 359-379 | AAAGAAGUUGGCCAGCAUCCCGA | 351 | 357-379 |
| 1632998 | | | | | | |
| AD- | GCUGGCCAACUUCUUGGGCUU | 50 | 364-384 | AAGCCCAAGAAGUUGGCCAGCAU | 352 | 362-384 |
| 1633003 | | | | | | |
| AD- | CAACUUCUUGGGCUUCCGUAU | 51 | 370-390 | AUACGGAAGCCCAAGAAGUUGGC | 353 | 368-390 |
| 1633009 | | | | | | |
| AD- | AACUUCUUGGGCUUCCGUAUU | 52 | 371-391 | AAUACGGAAGCCCAAGAAGUUGG | 354 | 369-391 |
| 1633010 | | | | | | |
| AD- | ACUUCUUGGGCUUCCGUAUAU | 53 | 372-392 | AUAUACGGAAGCCCAAGAAGUUG | 355 | 370-392 |
| 1633011 | | | | | | |
| AD- | UCUUGGGCUUCCGUAUAUAUU | 54 | 375-395 | AAUAUAUACGGAAGCCCAAGAAG | 356 | 373-395 |
| 1633014 | | | | | | |
| AD- | UUGGGCUUCCGUAUAUAUGGU | 55 | 377-397 | ACCAUAUAUACGGAAGCCCAAGA | 357 | 375-397 |
| 1633016 | | | | | | |
| AD- | UAUAUGGCAUGCACAGUGAGU | 56 | 390-410 | ACUCACUGUGCAUGCCAUAUAUA | 358 | 388-410 |
| 1633029 | | | | | | |
| AD- | GCAUGCACAGUGAGCUAUGGU | 57 | 396-416 | ACCAUAGCUCACUGUGCAUGCCA | 359 | 394-416 |
| 1633034 | | | | | | |
| AD- | CUCUAUCUGGGAGCCUUGGAU | 58 | 476-496 | AUCCAAGGCUCCCAGAUAGAGAG | 360 | 474-496 |
| 1633064 | | | | | | |
| AD- | GACAGGCUACAGGCAAUCCUU | 59 | 506-526 | AAGGAUUGCCUGUAGCCUGUCAG | 361 | 504-526 |
| 1633094 | | | | | | |
| AD- | ACAGGCUACAGGCAAUCCUGU | 60 | 507-527 | ACAGGAUUGCCUGUAGCCUGUCA | 362 | 505-527 |
| 1633095 | | | | | | |
| AD- | UACAGGCAAUCCUGGGUGUUU | 61 | 513-533 | AAACACCCAGGAUUGCCUGUAGC | 363 | 511-533 |
| 1633101 | | | | | | |
| AD- | ACAGGCAAUCCUGGGUGUUCU | 62 | 514-534 | AGAACACCCAGGAUUGCCUGUAG | 364 | 512-534 |
| 1633102 | | | | | | |
| AD- | GGCAAUCCUGGGUGUUCCUUU | 63 | 517-537 | AAAGGAACACCCAGGAUUGCCUG | 365 | 515-537 |
| 1633105 | | | | | | |
| AD- | GCAAUCCUGGGUGUUCCUUGU | 64 | 518-538 | ACAAGGAACACCCAGGAUUGCCU | 366 | 516-538 |
| 1633106 | | | | | | |
| AD- | AAUCCUGGGUGUUCCUUGGAU | 65 | 520-540 | AUCCAAGGAACACCCAGGAUUGC | 367 | 518-540 |
| 1633108 | | | | | | |
| AD- | UCCUGGGUGUUCCUUGGAAGU | 66 | 522-542 | ACUUCCAAGGAACACCCAGGAUU | 368 | 520-542 |
| 1633110 | | | | | | |
| AD- | CCUUGGAAGGACAAGAACUGU | 67 | 533-553 | ACAGUUCUUGUCCUUCCAAGGAA | 369 | 531-553 |
| 1633121 | | | | | | |
| AD- | CACCUGAAGCAGCCGUUUGUU | 68 | 692-712 | AACAAACGGCUGCUUCAGGUGCA | 370 | 690-712 |
| 1633254 | | | | | | |
| AD- | CUCUGGACUUCACAGAACUGU | 69 | 753-773 | ACAGUUCUGUGAAGUCCAGAGAG | 371 | 751-773 |
| 1633295 | | | | | | |
| AD- | UCUGGACUUCACAGAACUGGU | 70 | 754-774 | ACCAGUUCUGUGAAGUCCAGAGA | 372 | 752-774 |
| 1633296 | | | | | | |
| AD- | GGACUUCACAGAACUGGAUGU | 71 | 757-777 | ACAUCCAGUUCUGUGAAGUCCAG | 373 | 755-777 |
| 1633299 | | | | | | |
| AD- | ACUUCACAGAACUGGAUGUUU | 72 | 759-779 | AAACAUCCAGUUCUGUGAAGUCC | 374 | 757-779 |
| 1633301 | | | | | | |
| AD- | CUUCACAGAACUGGAUGUUGU | 73 | 760-780 | ACAACAUCCAGUUCUGUGAAGUC | 375 | 758-780 |
| 1633302 | | | | | | |
| AD | CACAGAACUGGAUGUUGCUGU | 74 | 763-783 | ACAGCAACAUCCAGUUCUGUGAA | 376 | 761-783 |
| 1633305 | | | | | | |
| AD- | ACAGAACUGGAUGUUGCUGCU | 75 | 764-784 | AGCAGCAACAUCCAGUUCUGUGA | 377 | 762-784 |
| 1633306 | | | | | | |
| AD- | UGUUGCUGCUGAGAAGAUUGU | 76 | 775-795 | ACAAUCUUCUCAGCAGCAACAUC | 378 | 773-795 |
| 1633317 | | | | | | |
| AD- | UUGCUGCUGAGAAGAUUGACU | 77 | 777-797 | AGUCAAUCUUCUCAGCAGCAACA | 379 | 775-797 |
| 1633319 | | | | | | |
| AD | GCUGCUGAGAAGAUUGACAGU | 78 | 779-799 | ACUGUCAAUCUUCUCAGCAGCAA | 380 | 777-799 |
| 1633321 | | | | | | |
| AD- | ACAGGUUCAUGCAGGCUGUGU | 79 | 795-815 | ACACAGCCUGCAUGAACCUGUCA | 381 | 793-815 |
| 1633335 | | | | | | |
| AD- | AUGCAGGCUGUGACAGGAUGU | 80 | 803-823 | ACAUCCUGUCACAGCCUGCAUGA | 382 | 801-823 |
| 1633343 | | | | | | |
| AD- | GCAGGCUGUGACAGGAUGGAU | 81 | 805-825 | AUCCAUCCUGUCACAGCCUGCAU | 383 | 803-825 |
| 1633345 | | | | | | |
| AD- | GACAGCACCCUGGCUUUCAAU | 82 | 857-877 | AUUGAAAGCCAGGGUGCUGUCCA | 384 | 855-877 |
| 1633397 | | | | | | |
| AD- | CUGGCUUUCAACACCUACGUU | 83 | 866-886 | AACGUAGGUGUUGAAAGCCAGGG | 385 | 864-886 |
| 1633406 | | | | | | |
| AD- | GCUUUCAACACCUACGUCCAU | 84 | 869-889 | AUGGACGUAGGUGUUGAAAGCCA | 386 | 867-889 |
| 1633409 | | | | | | |
| AD- | CACCUACGUCCACUUCCAAGU | 85 | 877-897 | ACUUGGAAGUGGACGUAGGUGUU | 387 | 875-897 |
| 1633417 | | | | | | |
| AD- | UCCACUUCCAAGGGAAGAUGU | 86 | 885-905 | ACAUCUUCCCUUGGAAGUGGACG | 388 | 883-905 |
| 1633425 | | | | | | |
| AD- | ACUUCCAAGGGAAGAUGAAGU | 87 | 888-908 | ACUUCAUCUUCCCUUGGAAGUGG | 389 | 886-908 |
| 1633428 | | | | | | |
| AD- | CUUCCAAGGGAAGAUGAAGGU | 88 | 889-909 | ACCUUCAUCUUCCCUUGGAAGUG | 390 | 887-909 |
| 1633429 | | | | | | |
| AD- | UCCAAGGGAAGAUGAAGGGCU | 89 | 891-911 | AGCCCUUCAUCUUCCCUUGGAAG | 391 | 889-911 |
| 1633431 | | | | | | |
| AD- | AGAUGAAGGGCUUCUCCCUGU | 90 | 900-920 | ACAGGGAGAAGCCCUUCAUCUUC | 392 | 898-920 |
| 1633440 | | | | | | |
| AD- | GGACAACAGCACCUCAGUGUU | 91 | 946-966 | AACACUGAGGUGCUGUUGUCCAC | 393 | 944-966 |
| 1633464 | | | | | | |
| AD- | GACAACAGCACCUCAGUGUCU | 92 | 947-967 | AGACACUGAGGUGCUGUUGUCCA | 394 | 945-967 |
| 1633465 | | | | | | |
| AD- | CAACAGCACCUCAGUGUCUGU | 93 | 949-969 | ACAGACACUGAGGUGCUGUUGUC | 395 | 947-969 |
| 1633467 | | | | | | |
| AD- | ACCUCAGUGUCUGUUCCCAUU | 94 | 956-976 | AAUGGGAACAGACACUGAGGUGC | 396 | 954-976 |
| 1633474 | | | | | | |
| AD- | CAGUGUCUGUUCCCAUGCUCU | 95 | 960-980 | AGAGCAUGGGAACAGACACUGAG | 397 | 958-980 |
| 1633478 | | | | | | |
| AD- | GUCUGUUCCCAUGCUCUCUGU | 96 | 964-984 | ACAGAGAGCAUGGGAACAGACAC | 398 | 962-984 |
| 1633482 | | | | | | |
| AD- | UCUGUUCCCAUGCUCUCUGGU | 97 | 965-985 | ACCAGAGAGCAUGGGAACAGACA | 399 | 963-985 |
| 1633483 | | | | | | |
| AD- | GACAUCCAGGACAACUUCUCU | 98 | 1010-1030 | AGAGAAGUUGUCCUGGAUGUCAC | 400 | 1008-1030 |
| 1633528 | | | | | | |
| AD- | ACAUCCAGGACAACUUCUCGU | 99 | 1011-1031 | ACGAGAAGUUGUCCUGGAUGUCA | 401 | 1009-1031 |
| 1633529 | | | | | | |
| AD- | CAUCCAGGACAACUUCUCGGU | 100 | 1012-1032 | ACCGAGAAGUUGUCCUGGAUGUC | 402 | 1010-1032 |
| 1633530 | | | | | | |
| AD- | AUCCAGGACAACUUCUCGGUU | 101 | 1013-1033 | AACCGAGAAGUUGUCCUGGAUGU | 403 | 1011-1033 |
| 1633531 | | | | | | |
| AD- | UCCAGGACAACUUCUCGGUGU | 102 | 1014-1034 | ACACCGAGAAGUUGUCCUGGAUG | 404 | 1012-1034 |
| 1633532 | | | | | | |
| AD- | CCAGGACAACUUCUCGGUGAU | 103 | 1015-1035 | AUCACCGAGAAGUUGUCCUGGAU | 405 | 1013-1035 |
| 1633533 | | | | | | |
| AD- | CAGGACAACUUCUCGGUGACU | 104 | 1016-1036 | AGUCACCGAGAAGUUGUCCUGGA | 406 | 1014-1036 |
| 1633534 | | | | | | |
| AD- | ACUUCUCGGUGACUCAAGUGU | 105 | 1023-1043 | ACACUUGAGUCACCGAGAAGUUG | 407 | 1021-1043 |
| 1633541 | | | | | | |
| AD- | CUUCUCGGUGACUCAAGUGCU | 106 | 1024-1044 | AGCACUUGAGUCACCGAGAAGUU | 408 | 1022-1044 |
| 1633542 | | | | | | |
| AD- | GACUCAAGUGCCCUUCACUGU | 107 | 1033-1053 | ACAGUGAAGGGCACUUGAGUCAC | 409 | 1031-1053 |
| 1633551 | | | | | | |
| AD- | CUCAAGUGCCCUUCACUGAGU | 108 | 1035-1055 | ACUCAGUGAAGGGCACUUGAGUC | 410 | 1033-1055 |
| 1633553 | | | | | | |
| AD- | GCUGAUCCAGCCUCACUAUGU | 109 | 1069-1089 | ACAUAGUGAGGCUGGAUCAGCAG | 411 | 1067-1089 |
| 1633587 | | | | | | |
| AD- | GUGGAGGGUCUCACUUUCCAU | 110 | 1106-1126 | AUGGAAAGUGAGACCCUCCACCU | 412 | 1104-1126 |
| 1633624 | | | | | | |
| AD- | CUCACUUUCCAGCAAAACUCU | 111 | 1115-1135 | AGAGUUUUGCUGGAAAGUGAGAC | 413 | 1113-1135 |
| 1633633 | | | | | | |
| AD- | CAGCAAAACUCCCUCAACUGU | 112 | 1124-1144 | ACAGUUGAGGGAGUUUUGCUGGA | 414 | 1122-1144 |
| 1633642 | | | | | | |
| AD- | AGCAAAACUCCCUCAACUGGU | 113 | 1125-1145 | ACCAGUUGAGGGAGUUUUGCUGG | 415 | 1123-1145 |
| 1633643 | | | | | | |
| AD- | AAAACUCCCUCAACUGGAUGU | 114 | 1128-1148 | ACAUCCAGUUGAGGGAGUUUUGC | 416 | 1126-1148 |
| 1633646 | | | | | | |
| AD- | ACUCCCUCAACUGGAUGAAGU | 115 | 1131-1151 | ACUUCAUCCAGUUGAGGGAGUUU | 417 | 1129-1151 |
| 1633649 | | | | | | |
| AD- | CUGGAUGAAGAAACUAUCUCU | 116 | 1141-1161 | AGAGAUAGUUUCUUCAUCCAGUU | 418 | 1139-1161 |
| 1633658 | | | | | | |
| AD- | ACUGGUGCUGCAAGGAUCUUU | 117 | 1189-1209 | AAAGAUCCUUGCAGCACCAGUUG | 419 | 1187-1209 |
| 1633666 | | | | | | |
| AD- | GGUGCUGCAAGGAUCUUAUGU | 118 | 1192-1212 | ACAUAAGAUCCUUGCAGCACCAG | 420 | 1190-1212 |
| 1633669 | | | | | | |
| AD- | GUGCUGCAAGGAUCUUAUGAU | 119 | 1193-1213 | AUCAUAAGAUCCUUGCAGCACCA | 421 | 1191-1213 |
| 1633670 | | | | | | |
| AD- | UGCUGCAAGGAUCUUAUGACU | 120 | 1194-1214 | AGUCAUAAGAUCCUUGCAGCACC | 422 | 1192-1214 |
| 1633671 | | | | | | |
| AD- | CUUAUGACCUGCAGGACCUGU | 121 | 1206-1226 | ACAGGUCCUGCAGGUCAUAAGAU | 423 | 1204-1226 |
| 1633683 | | | | | | |
| AD- | CGAGCUGAACCUGCAAAAAUU | 122 | 1261-1281 | AAUUUUUGCAGGUUCAGCUCGGU | 424 | 1259-1281 |
| 1633732 | | | | | | |
| AD- | GAGCUGAACCUGCAAAAAUUU | 123 | 1262-1282 | AAAUUUUUGCAGGUUCAGCUCGG | 425 | 1260-1282 |
| 1633733 | | | | | | |
| AD- | AGCUGAACCUGCAAAAAUUGU | 124 | 1263-1283 | ACAAUUUUUGCAGGUUCAGCUCG | 426 | 1261-1283 |
| 1633734 | | | | | | |
| AD- | GCUGAACCUGCAAAAAUUGAU | 125 | 1264-1284 | AUCAAUUUUUGCAGGUUCAGCUC | 427 | 1262-1284 |
| 1633735 | | | | | | |
| AD- | CUGAACCUGCAAAAAUUGAGU | 126 | 1265-1285 | ACUCAAUUUUUGCAGGUUCAGCU | 428 | 1263-1285 |
| 1633736 | | | | | | |
| AD- | UGAACCUGCAAAAAUUGAGCU | 127 | 1266-1286 | AGCUCAAUUUUUGCAGGUUCAGC | 429 | 1264-1286 |
| 1633737 | | | | | | |
| AD- | UGCAAAAAUUGAGCAAUGACU | 128 | 1272-1292 | AGUCAUUGCUCAAUUUUUGCAGG | 430 | 1270-1292 |
| 1633743 | | | | | | |
| AD- | CAAAAAUUGAGCAAUGACCGU | 129 | 1274-1294 | ACGGUCAUUGCUCAAUUUUUGCA | 431 | 1272-1294 |
| 1633745 | | | | | | |
| AD- | UUGAGCAAUGACCGCAUCAGU | 130 | 1280-1300 | ACUGAUGCGGUCAUUGCUCAAUU | 432 | 1278-1300 |
| 1633751 | | | | | | |
| AD- | UGAGCAAUGACCGCAUCAGGU | 131 | 1281-1301 | ACCUGAUGCGGUCAUUGCUCAAU | 433 | 1279-1301 |
| 1633752 | | | | | | |
| AD- | AGCAAUGACCGCAUCAGGGUU | 132 | 1283-1303 | AACCCUGAUGCGGUCAUUGCUCA | 434 | 1281-1303 |
| 1633754 | | | | | | |
| AD- | GAGGUGCUGAACAGCAUUUUU | 133 | 1307-1327 | AAAAAUGCUGUUCAGCACCUCCC | 435 | 1305-1327 |
| 1633759 | | | | | | |
| AD- | UUGAGCUUGAAGCGGAUGAGU | 134 | 1329-1349 | ACUCAUCCGCUUCAAGCUCAAAA | 436 | 1327-1349 |
| 1633761 | | | | | | |
| AD- | GUCUACCCAACAGCUUAACAU | 135 | 1363-1383 | AUGUUAAGCUGUUGGGUAGACUC | 437 | 1361-1383 |
| 1633795 | | | | | | |
| AD- | UCUACCCAACAGCUUAACAAU | 136 | 1364-1384 | AUUGUUAAGCUGUUGGGUAGACU | 438 | 1362-1384 |
| 1633796 | | | | | | |
| AD- | CUACCCAACAGCUUAACAAGU | 137 | 1365-1385 | ACUUGUUAAGCUGUUGGGUAGAC | 439 | 1363-1385 |
| 1633797 | | | | | | |
| AD- | CCAACAGCUUAACAAGCCUGU | 138 | 1369-1389 | ACAGGCUUGUUAAGCUGUUGGGU | 440 | 1367-1389 |
| 1633801 | | | | | | |
| AD- | ACAGCUUAACAAGCCUGAGGU | 139 | 1372-1392 | ACCUCAGGCUUGUUAAGCUGUUG | 441 | 1370-1392 |
| 1633804 | | | | | | |
| AD- | CUUAACAAGCCUGAGGUCUUU | 140 | 1376-1396 | AAAGACCUCAGGCUUGUUAAGCU | 442 | 1374-1396 |
| 1633808 | | | | | | |
| AD | UUAACAAGCCUGAGGUCUUGU | 141 | 1377-1397 | ACAAGACCUCAGGCUUGUUAAGC | 443 | 1375-1397 |
| 1633809 | | | | | | |
| AD- | UAACAAGCCUGAGGUCUUGGU | 142 | 1378-1398 | ACCAAGACCUCAGGCUUGUUAAG | 444 | 1376-1398 |
| 1633810 | | | | | | |
| AD- | AACAAGCCUGAGGUCUUGGAU | 143 | 1379-1399 | AUCCAAGACCUCAGGCUUGUUAA | 445 | 1377-1399 |
| 1633811 | | | | | | |
| AD- | ACAAGCCUGAGGUCUUGGAGU | 144 | 1380-1400 | ACUCCAAGACCUCAGGCUUGUUA | 446 | 1378-1400 |
| 1633812 | | | | | | |
| AD- | CAAGCCUGAGGUCUUGGAGGU | 145 | 1381-1401 | ACCUCCAAGACCUCAGGCUUGUU | 447 | 1379-1401 |
| 1633813 | | | | | | |
| AD- | AACCGCCCAUUCCUGUUUGCU | 146 | 1409-1429 | AGCAAACAGGAAUGGGCGGUUCA | 448 | 1407-1429 |
| 1633841 | | | | | | |
| AD- | ACCGCCCAUUCCUGUUUGCUU | 147 | 1410-1430 | AAGCAAACAGGAAUGGGCGGUUC | 449 | 1408-1430 |
| 1633842 | | | | | | |
| AD- | CCGCCCAUUCCUGUUUGCUGU | 148 | 1411-1431 | ACAGCAAACAGGAAUGGGCGGUU | 450 | 1409-1431 |
| 1633843 | | | | | | |
| AD- | CGCCCAUUCCUGUUUGCUGUU | 149 | 1412-1432 | AACAGCAAACAGGAAUGGGCGGU | 451 | 1410-1432 |
| 1633844 | | | | | | |
| AD- | AUUCCUGUUUGCUGUGUAUGU | 150 | 1417-1437 | ACAUACACAGCAAACAGGAAUGG | 452 | 1415-1437 |
| 1633848 | | | | | | |
| AD- | UCCUGUUUGCUGUGUAUGAUU | 151 | 1419-1439 | AAUCAUACACAGCAAACAGGAAU | 453 | 1417-1439 |
| 1633850 | | | | | | |
| AD- | UGCUGUGUAUGAUCAAAGCGU | 152 | 1426-1446 | ACGCUUUGAUCAUACACAGCAAA | 454 | 1424-1446 |
| 1633857 | | | | | | |
| AD- | GCUGUGUAUGAUCAAAGCGCU | 153 | 1427-1447 | AGCGCUUUGAUCAUACACAGCAA | 455 | 1425-1447 |
| 1633858 | | | | | | |
| AD- | CUGUGUAUGAUCAAAGCGCCU | 154 | 1428-1448 | AGGCGCUUUGAUCAUACACAGCA | 456 | 1426-1448 |
| 1633859 | | | | | | |
| AD- | AGGCCAGCAGCAGAUAACAAU | 155 | 1557-1577 | AUUGUUAUCUGCUGCUGGCCUUU | 457 | 1555-1577 |
| 1633937 | | | | | | |
| AD- | CGGACAAAUCAGCGAUGUGUU | 156 | 1580-1600 | AACACAUCGCUGAUUUGUCCGGG | 458 | 1578-1600 |
| 1633940 | | | | | | |
| AD- | GGACAAAUCAGCGAUGUGUCU | 157 | 1581-1601 | AGACACAUCGCUGAUUUGUCCGG | 459 | 1579-1601 |
| 1633941 | | | | | | |
| AD- | CUCCCACCUUUUCUUCUAAUU | 158 | 1610-1630 | AAUUAGAAGAAAAGGUGGGAGAC | 460 | 1608-1630 |
| 1633947 | | | | | | |
| AD- | UCCCACCUUUUCUUCUAAUGU | 159 | 1611-1631 | ACAUUAGAAGAAAAGGUGGGAGA | 461 | 1609-1631 |
| 1633948 | | | | | | |
| AD- | CCCACCUUUUCUUCUAAUGAU | 160 | 1612-1632 | AUCAUUAGAAGAAAAGGUGGGAG | 462 | 1610-1632 |
| 1633949 | | | | | | |
| AD- | UUUUCUUCUAAUGAGUCGACU | 161 | 1618-1638 | AGUCGACUCAUUAGAAGAAAAGG | 463 | 1616-1638 |
| 1633954 | | | | | | |
| AD- | UUUCUUCUAAUGAGUCGACUU | 162 | 1619-1639 | AAGUCGACUCAUUAGAAGAAAAG | 464 | 1617-1639 |
| 1633955 | | | | | | |
| AD- | UUCUUCUAAUGAGUCGACUUU | 163 | 1620-1640 | AAAGUCGACUCAUUAGAAGAAAA | 465 | 1618-1640 |
| 1633956 | | | | | | |
| AD- | CUUCUAAUGAGUCGACUUUGU | 164 | 1622-1642 | ACAAAGUCGACUCAUUAGAAGAA | 466 | 1620-1642 |
| 1633958 | | | | | | |
| AD- | UUCUAAUGAGUCGACUUUGAU | 165 | 1623-1643 | AUCAAAGUCGACUCAUUAGAAGA | 467 | 1621-1643 |
| 1633959 | | | | | | |
| AD- | UCUAAUGAGUCGACUUUGAGU | 166 | 1624-1644 | ACUCAAAGUCGACUCAUUAGAAG | 468 | 1622-1644 |
| 1633960 | | | | | | |
| AD- | CUAAUGAGUCGACUUUGAGCU | 167 | 1625-1645 | AGCUCAAAGUCGACUCAUUAGAA | 469 | 1623-1645 |
| 1633961 | | | | | | |
| AD- | UAAUGAGUCGACUUUGAGCUU | 168 | 1626-1646 | AAGCUCAAAGUCGACUCAUUAGA | 470 | 1624-1646 |
| 1633962 | | | | | | |
| AD- | GACUUUGAGCUGGAAAGCAGU | 169 | 1635-1655 | ACUGCUUUCCAGCUCAAAGUCGA | 471 | 1633-1655 |
| 1633971 | | | | | | |
| AD- | GAGCUGGAAAGCAGCCGUUUU | 170 | 1641-1661 | AAAACGGCUGCUUUCCAGCUCAA | 472 | 1639-1661 |
| 1633977 | | | | | | |
| AD- | AGCUGGAAAGCAGCCGUUUCU | 171 | 1642-1662 | AGAAACGGCUGCUUUCCAGCUCA | 473 | 1640-1662 |
| 1633978 | | | | | | |
| AD- | GCUGGAAAGCAGCCGUUUCUU | 172 | 1643-1663 | AAGAAACGGCUGCUUUCCAGCUC | 474 | 1641-1663 |
| 1633979 | | | | | | |
| AD- | CUGGAAAGCAGCCGUUUCUCU | 173 | 1644-1664 | AGAGAAACGGCUGCUUUCCAGCU | 475 | 1642-1664 |
| 1633980 | | | | | | |
| AD- | GGAAAGCAGCCGUUUCUCCUU | 174 | 1646-1666 | AAGGAGAAACGGCUGCUUUCCAG | 476 | 1644-1666 |
| 1633982 | | | | | | |
| AD- | AAAGCAGCCGUUUCUCCUUGU | 175 | 1648-1668 | ACAAGGAGAAACGGCUGCUUUCC | 477 | 1646-1668 |
| 1633984 | | | | | | |
| AD- | AGCAGCCGUUUCUCCUUGGUU | 176 | 1650-1670 | AACCAAGGAGAAACGGCUGCUUU | 478 | 1648-1670 |
| 1633986 | | | | | | |
| AD- | GCAGCCGUUUCUCCUUGGUCU | 177 | 1651-1671 | AGACCAAGGAGAAACGGCUGCUU | 479 | 1649-1671 |
| 1633987 | | | | | | |
| AD- | CAGCCGUUUCUCCUUGGUCUU | 178 | 1652-1672 | AAGACCAAGGAGAAACGGCUGCU | 480 | 1650-1672 |
| 1633988 | | | | | | |
| AD- | CGUUUCUCCUUGGUCUAAGUU | 179 | 1656-1676 | AACUUAGACCAAGGAGAAACGGC | 481 | 1654-1676 |
| 1633992 | | | | | | |
| AD- | GUUUCUCCUUGGUCUAAGUGU | 180 | 1657-1677 | ACACUUAGACCAAGGAGAAACGG | 482 | 1655-1677 |
| 1633993 | | | | | | |
| AD- | UUUCUCCUUGGUCUAAGUGUU | 181 | 1658-1678 | AACACUUAGACCAAGGAGAAACG | 483 | 1656-1678 |
| 1633994 | | | | | | |
| AD- | UUCUCCUUGGUCUAAGUGUGU | 182 | 1659-1679 | ACACACUUAGACCAAGGAGAAAC | 484 | 1657-1679 |
| 1633995 | | | | | | |
| AD- | UCUCCUUGGUCUAAGUGUGCU | 183 | 1660-1680 | AGCACACUUAGACCAAGGAGAAA | 485 | 1658-1680 |
| 1633996 | | | | | | |
| AD- | UCCUUGGUCUAAGUGUGCUGU | 184 | 1662-1682 | ACAGCACACUUAGACCAAGGAGA | 486 | 1660-1682 |
| 1633998 | | | | | | |
| AD- | UCUAAGUGUGCUGCAUGGAGU | 185 | 1669-1689 | ACUCCAUGCAGCACACUUAGACC | 487 | 1667-1689 |
| 1634005 | | | | | | |
| AD- | AGUGUGCUGCAUGGAGUGAGU | 186 | 1673-1693 | ACUCACUCCAUGCAGCACACUUA | 488 | 1671-1693 |
| 1634009 | | | | | | |
| AD- | CAUGGAGUGAGCAGUAGAAGU | 187 | 1682-1702 | ACUUCUACUGCUCACUCCAUGCA | 489 | 1680-1702 |
| 1634018 | | | | | | |
| AD- | GAGUGAGCAGUAGAAGCCUGU | 188 | 1686-1706 | ACAGGCUUCUACUGCUCACUCCA | 490 | 1684-1706 |
| 1634022 | | | | | | |
| AD- | CAAAUGCACCUCCCAGUUUGU | 189 | 1714-1734 | ACAAACUGGGAGGUGCAUUUGUG | 491 | 1712-1734 |
| 1634050 | | | | | | |
| AD- | AAAUGCACCUCCCAGUUUGCU | 190 | 1715-1735 | AGCAAACUGGGAGGUGCAUUUGU | 492 | 1713-1735 |
| 1634051 | | | | | | |
| AD- | AAUGCACCUCCCAGUUUGCUU | 191 | 1716-1736 | AAGCAAACUGGGAGGUGCAUUUG | 493 | 1714-1736 |
| 1634052 | | | | | | |
| AD- | AUGCACCUCCCAGUUUGCUGU | 192 | 1717-1737 | ACAGCAAACUGGGAGGUGCAUUU | 494 | 1715-1737 |
| 1634053 | | | | | | |
| AD- | UGCACCUCCCAGUUUGCUGGU | 193 | 1718-1738 | ACCAGCAAACUGGGAGGUGCAUU | 495 | 1716-1738 |
| 1634054 | | | | | | |
| AD- | CUCCCAGUUUGCUGGGUUUAU | 194 | 1723-1743 | AUAAACCCAGCAAACUGGGAGGU | 496 | 1721-1743 |
| 1634059 | | | | | | |
| AD- | CCCAGUUUGCUGGGUUUAUUU | 195 | 1725-1745 | AAAUAAACCCAGCAAACUGGGAG | 497 | 1723-1745 |
| 1634061 | | | | | | |
| AD- | CCAGUUUGCUGGGUUUAUUUU | 196 | 1726-1746 | AAAAUAAACCCAGCAAACUGGGA | 498 | 1724-1746 |
| 1634062 | | | | | | |
| AD- | CAGUUUGCUGGGUUUAUUUUU | 197 | 1727-1747 | AAAAAUAAACCCAGCAAACUGGG | 499 | 1725-1747 |
| 1634063 | | | | | | |
| AD- | AGUUUGCUGGGUUUAUUUUAU | 198 | 1728-1748 | AUAAAAUAAACCCAGCAAACUGG | 500 | 1726-1748 |
| 1634064 | | | | | | |
| AD- | GUUUGCUGGGUUUAUUUUAGU | 199 | 1729-1749 | ACUAAAAUAAACCCAGCAAACUG | 501 | 1727-1749 |
| 1634065 | | | | | | |
| AD- | UUUGCUGGGUUUAUUUUAGAU | 200 | 1730-1750 | AUCUAAAAUAAACCCAGCAAACU | 502 | 1728-1750 |
| 1634066 | | | | | | |
| AD- | UUGCUGGGUUUAUUUUAGAGU | 201 | 1731-1751 | ACUCUAAAAUAAACCCAGCAAAC | 503 | 1729-1751 |
| 1634067 | | | | | | |
| AD- | UGCUGGGUUUAUUUUAGAGAU | 202 | 1732-1752 | AUCUCUAAAAUAAACCCAGCAAA | 504 | 1730-1752 |
| 1634068 | | | | | | |
| AD- | GGGUUUAUUUUAGAGAAUGGU | 203 | 1736-1756 | ACCAUUCUCUAAAAUAAACCCAG | 505 | 1734-1756 |
| 1634071 | | | | | | |
| AD- | GGGAGGCAAGAACCAGUGUUU | 204 | 1761-1781 | AAACACUGGUUCUUGCCUCCCCA | 506 | 1759-1781 |
| 1634072 | | | | | | |
| AD- | GGAGGCAAGAACCAGUGUUUU | 205 | 1762-1782 | AAAACACUGGUUCUUGCCUCCCC | 507 | 1760-1782 |
| 1634073 | | | | | | |
| AD- | AGGCAAGAACCAGUGUUUAGU | 206 | 1764-1784 | ACUAAACACUGGUUCUUGCCUCC | 508 | 1762-1784 |
| 1634075 | | | | | | |
| AD- | GGCAAGAACCAGUGUUUAGCU | 207 | 1765-1785 | AGCUAAACACUGGUUCUUGCCUC | 509 | 1763-1785 |
| 1634076 | | | | | | |
| AD- | UGUUUAGCGCGGGACUACUGU | 208 | 1777-1797 | ACAGUAGUCCCGCGCUAAACACU | 510 | 1775-1797 |
| 1634088 | | | | | | |
| AD- | GACUACUGUUCCAAAAAGAAU | 209 | 1789-1809 | AUUCUUUUUGGAACAGUAGUCCC | 511 | 1787-1809 |
| 1634100 | | | | | | |
| AD- | ACUGUUCCAAAAAGAAUUCCU | 210 | 1793-1813 | AGGAAUUCUUUUUGGAACAGUAG | 512 | 1791-1813 |
| 1634104 | | | | | | |
| AD- | CUGUUCCAAAAAGAAUUCCAU | 211 | 1794-1814 | AUGGAAUUCUUUUUGGAACAGUA | 513 | 1792-1814 |
| 1634105 | | | | | | |
| AD- | CAAAAAGAAUUCCAACCGACU | 212 | 1800-1820 | AGUCGGUUGGAAUUCUUUUUGGA | 514 | 1798-1820 |
| 1634111 | | | | | | |
| AD- | ACCGACCAGCUUGUUUGUGAU | 213 | 1814-1834 | AUCACAAACAAGCUGGUCGGUUG | 515 | 1812-1834 |
| 1634123 | | | | | | |
| AD- | AAAGUGUUCCCUUUUCAAGUU | 214 | 1840-1860 | AACUUGAAAAGGGAACACUUUUU | 516 | 1838-1860 |
| 1634131 | | | | | | |
| AD- | AGUGUUCCCUUUUCAAGUUGU | 215 | 1842-1862 | ACAACUUGAAAAGGGAACACUUU | 517 | 1840-1862 |
| 1634133 | | | | | | |
| AD- | GUGUUCCCUUUUCAAGUUGAU | 216 | 1843-1863 | AUCAACUUGAAAAGGGAACACUU | 518 | 1841-1863 |
| 1634134 | | | | | | |
| AD- | UGUUCCCUUUUCAAGUUGAGU | 217 | 1844-1864 | ACUCAACUUGAAAAGGGAACACU | 519 | 1842-1864 |
| 1634135 | | | | | | |
| AD- | GUUCCCUUUUCAAGUUGAGAU | 218 | 1845-1865 | AUCUCAACUUGAAAAGGGAACAC | 520 | 1843-1865 |
| 1634136 | | | | | | |
| AD- | CAAGUUGAGAACAAAAAUUGU | 219 | 1855-1875 | ACAAUUUUUGUUCUCAACUUGAA | 521 | 1853-1875 |
| 1634146 | | | | | | |
| AD- | AAGUUGAGAACAAAAAUUGGU | 220 | 1856-1876 | ACCAAUUUUUGUUCUCAACUUGA | 522 | 1854-1876 |
| 1634147 | | | | | | |
| AD- | GUUGAGAACAAAAAUUGGGUU | 221 | 1858-1878 | AACCCAAUUUUUGUUCUCAACUU | 523 | 1856-1878 |
| 1634148 | | | | | | |
| AD- | UUGAGAACAAAAAUUGGGUUU | 222 | 1859-1879 | AAACCCAAUUUUUGUUCUCAACU | 524 | 1857-1879 |
| 1634149 | | | | | | |
| AD- | UGAGAACAAAAAUUGGGUUUU | 223 | 1860-1880 | AAAACCCAAUUUUUGUUCUCAAC | 525 | 1858-1880 |
| 1634150 | | | | | | |
| AD- | GAGAACAAAAAUUGGGUUUUU | 224 | 1861-1881 | AAAAACCCAAUUUUUGUUCUCAA | 526 | 1859-1881 |
| 1634151 | | | | | | |
| AD- | AGAACAAAAAUUGGGUUUUAU | 225 | 1862-1882 | AUAAAACCCAAUUUUUGUUCUCA | 527 | 1860-1882 |
| 1634152 | | | | | | |
| AD- | GAACAAAAAUUGGGUUUUAAU | 226 | 1863-1883 | AUUAAAACCCAAUUUUUGUUCUC | 528 | 1861-1883 |
| 1634153 | | | | | | |
| AD- | GUAUACAUUUUUGCAUUGCCU | 227 | 1890-1910 | AGGCAAUGCAAAAAUGUAUACUU | 529 | 1888-1910 |
| 1634163 | | | | | | |
| AD- | AUACAUUUUUGCAUUGCCUUU | 228 | 1892-1912 | AAAGGCAAUGCAAAAAUGUAUAC | 530 | 1890-1912 |
| 1634165 | | | | | | |
| AD- | CAUUUUUGCAUUGCCUUCGGU | 229 | 1895-1915 | ACCGAAGGCAAUGCAAAAAUGUA | 531 | 1893-1915 |
| 1634168 | | | | | | |
| AD- | AUUUUUGCAUUGCCUUCGGUU | 230 | 1896-1916 | AACCGAAGGCAAUGCAAAAAUGU | 532 | 1894-1916 |
| 1634169 | | | | | | |
| AD- | UUUUUGCAUUGCCUUCGGUUU | 231 | 1897-1917 | AAACCGAAGGCAAUGCAAAAAUG | 533 | 1895-1917 |
| 1634170 | | | | | | |
| AD- | UUUUGCAUUGCCUUCGGUUUU | 232 | 1898-1918 | AAAACCGAAGGCAAUGCAAAAAU | 534 | 1896-1918 |
| 1634171 | | | | | | |
| AD- | UUUGCAUUGCCUUCGGUUUGU | 233 | 1899-1919 | ACAAACCGAAGGCAAUGCAAAAA | 535 | 1897-1919 |
| 1634172 | | | | | | |
| AD- | UUGCAUUGCCUUCGGUUUGUU | 234 | 1900-1920 | AACAAACCGAAGGCAAUGCAAAA | 536 | 1898-1920 |
| 1634173 | | | | | | |
| AD- | UGCAUUGCCUUCGGUUUGUAU | 235 | 1901-1921 | AUACAAACCGAAGGCAAUGCAAA | 537 | 1899-1921 |
| 1634174 | | | | | | |
| AD- | GCAUUGCCUUCGGUUUGUAUU | 236 | 1902-1922 | AAUACAAACCGAAGGCAAUGCAA | 538 | 1900-1922 |
| 1634175 | | | | | | |
| AD- | CAUUGCCUUCGGUUUGUAUUU | 237 | 1903-1923 | AAAUACAAACCGAAGGCAAUGCA | 539 | 1901-1923 |
| 1634176 | | | | | | |
| AD- | AUUGCCUUCGGUUUGUAUUUU | 238 | 1904-1924 | AAAAUACAAACCGAAGGCAAUGC | 540 | 1902-1924 |
| 1634177 | | | | | | |
| AD- | UUGCCUUCGGUUUGUAUUUAU | 239 | 1905-1925 | AUAAAUACAAACCGAAGGCAAUG | 541 | 1903-1925 |
| 1634178 | | | | | | |
| AD- | UGCCUUCGGUUUGUAUUUAGU | 240 | 1906-1926 | ACUAAAUACAAACCGAAGGCAAU | 542 | 1904-1926 |
| 1634179 | | | | | | |
| AD- | GCCUUCGGUUUGUAUUUAGUU | 241 | 1907-1927 | AACUAAAUACAAACCGAAGGCAA | 543 | 1905-1927 |
| 1634180 | | | | | | |
| AD- | CCUUCGGUUUGUAUUUAGUGU | 242 | 1908-1928 | ACACUAAAUACAAACCGAAGGCA | 544 | 1906-1928 |
| 1634181 | | | | | | |
| AD- | CUUCGGUUUGUAUUUAGUGUU | 243 | 1909-1929 | AACACUAAAUACAAACCGAAGGC | 545 | 1907-1929 |
| 1634182 | | | | | | |
| AD- | GGUUUGUAUUUAGUGUCUUGU | 244 | 1913-1933 | ACAAGACACUAAAUACAAACCGA | 546 | 1911-1933 |
| 1634186 | | | | | | |
| AD- | UGUAUUUAGUGUCUUGAAUGU | 245 | 1917-1937 | ACAUUCAAGACACUAAAUACAAA | 547 | 1915-1937 |
| 1634190 | | | | | | |
| AD- | UAUUUAGUGUCUUGAAUGUAU | 246 | 1919-1939 | AUACAUUCAAGACACUAAAUACA | 548 | 1917-1939 |
| 1634192 | | | | | | |
| AD- | UUUAGUGUCUUGAAUGUAAGU | 247 | 1921-1941 | ACUUACAUUCAAGACACUAAAUA | 549 | 1919-1941 |
| 1634194 | | | | | | |
| AD- | GUCUUGAAUGUAAGAACAUGU | 248 | 1927-1947 | ACAUGUUCUUACAUUCAAGACAC | 550 | 1925-1947 |
| 1634200 | | | | | | |
| AD- | GUAAGAACAUGACCUCCGUGU | 249 | 1936-1956 | ACACGGAGGUCAUGUUCUUACAU | 551 | 1934-1956 |
| 1634209 | | | | | | |
| AD- | UAAGAACAUGACCUCCGUGUU | 250 | 1937-1957 | AACACGGAGGUCAUGUUCUUACA | 552 | 1935-1957 |
| 1634210 | | | | | | |
| AD- | AAGAACAUGACCUCCGUGUAU | 251 | 1938-1958 | AUACACGGAGGUCAUGUUCUUAC | 553 | 1936-1958 |
| 1634211 | | | | | | |
| AD- | AGAACAUGACCUCCGUGUAGU | 252 | 1939-1959 | ACUACACGGAGGUCAUGUUCUUA | 554 | 1937-1959 |
| 1634212 | | | | | | |
| AD- | GAACAUGACCUCCGUGUAGUU | 253 | 1940-1960 | AACUACACGGAGGUCAUGUUCUU | 555 | 1938-1960 |
| 1634213 | | | | | | |
| AD- | AACAUGACCUCCGUGUAGUGU | 254 | 1941-1961 | ACACUACACGGAGGUCAUGUUCU | 556 | 1939-1961 |
| 1634214 | | | | | | |
| AD- | ACAUGACCUCCGUGUAGUGUU | 255 | 1942-1962 | AACACUACACGGAGGUCAUGUUC | 557 | 1940-1962 |
| 1634215 | | | | | | |
| AD- | UGACCUCCGUGUAGUGUCUGU | 256 | 1945-1965 | ACAGACACUACACGGAGGUCAUG | 558 | 1943-1965 |
| 1634218 | | | | | | |
| AD- | CCGUGUAGUGUCUGUAAUACU | 257 | 1951-1971 | AGUAUUACAGACACUACACGGAG | 559 | 1949-1971 |
| 1634224 | | | | | | |
| AD- | CGUGUAGUGUCUGUAAUACCU | 258 | 1952-1972 | AGGUAUUACAGACACUACACGGA | 560 | 1950-1972 |
| 1634225 | | | | | | |
| AD- | GUGUAGUGUCUGUAAUACCUU | 259 | 1953-1973 | AAGGUAUUACAGACACUACACGG | 561 | 1951-1973 |
| 1634226 | | | | | | |
| AD- | UGUAGUGUCUGUAAUACCUUU | 260 | 1954-1974 | AAAGGUAUUACAGACACUACACG | 562 | 1952-1974 |
| 1634227 | | | | | | |
| AD- | AGUGUCUGUAAUACCUUAGUU | 261 | 1957-1977 | AACUAAGGUAUUACAGACACUAC | 563 | 1955-1977 |
| 1634230 | | | | | | |
| AD- | GUGUCUGUAAUACCUUAGUUU | 262 | 1958-1978 | AAACUAAGGUAUUACAGACACUA | 564 | 1956-1978 |
| 1634231 | | | | | | |
| AD- | UGUCUGUAAUACCUUAGUUUU | 263 | 1959-1979 | AAAACUAAGGUAUUACAGACACU | 565 | 1957-1979 |
| 1634232 | | | | | | |
| AD- | GUCUGUAAUACCUUAGUUUUU | 264 | 1960-1980 | AAAAACUAAGGUAUUACAGACAC | 566 | 1958-1980 |
| 1634233 | | | | | | |
| AD- | UUUCCACAGAUGCUUGUGAUU | 265 | 1979-1999 | AAUCACAAGCAUCUGUGGAAAAA | 567 | 1977-1999 |
| 1634234 | | | | | | |
| AD- | CACAGAUGCUUGUGAUUUUUU | 266 | 1983-2003 | AAAAAAUCACAAGCAUCUGUGGA | 568 | 1981-2003 |
| 1634238 | | | | | | |
| AD- | ACAGAUGCUUGUGAUUUUUGU | 267 | 1984-2004 | ACAAAAAUCACAAGCAUCUGUGG | 569 | 1982-2004 |
| 1634239 | | | | | | |
| AD- | CAGAUGCUUGUGAUUUUUGAU | 268 | 1985-2005 | AUCAAAAAUCACAAGCAUCUGUG | 570 | 1983-2005 |
| 1634240 | | | | | | |
| AD- | AGAUGCUUGUGAUUUUUGAAU | 269 | 1986-2006 | AUUCAAAAAUCACAAGCAUCUGU | 571 | 1984-2006 |
| 1634241 | | | | | | |
| AD- | GAUGCUUGUGAUUUUUGAACU | 270 | 1987-2007 | AGUUCAAAAAUCACAAGCAUCUG | 572 | 1985-2007 |
| 1634242 | | | | | | |
| AD- | UGUGAUUUUUGAACAAUACGU | 271 | 1993-2013 | ACGUAUUGUUCAAAAAUCACAAG | 573 | 1991-2013 |
| 1634248 | | | | | | |
| AD- | GUGAUUUUUGAACAAUACGUU | 272 | 1994-2014 | AACGUAUUGUUCAAAAAUCACAA | 574 | 1992-2014 |
| 1634249 | | | | | | |
| AD- | UGAUUUUUGAACAAUACGUGU | 273 | 1995-2015 | ACACGUAUUGUUCAAAAAUCACA | 575 | 1993-2015 |
| 1634250 | | | | | | |
| AD- | GAUUUUUGAACAAUACGUGAU | 274 | 1996-2016 | AUCACGUAUUGUUCAAAAAUCAC | 576 | 1994-2016 |
| 1634251 | | | | | | |
| AD- | AUUUUUGAACAAUACGUGAAU | 275 | 1997-2017 | AUUCACGUAUUGUUCAAAAAUCA | 577 | 1995-2017 |
| 1634252 | | | | | | |
| AD- | UGAACAAUACGUGAAAGAUGU | 276 | 2002-2022 | ACAUCUUUCACGUAUUGUUCAAA | 578 | 2000-2022 |
| 1634257 | | | | | | |
| AD- | GAUGCAAGCACCUGAAUUUCU | 277 | 2018-2038 | AGAAAUUCAGGUGCUUGCAUCUU | 579 | 2016-2038 |
| 1634273 | | | | | | |
| AD- | AUGCAAGCACCUGAAUUUCUU | 278 | 2019-2039 | AAGAAAUUCAGGUGCUUGCAUCU | 580 | 2017-2039 |
| 1634274 | | | | | | |
| AD- | UGCAAGCACCUGAAUUUCUGU | 279 | 2020-2040 | ACAGAAAUUCAGGUGCUUGCAUC | 581 | 2018-2040 |
| 1634275 | | | | | | |
| AD- | GCAAGCACCUGAAUUUCUGUU | 280 | 2021-2041 | AACAGAAAUUCAGGUGCUUGCAU | 582 | 2019-2041 |
| 1634276 | | | | | | |
| AD- | CAAGCACCUGAAUUUCUGUUU | 281 | 2022-2042 | AAACAGAAAUUCAGGUGCUUGCA | 583 | 2020-2042 |
| 1634277 | | | | | | |
| AD- | AAGCACCUGAAUUUCUGUUUU | 282 | 2023-2043 | AAAACAGAAAUUCAGGUGCUUGC | 584 | 2021-2043 |
| 1634278 | | | | | | |
| AD- | AGCACCUGAAUUUCUGUUUGU | 283 | 2024-2044 | ACAAACAGAAAUUCAGGUGCUUG | 585 | 2022-2044 |
| 1634279 | | | | | | |
| AD- | GCACCUGAAUUUCUGUUUGAU | 284 | 2025-2045 | AUCAAACAGAAAUUCAGGUGCUU | 586 | 2023-2045 |
| 1634280 | | | | | | |
| AD- | CACCUGAAUUUCUGUUUGAAU | 285 | 2026-2046 | AUUCAAACAGAAAUUCAGGUGCU | 587 | 2024-2046 |
| 1634281 | | | | | | |
| AD- | ACCUGAAUUUCUGUUUGAAUU | 286 | 2027-2047 | AAUUCAAACAGAAAUUCAGGUGC | 588 | 2025-2047 |
| 1634282 | | | | | | |
| AD- | CCUGAAUUUCUGUUUGAAUGU | 287 | 2028-2048 | ACAUUCAAACAGAAAUUCAGGUG | 589 | 2026-2048 |
| 1634283 | | | | | | |
| AD- | UGAAUUUCUGUUUGAAUGCGU | 288 | 2030-2050 | ACGCAUUCAAACAGAAAUUCAGG | 590 | 2028-2050 |
| 1634285 | | | | | | |
| AD- | GAAUUUCUGUUUGAAUGCGGU | 289 | 2031-2051 | ACCGCAUUCAAACAGAAAUUCAG | 591 | 2029-2051 |
| 1634286 | | | | | | |
| AD- | AAUUUCUGUUUGAAUGCGGAU | 290 | 2032-2052 | AUCCGCAUUCAAACAGAAAUUCA | 592 | 2030-2052 |
| 1634287 | | | | | | |
| AD- | UUGAAUGCGGAACCAUAGCUU | 291 | 2041-2061 | AAGCUAUGGUUCCGCAUUCAAAC | 593 | 2039-2061 |
| 1634296 | | | | | | |
| AD- | UGAAUGCGGAACCAUAGCUGU | 292 | 2042-2062 | ACAGCUAUGGUUCCGCAUUCAAA | 594 | 2040-2062 |
| 1634297 | | | | | | |
| AD- | GAAUGCGGAACCAUAGCUGGU | 293 | 2043-2063 | ACCAGCUAUGGUUCCGCAUUCAA | 595 | 2041-2063 |
| 1634298 | | | | | | |
| AD- | CGGAACCAUAGCUGGUUAUUU | 294 | 2048-2068 | AAAUAACCAGCUAUGGUUCCGCA | 596 | 2046-2068 |
| 1634303 | | | | | | |
| AD- | GGAACCAUAGCUGGUUAUUUU | 295 | 2049-2069 | AAAAUAACCAGCUAUGGUUCCGC | 597 | 2047-2069 |
| 1634304 | | | | | | |
| AD- | GAACCAUAGCUGGUUAUUUCU | 296 | 2050-2070 | AGAAAUAACCAGCUAUGGUUCCG | 598 | 2048-2070 |
| 1634305 | | | | | | |
| AD- | AACCAUAGCUGGUUAUUUCUU | 297 | 2051-2071 | AAGAAAUAACCAGCUAUGGUUCC | 599 | 2049-2071 |
| 1634306 | | | | | | |
| AD- | ACCAUAGCUGGUUAUUUCUCU | 298 | 2052-2072 | AGAGAAAUAACCAGCUAUGGUUC | 600 | 2050-2072 |
| 1634307 | | | | | | |
| AD- | CCAUAGCUGGUUAUUUCUCCU | 299 | 2053-2073 | AGGAGAAAUAACCAGCUAUGGUU | 601 | 2051-2073 |
| 1634308 | | | | | | |
| AD- | CAUAGCUGGUUAUUUCUCCCU | 300 | 2054-2074 | AGGGAGAAAUAACCAGCUAUGGU | 602 | 2052-2074 |
| 1634309 | | | | | | |
| AD- | CUGGUUAUUUCUCCCUUGUGU | 301 | 2059-2079 | ACACAAGGGAGAAAUAACCAGCU | 603 | 2057-2079 |
| 1634314 | | | | | | |
| AD- | UGGUUAUUUCUCCCUUGUGUU | 302 | 2060-2080 | AACACAAGGGAGAAAUAACCAGC | 604 | 2058-2080 |
| 1634315 | | | | | | |
| AD- | GGUUAUUUCUCCCUUGUGUUU | 303 | 2061-2081 | AAACACAAGGGAGAAAUAACCAG | 605 | 2059-2081 |
| 1634316 | | | | | | |
| AD- | UUAUUUCUCCCUUGUGUUAGU | 304 | 2063-2083 | ACUAACACAAGGGAGAAAUAACC | 606 | 2061-2083 |
| 1634318 | | | | | | |
| AD- | UAUUUCUCCCUUGUGUUAGUU | 305 | 2064-2084 | AACUAACACAAGGGAGAAAUAAC | 607 | 2062-2084 |
| 1634319 | | | | | | |
| AD- | AUUUCUCCCUUGUGUUAGUAU | 306 | 2065-2085 | AUACUAACACAAGGGAGAAAUAA | 608 | 2063-2085 |
| 1634320 | | | | | | |
| AD- | UUUCUCCCUUGUGUUAGUAAU | 307 | 2066-2086 | AUUACUAACACAAGGGAGAAAUA | 609 | 2064-2086 |
| 1634321 | | | | | | |
| AD- | UCCCUUGUGUUAGUAAUAAAU | 308 | 2070-2090 | AUUUAUUACUAACACAAGGGAGA | 610 | 2068-2090 |
| 1634325 | | | | | | |
| AD- | CCCUUGUGUUAGUAAUAAACU | 309 | 2071-2091 | AGUUUAUUACUAACACAAGGGAG | 611 | 2069-2091 |
| 1634326 | | | | | | |
| AD- | CCUUGUGUUAGUAAUAAACGU | 310 | 2072-2092 | ACGUUUAUUACUAACACAAGGGA | 612 | 2070-2092 |
| 1634327 | | | | | | |
| AD- | CUUGUGUUAGUAAUAAACGUU | 311 | 2073-2093 | AACGUUUAUUACUAACACAAGGG | 613 | 2071-2093 |
| 1634328 | | | | | | |
| AD- | UUGUGUUAGUAAUAAACGUCU | 312 | 2074-2094 | AGACGUUUAUUACUAACACAAGG | 614 | 2072-2094 |
| 1634329 | | | | | | |
| AD- | UGUGUUAGUAAUAAACGUCUU | 313 | 2075-2095 | AAGACGUUUAUUACUAACACAAG | 615 | 2073-2095 |
| 1634330 | | | | | | |
| AD- | GUGUUAGUAAUAAACGUCUUU | 314 | 2076-2096 | AAAGACGUUUAUUACUAACACAA | 616 | 2074-2096 |
| 1634331 | | | | | | |
| AD- | UGUUAGUAAUAAACGUCUUGU | 315 | 2077-2097 | ACAAGACGUUUAUUACUAACACA | 617 | 2075-2097 |
| 1634332 | | | | | | |
| AD- | GUUAGUAAUAAACGUCUUGCU | 316 | 2078-2098 | AGCAAGACGUUUAUUACUAACAC | 618 | 2076-2098 |
| 1634333 | | | | | | |
| AD- | UUAGUAAUAAACGUCUUGCCU | 317 | 2079-2099 | AGGCAAGACGUUUAUUACUAACA | 619 | 2077-2099 |
| 1634334 | | | | | | |
| AD- | AAACGUCUUGCCACAAUAAGU | 318 | 2087-2107 | ACUUAUUGUGGCAAGACGUUUAU | 620 | 2085-2107 |
| 1634342 | | | | | | |
| AD- | AACGUCUUGCCACAAUAAGCU | 319 | 2088-2108 | AGCUUAUUGUGGCAAGACGUUUA | 621 | 2086-2108 |
| 1634343 | | | | | | |
| AD- | ACGUCUUGCCACAAUAAGCCU | 320 | 2089-2109 | AGGCUUAUUGUGGCAAGACGUUU | 622 | 2087-2109 |
| 1634344 | | | | | | |
| AD- | AGUUGAGAACAAAAAUUGGGU | 321 | 1857-1877 | ACCCAAUUUUUGUUCUCAACUUG | 623 | 1855-1877 |
| 68585 | | | | | | |

TABLE 3
Modified Sense and Antisense Strand Sequences of Angiotensinogen (AGT) dsRNA Agents

| | | SEQ | | SEQ | | SEQ |
|---|---|---|---|---|---|---|
| Duplex | | ID | | ID | | ID |
| Name | Sense Sequence 5′ to 3′ | NO: | Antisense Sequence 5′ to 3′ | NO: | mRNA Target Sequence | NO: |
| AD- | asgsaagcUfgCfCfGfuuguucugguL96 | 624 | asCfscagAfaCfAfacggCfaGfcuucususc | 926 | GAAGAAGCUGCCGUUGUUCUGGG | 1228 |
| 1632736 | | | | | | |
| AD- | gsasagcuGfcCfGfUfuguucuggguL96 | 625 | asCfsccaGfaAfCfaacgGfcAfgcuucsusu | 927 | AAGAAGCUGCCGUUGUUCUGGGU | 1229 |
| 1632737 | | | | | | |
| AD- | asasgcugCfcGfUfUfguucuggguuL96 | 626 | asAfscccAfgAfAfcaacGfgCfagcuuscsu | 928 | AGAAGCUGCCGUUGUUCUGGGUA | 1230 |
| 1632738 | | | | | | |
| AD- | csusgccgUfuGfUfUfcuggguacuuL96 | 627 | asAfsguaCfcCfAfgaacAfaCfggcagscsu | 929 | AGCUGCCGUUGUUCUGGGUACUA | 1231 |
| 1632741 | | | | | | |
| AD- | csgsuuguUfcUfGfGfguacuacaguL96 | 628 | asCfsuguAfgUfAfcccaGfaAfcaacgsgsc | 930 | GCCGUUGUUCUGGGUACUACAGC | 1232 |
| 1632745 | | | | | | |
| AD- | csusggguAfcUfAfCfagcagaagguL96 | 629 | asCfscuuCfuGfCfuguaGfuAfcccagsasa | 931 | UUCUGGGUACUACAGCAGAAGGG | 1233 |
| 1632752 | | | | | | |
| AD- | usascuacAfgCfAfGfaaggguauguL96 | 630 | asCfsauaCfcCfUfucugCfuGfuaguascsc | 932 | GGUACUACAGCAGAAGGGUAUGC | 1234 |
| 1632757 | | | | | | |
| AD- | ascsuacaGfcAfGfAfaggguaugcuL96 | 631 | asGfscauAfcCfCfuucuGfcUfguagusasc | 933 | GUACUACAGCAGAAGGGUAUGCG | 1235 |
| 1632758 | | | | | | |
| AD- | csusacagCfaGfAfAfggguaugcguL96 | 632 | asCfsgcaUfaCfCfcuucUfgCfuguagsusa | 934 | UACUACAGCAGAAGGGUAUGCGG | 1236 |
| 1632759 | | | | | | |
| AD- | usascagcAfgAfAfGfgguaugcgguL96 | 633 | asCfscgcAfuAfCfccuuCfuGfcuguasgsu | 935 | ACUACAGCAGAAGGGUAUGCGGA | 1237 |
| 1632760 | | | | | | |
| AD- | ascsagcaGfaAfGfGfguaugcggauL96 | 634 | asUfsccgCfaUfAfcccuUfcUfgcugusasg | 936 | CUACAGCAGAAGGGUAUGCGGAA | 1238 |
| 1632761 | | | | | | |
| AD- | asgscagaAfgGfGfUfaugcggaaguL96 | 635 | asCfsuucCfgCfAfuaccCfuUfcugcusgsu | 937 | ACAGCAGAAGGGUAUGCGGAAGC | 1239 |
| 1632763 | | | | | | |
| AD- | asusccacAfaUfGfAfgaguaccuguL96 | 636 | asCfsaggUfaCfUfcucaUfuGfuggausgsa | 938 | UCAUCCACAAUGAGAGUACCUGU | 1240 |
| 1632852 | | | | | | |
| AD- | ascsaaugAfgAfGfUfaccugugaguL96 | 637 | asCfsucaCfaGfGfuacuCfuCfauugusgsg | 939 | CCACAAUGAGAGUACCUGUGAGC | 1241 |
| 1632856 | | | | | | |
| AD- | ususcauaCfcUfGfCfuccaauucauL96 | 638 | asUfsgaaUfuGfGfagcaGfgUfaugaasgsg | 940 | CCUUCAUACCUGCUCCAAUUCAG | 1242 |
| 1632898 | | | | | | |
| AD- | uscsauacCfuGfCfUfccaauucaguL96 | 639 | asCfsugaAfuUfGfgagcAfgGfuaugasasg | 941 | CUUCAUACCUGCUCCAAUUCAGG | 1243 |
| 1632899 | | | | | | |
| AD- | csasuaccUfgCfUfCfcaauucagguL96 | 640 | asCfscugAfaUfUfggagCfaGfguaugsasa | 942 | UUCAUACCUGCUCCAAUUCAGGC | 1244 |
| 1632900 | | | | | | |
| AD- | usgsgaugAfaAfAfGfgcccuacaguL96 | 641 | asCfsuguAfgGfGfccuuUfuCfauccascsa | 943 | UGUGGAUGAAAAGGCCCUACAGG | 1245 |
| 1632915 | | | | | | |
| AD- | gsgsaugaAfaAfGfGfcccuacagguL96 | 642 | asCfscugUfaGfGfgccuUfuUfcauccsasc | 944 | GUGGAUGAAAAGGCCCUACAGGA | 1246 |
| 1632916 | | | | | | |
| AD- | gsusgcuaGfuCfGfCfugcaaaacuuL96 | 643 | asAfsguuUfuGfCfagcgAfcUfagcacscsa | 945 | UGGUGCUAGUCGCUGCAAAACUU | 1247 |
| 1632944 | | | | | | |
| AD- | usgscuagUfcGfCfUfgcaaaacuuuL96 | 644 | asAfsaguUfuUfGfcagcGfaCfuagcascsc | 946 | GGUGCUAGUCGCUGCAAAACUUG | 1248 |
| 1632945 | | | | | | |
| AD- | gscsuaguCfgCfUfGfcaaaacuuguL96 | 645 | asCfsaagUfuUfUfgcagCfgAfcuagcsasc | 947 | GUGCUAGUCGCUGCAAAACUUGA | 1249 |
| 1632946 | | | | | | |
| AD- | usgscaaaAfcUfUfGfacaccgaaguL96 | 646 | asCfsuucGfgUfGfucaaGfuUfuugcasgsc | 948 | GCUGCAAAACUUGACACCGAAGA | 1250 |
| 1632955 | | | | | | |
| AD- | gscsaaaaCfuUfGfAfcaccgaagauL96 | 647 | asUfscuuCfgGfUfgucaAfgUfuuugcsasg | 949 | CUGCAAAACUUGACACCGAAGAC | 1251 |
| 1632956 | | | | | | |
| AD- | ususgacaCfcGfAfAfgacaaguuguL96 | 648 | asCfsaacUfuGfUfcuucGfgUfgucaasgsu | 950 | ACUUGACACCGAAGACAAGUUGA | 1252 |
| 1632963 | | | | | | |
| AD- | usgsacacCfgAfAfGfacaaguugauL96 | 649 | asUfscaaCfuUfGfucuuCfgGfugucasasg | 951 | CUUGACACCGAAGACAAGUUGAG | 1253 |
| 1632964 | | | | | | |
| AD- | ascsaccgAfaGfAfCfaaguugagguL96 | 650 | asCfscucAfaCfUfugucUfuCfgguguscsa | 952 | UGACACCGAAGACAAGUUGAGGG | 1254 |
| 1632966 | | | | | | |
| AD- | csasccgaAfgAfCfAfaguugaggguL96 | 651 | asCfsccuCfaAfCfuuguCfuUfcggugsusc | 953 | GACACCGAAGACAAGUUGAGGGC | 1255 |
| 1632967 | | | | | | |
| AD- | asasguugAfgGfGfCfcgcaaugguuL96 | 652 | asAfsccaUfuGfCfggccCfuCfaacuusgsu | 954 | ACAAGUUGAGGGCCGCAAUGGUC | 1256 |
| 1632977 | | | | | | |
| AD- | gsgsgaugCfuGfGfCfcaacuucuuuL96 | 653 | asAfsagaAfgUfUfggccAfgCfaucccsgsa | 955 | UCGGGAUGCUGGCCAACUUCUUG | 1257 |
| 1632998 | | | | | | |
| AD- | gscsuggcCfaAfCfUfucuugggcuuL96 | 654 | asAfsgccCfaAfGfaaguUfgGfccagcsasu | 956 | AUGCUGGCCAACUUCUUGGGCUU | 1258 |
| 1633003 | | | | | | |
| AD- | csasacuuCfuUfGfGfgcuuccguauL96 | 655 | asUfsacgGfaAfGfcccaAfgAfaguugsgsc | 957 | GCCAACUUCUUGGGCUUCCGUAU | 1259 |
| 1633009 | | | | | | |
| AD- | asascuucUfuGfGfGfcuuccguauuL96 | 656 | asAfsuacGfgAfAfgcccAfaGfaaguusgsg | 958 | CCAACUUCUUGGGCUUCCGUAUA | 1260 |
| 1633010 | | | | | | |
| AD- | ascsuucuUfgGfGfCfuuccguauauL96 | 657 | asUfsauaCfgGfAfagccCfaAfgaagususg | 959 | CAACUUCUUGGGCUUCCGUAUAU | 1261 |
| 1633011 | | | | | | |
| AD- | uscsuuggGfcUfUfCfcguauauauuL96 | 658 | asAfsuauAfuAfCfggaaGfcCfcaagasasg | 960 | CUUCUUGGGCUUCCGUAUAUAUG | 1262 |
| 1633014 | | | | | | |
| AD- | ususgggcUfuCfCfGfuauauaugguL96 | 659 | asCfscauAfuAfUfacggAfaGfcccaasgsa | 961 | UCUUGGGCUUCCGUAUAUAUGGC | 1263 |
| 1633016 | | | | | | |
| AD- | usasuaugGfcAfUfGfcacagugaguL96 | 660 | asCfsucaCfuGfUfgcauGfcCfauauasusa | 962 | UAUAUAUGGCAUGCACAGUGAGC | 1264 |
| 1633029 | | | | | | |
| AD- | gscsaugcAfcAfGfUfgagcuaugguL96 | 661 | asCfscauAfgCfUfcacuGfuGfcaugcscsa | 963 | UGGCAUGCACAGUGAGCUAUGGG | 1265 |
| 1633034 | | | | | | |
| AD- | csuscuauCfuGfGfGfagccuuggauL96 | 662 | asUfsccaAfgGfCfucccAfgAfuagagsasg | 964 | CUCUCUAUCUGGGAGCCUUGGAC | 1266 |
| 1633064 | | | | | | |
| AD- | gsascaggCfuAfCfAfggcaauccuuL96 | 663 | asAfsggaUfuGfCfcuguAfgCfcugucsasg | 965 | CUGACAGGCUACAGGCAAUCCUG | 1267 |
| 1633094 | | | | | | |
| AD- | ascsaggcUfaCfAfGfgcaauccuguL96 | 664 | asCfsaggAfuUfGfccugUfaGfccuguscsa | 966 | UGACAGGCUACAGGCAAUCCUGG | 1268 |
| 1633095 | | | | | | |
| AD- | usascaggCfaAfUfCfcuggguguuuL96 | 665 | asAfsacaCfcCfAfggauUfgCfcuguasgsc | 967 | GCUACAGGCAAUCCUGGGUGUUC | 1269 |
| 1633101 | | | | | | |
| AD- | ascsaggcAfaUfCfCfuggguguucuL96 | 666 | asGfsaacAfcCfCfaggaUfuGfccugusasg | 968 | CUACAGGCAAUCCUGGGUGUUCC | 1270 |
| 1633102 | | | | | | |
| AD- | gsgscaauCfcUfGfGfguguuccuuuL96 | 667 | asAfsaggAfaCfAfcccaGfgAfuugccsusg | 969 | CAGGCAAUCCUGGGUGUUCCUUG | 1271 |
| 1633105 | | | | | | |
| AD- | gscsaaucCfuGfGfGfuguuccuuguL96 | 668 | asCfsaagGfaAfCfacccAfgGfauugcscsu | 970 | AGGCAAUCCUGGGUGUUCCUUGG | 1272 |
| 1633106 | | | | | | |
| AD- | asasuccuGfgGfUfGfuuccuuggauL96 | 669 | asUfsccaAfgGfAfacacCfcAfggauusgsc | 971 | GCAAUCCUGGGUGUUCCUUGGAA | 1273 |
| 1633108 | | | | | | |
| AD- | uscscuggGfuGfUfUfccuuggaaguL96 | 670 | asCfsuucCfaAfGfgaacAfcCfcaggasusu | 972 | AAUCCUGGGUGUUCCUUGGAAGG | 1274 |
| 1633110 | | | | | | |
| AD- | cscsuuggAfaGfGfAfcaagaacuguL96 | 671 | asCfsaguUfcUfUfguccUfuCfcaaggsasa | 973 | UUCCUUGGAAGGACAAGAACUGC | 1275 |
| 1633121 | | | | | | |
| AD- | csasccugAfaGfCfAfgccguuuguuL96 | 672 | asAfscaaAfcGfGfcugcUfuCfaggugscsa | 974 | UGCACCUGAAGCAGCCGUUUGUG | 1276 |
| 1633254 | | | | | | |
| AD- | csuscuggAfcUfUfCfacagaacuguL96 | 673 | asCfsaguUfcUfGfugaaGfuCfcagagsasg | 975 | CUCUCUGGACUUCACAGAACUGG | 1277 |
| 1633295 | | | | | | |
| AD- | uscsuggaCfuUfCfAfcagaacugguL96 | 674 | asCfscagUfuCfUfgugaAfgUfccagasgsa | 976 | UCUCUGGACUUCACAGAACUGGA | 1278 |
| 1633296 | | | | | | |
| AD- | gsgsacuuCfaCfAfGfaacuggauguL96 | 675 | asCfsaucCfaGfUfucugUfgAfaguccsasg | 977 | CUGGACUUCACAGAACUGGAUGU | 1279 |
| 1633299 | | | | | | |
| AD- | ascsuucaCfaGfAfAfcuggauguuuL96 | 676 | asAfsacaUfcCfAfguucUfgUfgaaguscsc | 978 | GGACUUCACAGAACUGGAUGUUG | 1280 |
| 1633301 | | | | | | |
| AD- | csusucacAfgAfAfCfuggauguuguL96 | 677 | asCfsaacAfuCfCfaguuCfuGfugaagsusc | 979 | GACUUCACAGAACUGGAUGUUGC | 1281 |
| 1633302 | | | | | | |
| AD- | csascagaAfcUfGfGfauguugcuguL96 | 678 | asCfsagcAfaCfAfuccaGfuUfcugugsasa | 980 | UUCACAGAACUGGAUGUUGCUGC | 1282 |
| 1633305 | | | | | | |
| AD- | ascsagaaCfuGfGfAfuguugcugcuL96 | 679 | asGfscagCfaAfCfauccAfgUfucugusgsa | 981 | UCACAGAACUGGAUGUUGCUGCU | 1283 |
| 1633306 | | | | | | |
| AD- | usgsuugcUfgCfUfGfagaagauuguL96 | 680 | asCfsaauCfuUfCfucagCfaGfcaacasusc | 982 | GAUGUUGCUGCUGAGAAGAUUGA | 1284 |
| 1633317 | | | | | | |
| AD- | ususgcugCfuGfAfGfaagauugacuL96 | 681 | asGfsucaAfuCfUfucucAfgCfagcaascsa | 983 | UGUUGCUGCUGAGAAGAUUGACA | 1285 |
| 1633319 | | | | | | |
| AD- | gscsugcuGfaGfAfAfgauugacaguL96 | 682 | asCfsuguCfaAfUfcuucUfcAfgcagcsasa | 984 | UUGCUGCUGAGAAGAUUGACAGG | 1286 |
| 1633321 | | | | | | |
| AD- | ascsagguUfcAfUfGfcaggcuguguL96 | 683 | asCfsacaGfcCfUfgcauGfaAfccuguscsa | 985 | UGACAGGUUCAUGCAGGCUGUGA | 1287 |
| 1633335 | | | | | | |
| AD- | asusgcagGfcUfGfUfgacaggauguL96 | 684 | asCfsaucCfuGfUfcacaGfcCfugcausgsa | 986 | UCAUGCAGGCUGUGACAGGAUGG | 1288 |
| 1633343 | | | | | | |
| AD- | gscsaggcUfgUfGfAfcaggauggauL96 | 685 | asUfsccaUfcCfUfgucaCfaGfccugcsasu | 987 | AUGCAGGCUGUGACAGGAUGGAA | 1289 |
| 1633345 | | | | | | |
| AD- | gsascagcAfcCfCfUfggcuuucaauL96 | 686 | asUfsugaAfaGfCfcaggGfuGfcugucscsa | 988 | UGGACAGCACCCUGGCUUUCAAC | 1290 |
| 1633397 | | | | | | |
| AD- | csusggcuUfuCfAfAfcaccuacguuL96 | 687 | asAfscguAfgGfUfguugAfaAfgccagsgsg | 989 | CCCUGGCUUUCAACACCUACGUC | 1291 |
| 1633406 | | | | | | |
| AD- | gscsuuucAfaCfAfCfcuacguccauL96 | 688 | asUfsggaCfgUfAfggugUfuGfaaagcscsa | 990 | UGGCUUUCAACACCUACGUCCAC | 1292 |
| 1633409 | | | | | | |
| AD- | csasccuaCfgUfCfCfacuuccaaguL96 | 689 | asCfsuugGfaAfGfuggaCfgUfaggugsusu | 991 | AACACCUACGUCCACUUCCAAGG | 1293 |
| 1633417 | | | | | | |
| AD- | uscscacuUfcCfAfAfgggaagauguL96 | 690 | asCfsaucUfuCfCfcuugGfaAfguggascsg | 992 | CGUCCACUUCCAAGGGAAGAUGA | 1294 |
| 1633425 | | | | | | |
| AD- | ascsuuccAfaGfGfGfaagaugaaguL96 | 691 | asCfsuucAfuCfUfucccUfuGfgaagusgsg | 993 | CCACUUCCAAGGGAAGAUGAAGG | 1295 |
| 1633428 | | | | | | |
| AD- | csusuccaAfgGfGfAfagaugaagguL96 | 692 | asCfscuuCfaUfCfuuccCfuUfggaagsusg | 994 | CACUUCCAAGGGAAGAUGAAGGG | 1296 |
| 1633429 | | | | | | |
| AD- | uscscaagGfgAfAfGfaugaagggcuL96 | 693 | asGfscccUfuCfAfucuuCfcCfuuggasasg | 995 | CUUCCAAGGGAAGAUGAAGGGCU | 129 |
| 1633431 | | | | | | |
| AD- | asgsaugaAfgGfGfCfuucucccuguL96 | 694 | asCfsaggGfaGfAfagccCfuUfcaucususc | 996 | GAAGAUGAAGGGCUUCUCCCUGC | 1298 |
| 1633440 | | | | | | |
| AD- | gsgsacaaCfaGfCfAfccucaguguuL96 | 695 | asAfscacUfgAfGfgugcUfgUfuguccsasc | 997 | GUGGACAACAGCACCUCAGUGUC | 1299 |
| 1633464 | | | | | | |
| AD- | gsascaacAfgCfAfCfcucagugucuL96 | 696 | asGfsacaCfuGfAfggugCfuGfuugucscsa | 998 | UGGACAACAGCACCUCAGUGUCU | 1300 |
| 1633465 | | | | | | |
| AD- | csasacagCfaCfCfUfcagugucuguL96 | 697 | asCfsagaCfaCfUfgaggUfgCfuguugsusc | 999 | GACAACAGCACCUCAGUGUCUGU | 1301 |
| 1633467 | | | | | | |
| AD- | ascscucaGfuGfUfCfuguucccauuL96 | 698 | asAfsuggGfaAfCfagacAfcUfgaggusgsc | 1000 | GCACCUCAGUGUCUGUUCCCAUG | 1302 |
| 1633474 | | | | | | |
| AD- | csasguguCfuGfUfUfcccaugcucuL96 | 699 | asGfsagcAfuGfGfgaacAfgAfcacugsasg | 1001 | CUCAGUGUCUGUUCCCAUGCUCU | 1303 |
| 1633478 | | | | | | |
| AD- | gsuscuguUfcCfCfAfugcucucuguL96 | 700 | asCfsagaGfaGfCfauggGfaAfcagacsasc | 1002 | GUGUCUGUUCCCAUGCUCUCUGG | 1304 |
| 1633482 | | | | | | |
| AD- | uscsuguuCfcCfAfUfgcucucugguL96 | 701 | asCfscagAfgAfGfcaugGfgAfacagascsa | 1003 | UGUCUGUUCCCAUGCUCUCUGGC | 1305 |
| 1633483 | | | | | | |
| AD- | gsascaucCfaGfGfAfcaacuucucuL96 | 702 | asGfsagaAfgUfUfguccUfgGfaugucsasc | 1004 | GUGACAUCCAGGACAACUUCUCG | 1306 |
| 1633528 | | | | | | |
| AD- | ascsauccAfgGfAfCfaacuucucguL96 | 703 | asCfsgagAfaGfUfugucCfuGfgauguscsa | 1005 | UGACAUCCAGGACAACUUCUCGG | 1307 |
| 1633529 | | | | | | |
| AD- | csasuccaGfgAfCfAfacuucucgguL96 | 704 | asCfscgaGfaAfGfuuguCfcUfggaugsusc | 1006 | GACAUCCAGGACAACUUCUCGGU | 1308 |
| 1633530 | | | | | | |
| AD- | asusccagGfaCfAfAfcuucucgguuL96 | 705 | asAfsccgAfgAfAfguugUfcCfuggausgsu | 1007 | ACAUCCAGGACAACUUCUCGGUG | 1309 |
| 1633531 | | | | | | |
| AD- | uscscaggAfcAfAfCfuucucgguguL96 | 706 | asCfsaccGfaGfAfaguuGfuCfcuggasusg | 1008 | CAUCCAGGACAACUUCUCGGUGA | 1310 |
| 1633532 | | | | | | |
| AD- | cscsaggaCfaAfCfUfucucggugauL96 | 707 | asUfscacCfgAfGfaaguUfgUfccuggsasu | 1009 | AUCCAGGACAACUUCUCGGUGAC | 1311 |
| 1633533 | | | | | | |
| AD- | csasggacAfaCfUfUfcucggugacuL96 | 708 | asGfsucaCfcGfAfgaagUfuGfuccugsgsa | 1010 | UCCAGGACAACUUCUCGGUGACU | 1312 |
| 1633534 | | | | | | |
| AD- | ascsuucuCfgGfUfGfacucaaguguL96 | 709 | asCfsacuUfgAfGfucacCfgAfgaagususg | 1011 | CAACUUCUCGGUGACUCAAGUGC | 1313 |
| 1633541 | | | | | | |
| AD- | csusucucGfgUfGfAfcucaagugcuL96 | 710 | asGfscacUfuGfAfgucaCfcGfagaagsusu | 1012 | AACUUCUCGGUGACUCAAGUGCC | 1314 |
| 1633542 | | | | | | |
| AD- | gsascucaAfgUfGfCfccuucacuguL96 | 711 | asCfsaguGfaAfGfggcaCfuUfgagucsasc | 1013 | GUGACUCAAGUGCCCUUCACUGA | 1315 |
| 1633551 | | | | | | |
| AD- | csuscaagUfgCfCfCfuucacugaguL96 | 712 | asCfsucaGfuGfAfagggCfaCfuugagsusc | 1014 | GACUCAAGUGCCCUUCACUGAGA | 1316 |
| 1633553 | | | | | | |
| AD- | gscsugauCfcAfGfCfcucacuauguL96 | 713 | asCfsauaGfuGfAfggcuGfgAfucagcsasg | 1015 | CUGCUGAUCCAGCCUCACUAUGC | 1317 |
| 1633587 | | | | | | |
| AD- | gsusggagGfgUfCfUfcacuuuccauL96 | 714 | asUfsggaAfaGfUfgagaCfcCfuccacscsu | 1016 | AGGUGGAGGGUCUCACUUUCCAG | 1318 |
| 1633624 | | | | | | |
| AD- | csuscacuUfuCfCfAfgcaaaacucuL96 | 715 | asGfsaguUfuUfGfcuggAfaAfgugagsasc | 1017 | GUCUCACUUUCCAGCAAAACUCC | 1319 |
| 1633633 | | | | | | |
| AD- | csasgcaaAfaCfUfCfccucaacuguL96 | 716 | asCfsaguUfgAfGfggagUfuUfugcugsgsa | 1018 | UCCAGCAAAACUCCCUCAACUGG | 1320 |
| 1633642 | | | | | | |
| AD- | asgscaaaAfcUfCfCfcucaacugguL96 | 717 | asCfscagUfuGfAfgggaGfuUfuugcusgsg | 1019 | CCAGCAAAACUCCCUCAACUGGA | 1321 |
| 1633643 | | | | | | |
| AD- | asasaacuCfcCfUfCfaacuggauguL96 | 718 | asCfsaucCfaGfUfugagGfgAfguuuusgsc | 1020 | GCAAAACUCCCUCAACUGGAUGA | 1322 |
| 1633646 | | | | | | |
| AD- | ascsucccUfcAfAfCfuggaugaaguL96 | 719 | asCfsuucAfuCfCfaguuGfaGfggagususu | 1021 | AAACUCCCUCAACUGGAUGAAGA | 1323 |
| 1633649 | | | | | | |
| AD- | csusggauGfaAfGfAfaacuaucucuL96 | 720 | asGfsagaUfaGfUfuucuUfcAfuccagsusu | 1022 | AACUGGAUGAAGAAACUAUCUCC | 1324 |
| 1633658 | | | | | | |
| AD- | ascsugguGfcUfGfCfaaggaucuuuL96 | 721 | asAfsagaUfcCfUfugcaGfcAfccagususg | 1023 | CAACUGGUGCUGCAAGGAUCUUA | 1325 |
| 1633666 | | | | | | |
| AD- | gsgsugcuGfcAfAfGfgaucuuauguL96 | 722 | asCfsauaAfgAfUfccuuGfcAfgcaccsasg | 1024 | CUGGUGCUGCAAGGAUCUUAUGA | 1326 |
| 1633669 | | | | | | |
| AD- | gsusgcugCfaAfGfGfaucuuaugauL96 | 723 | asUfscauAfaGfAfuccuUfgCfagcacscsa | 1025 | UGGUGCUGCAAGGAUCUUAUGAC | 1327 |
| 1633670 | | | | | | |
| AD- | usgscugcAfaGfGfAfucuuaugacuL96 | 724 | asGfsucaUfaAfGfauccUfuGfcagcascsc | 1026 | GGUGCUGCAAGGAUCUUAUGACC | 1328 |
| 1633671 | | | | | | |
| AD- | csusuaugAfcCfUfGfcaggaccuguL96 | 725 | asCfsaggUfcCfUfgcagGfuCfauaagsasu | 1027 | AUCUUAUGACCUGCAGGACCUGC | 1329 |
| 1633683 | | | | | | |
| AD- | csgsagcuGfaAfCfCfugcaaaaauuL96 | 726 | asAfsuuuUfuGfCfagguUfcAfgcucgsgsu | 1028 | ACCGAGCUGAACCUGCAAAAAUU | 1330 |
| 1633732 | | | | | | |
| AD- | gsasgcugAfaCfCfUfgcaaaaauuuL96 | 727 | asAfsauuUfuUfGfcaggUfuCfagcucsgsg | 1029 | CCGAGCUGAACCUGCAAAAAUUG | 1331 |
| 1633733 | | | | | | |
| AD- | asgscugaAfcCfUfGfcaaaaauuguL96 | 728 | asCfsaauUfuUfUfgcagGfuUfcagcuscsg | 1030 | CGAGCUGAACCUGCAAAAAUUGA | 1332 |
| 1633734 | | | | | | |
| AD- | gscsugaaCfcUfGfCfaaaaauugauL96 | 729 | asUfscaaUfuUfUfugcaGfgUfucagesusc | 1031 | GAGCUGAACCUGCAAAAAUUGAG | 1333 |
| 1633735 | | | | | | |
| AD- | csusgaacCfuGfCfAfaaaauugaguL96 | 730 | asCfsucaAfuUfUfuugcAfgGfuucagscsu | 1032 | AGCUGAACCUGCAAAAAUUGAGC | 1334 |
| 1633736 | | | | | | |
| AD- | usgsaaccUfgCfAfAfaaauugagcuL96 | 731 | asGfscucAfaUfUfuuugCfaGfguucasgsc | 1033 | GCUGAACCUGCAAAAAUUGAGCA | 1335 |
| 1633737 | | | | | | |
| AD- | usgscaaaAfaUfUfGfagcaaugacuL96 | 732 | asGfsucaUfuGfCfucaaUfuUfuugcasgsg | 1034 | CCUGCAAAAAUUGAGCAAUGACC | 1336 |
| 1633743 | | | | | | |
| AD- | csasaaaaUfuGfAfGfcaaugaccguL96 | 733 | asCfsgguCfaUfUfgcucAfaUfuuuugscsa | 1035 | UGCAAAAAUUGAGCAAUGACCGC | 1337 |
| 1633745 | | | | | | |
| AD- | ususgagcAfaUfGfAfccgcaucaguL96 | 734 | asCfsugaUfgCfGfgucaUfuGfcucaasusu | 1036 | AAUUGAGCAAUGACCGCAUCAGG | 1338 |
| 1633751 | | | | | | |
| AD- | usgsagcaAfuGfAfCfcgcaucagguL96 | 735 | asCfscugAfuGfCfggucAfuUfgcucasasu | 1037 | AUUGAGCAAUGACCGCAUCAGGG | 1339 |
| 1633752 | | | | | | |
| AD- | asgscaauGfaCfCfGfcaucaggguuL96 | 736 | asAfscccUfgAfUfgcggUfcAfuugcuscsa | 1038 | UGAGCAAUGACCGCAUCAGGGUG | 1340 |
| 1633754 | | | | | | |
| AD- | gsasggugCfuGfAfAfcagcauuuuuL96 | 737 | asAfsaaaUfgCfUfguucAfgCfaccucscsc | 1039 | GGGAGGUGCUGAACAGCAUUUUU | 1341 |
| 1633759 | | | | | | |
| AD- | ususgagcUfuGfAfAfgcggaugaguL96 | 738 | asCfsucaUfcCfGfcuucAfaGfcucaasasa | 1040 | UUUUGAGCUUGAAGCGGAUGAGA | 1342 |
| 1633761 | | | | | | |
| AD- | gsuscuacCfcAfAfCfagcuuaacauL96 | 739 | asUfsguuAfaGfCfuguuGfgGfuagacsusc | 1041 | GAGUCUACCCAACAGCUUAACAA | 1343 |
| 1633795 | | | | | | |
| AD- | uscsuaccCfaAfCfAfgcuuaacaauL96 | 740 | asUfsuguUfaAfGfcuguUfgGfguagascsu | 1042 | AGUCUACCCAACAGCUUAACAAG | 1344 |
| 1633796 | | | | | | |
| AD- | csusacccAfaCfAfGfcuuaacaaguL96 | 741 | asCfsuugUfuAfAfgcugUfuGfgguagsasc | 1043 | GUCUACCCAACAGCUUAACAAGC | 1345 |
| 1633797 | | | | | | |
| AD- | cscsaacaGfcUfUfAfacaagccuguL96 | 742 | asCfsaggCfuUfGfuuaaGfcUfguuggsgsu | 1044 | ACCCAACAGCUUAACAAGCCUGA | 1346 |
| 1633801 | | | | | | |
| AD- | ascsagcuUfaAfCfAfagccugagguL96 | 743 | asCfscucAfgGfCfuuguUfaAfgcugususg | 1045 | CAACAGCUUAACAAGCCUGAGGU | 1347 |
| 1633804 | | | | | | |
| AD- | csusuaacAfaGfCfCfugaggucuuuL96 | 744 | asAfsagaCfcUfCfaggcUfuGfuuaagscsu | 1046 | AGCUUAACAAGCCUGAGGUCUUG | 1348 |
| 1633808 | | | | | | |
| AD- | ususaacaAfgCfCfUfgaggucuuguL96 | 745 | asCfsaagAfcCfUfcaggCfuUfguuaasgsc | 1047 | GCUUAACAAGCCUGAGGUCUUGG | 1349 |
| 1633809 | | | | | | |
| AD- | usasacaaGfcCfUfGfaggucuugguL96 | 746 | asCfscaaGfaCfCfucagGfcUfuguuasasg | 1048 | CUUAACAAGCCUGAGGUCUUGGA | 1350 |
| 1633810 | | | | | | |
| AD- | asascaagCfcUfGfAfggucuuggauL96 | 747 | asUfsccaAfgAfCfcucaGfgCfuuguusasa | 1049 | UUAACAAGCCUGAGGUCUUGGAG | 1351 |
| 1633811 | | | | | | |
| AD- | ascsaagcCfuGfAfGfgucuuggaguL96 | 748 | asCfsuccAfaGfAfccucAfgGfcuugususa | 1050 | UAACAAGCCUGAGGUCUUGGAGG | 1352 |
| 1633812 | | | | | | |
| AD- | csasagccUfgAfGfGfucuuggagguL96 | 749 | asCfscucCfaAfGfaccuCfaGfgcuugsusu | 1051 | AACAAGCCUGAGGUCUUGGAGGU | 1353 |
| 1633813 | | | | | | |
| AD- | asasccgcCfcAfUfUfccuguuugcuL96 | 750 | asGfscaaAfcAfGfgaauGfgGfcgguuscsa | 1052 | UGAACCGCCCAUUCCUGUUUGCU | 1354 |
| 1633841 | | | | | | |
| AD- | ascscgccCfaUfUfCfcuguuugcuuL96 | 751 | asAfsgcaAfaCfAfggaaUfgGfgcggususc | 1053 | GAACCGCCCAUUCCUGUUUGCUG | 1355 |
| 1633842 | | | | | | |
| AD- | cscsgcccAfuUfCfCfuguuugcuguL96 | 752 | asCfsagcAfaAfCfaggaAfuGfggeggsusu | 1054 | AACCGCCCAUUCCUGUUUGCUGU | 1356 |
| 1633843 | | | | | | |
| AD- | csgscccaUfuCfCfUfguuugcuguuL96 | 753 | asAfscagCfaAfAfcaggAfaUfgggcgsgsu | 1055 | ACCGCCCAUUCCUGUUUGCUGUG | 1357 |
| 1633844 | | | | | | |
| AD- | asusuccuGfuUfUfGfcuguguauguL96 | 754 | asCfsauaCfaCfAfgcaaAfcAfggaausgsg | 1056 | CCAUUCCUGUUUGCUGUGUAUGA | 1358 |
| 1633848 | | | | | | |
| AD- | uscscuguUfuGfCfUfguguaugauuL96 | 755 | asAfsucaUfaCfAfcagcAfaAfcaggasasu | 1057 | AUUCCUGUUUGCUGUGUAUGAUC | 1359 |
| 1633850 | | | | | | |
| AD- | usgscuguGfuAfUfGfaucaaagcguL96 | 756 | asCfsgcuUfuGfAfucauAfcAfcagcasasa | 1058 | UUUGCUGUGUAUGAUCAAAGCGC | 1360 |
| 1633857 | | | | | | |
| AD- | gscsugugUfaUfGfAfucaaagcgcuL96 | 757 | asGfscgcUfuUfGfaucaUfaCfacagcsasa | 1059 | UUGCUGUGUAUGAUCAAAGCGCC | 1361 |
| 1633858 | | | | | | |
| AD- | csusguguAfuGfAfUfcaaagcgccuL96 | 758 | asGfsgcgCfuUfUfgaucAfuAfcacagscsa | 1060 | UGCUGUGUAUGAUCAAAGCGCCA | 1362 |
| 1633859 | | | | | | |
| AD- | asgsgccaGfcAfGfCfagauaacaauL96 | 759 | asUfsuguUfaUfCfugcuGfcUfggccususu | 1061 | AAAGGCCAGCAGCAGAUAACAAC | 1363 |
| 1633937 | | | | | | |
| AD- | csgsgacaAfaUfCfAfgcgauguguuL96 | 760 | asAfscacAfuCfGfcugaUfuUfguccgsgsg | 1062 | CCCGGACAAAUCAGCGAUGUGUC | 1364 |
| 1633940 | | | | | | |
| AD- | gsgsacaaAfuCfAfGfcgaugugucuL96 | 761 | asGfsacaCfaUfCfgcugAfuUfuguccsgsg | 1063 | CCGGACAAAUCAGCGAUGUGUCA | 1365 |
| 1633941 | | | | | | |
| AD- | csuscccaCfcUfUfUfucuucuaauuL96 | 762 | asAfsuuaGfaAfGfaaaaGfgUfgggagsasc | 1064 | GUCUCCCACCUUUUCUUCUAAUG | 1366 |
| 1633947 | | | | | | |
| AD- | uscsccacCfuUfUfUfcuucuaauguL96 | 763 | asCfsauuAfgAfAfgaaaAfgGfugggasgsa | 1065 | UCUCCCACCUUUUCUUCUAAUGA | 1367 |
| 1633948 | | | | | | |
| AD- | cscscaccUfuUfUfCfuucuaaugauL96 | 764 | asUfscauUfaGfAfagaaAfaGfgugggsasg | 1066 | CUCCCACCUUUUCUUCUAAUGAG | 1368 |
| 1633949 | | | | | | |
| AD- | ususuucuUfcUfAfAfugagucgacuL96 | 765 | asGfsucgAfcUfCfauuaGfaAfgaaaasgsg | 1067 | CCUUUUCUUCUAAUGAGUCGACU | 1369 |
| 1633954 | | | | | | |
| AD- | ususucuuCfuAfAfUfgagucgacuuL96 | 766 | asAfsgucGfaCfUfcauuAfgAfagaaasasg | 1068 | CUUUUCUUCUAAUGAGUCGACUU | 1370 |
| 1633955 | | | | | | |
| AD- | ususcuucUfaAfUfGfagucgacuuuL96 | 767 | asAfsaguCfgAfCfucauUfaGfaagaasasa | 1069 | UUUUCUUCUAAUGAGUCGACUUU | 1371 |
| 1633956 | | | | | | |
| AD- | csusucuaAfuGfAfGfucgacuuuguL96 | 768 | asCfsaaaGfuCfGfacucAfuUfagaagsasa | 1070 | UUCUUCUAAUGAGUCGACUUUGA | 1372 |
| 1633958 | | | | | | |
| AD- | ususcuaaUfgAfGfUfcgacuuugauL96 | 769 | asUfscaaAfgUfCfgacuCfaUfuagaasgsa | 1071 | UCUUCUAAUGAGUCGACUUUGAG | 1373 |
| 1633959 | | | | | | |
| AD- | uscsuaauGfaGfUfCfgacuuugaguL96 | 770 | asCfsucaAfaGfUfcgacUfcAfuuagasasg | 1072 | CUUCUAAUGAGUCGACUUUGAGC | 1374 |
| 1633960 | | | | | | |
| AD- | csusaaugAfgUfCfGfacuuugagcuL96 | 771 | asGfscucAfaAfGfucgaCfuCfauuagsasa | 1073 | UUCUAAUGAGUCGACUUUGAGCU | 1375 |
| 1633961 | | | | | | |
| AD- | usasaugaGfuCfGfAfcuuugagcuuL96 | 772 | asAfsgcuCfaAfAfgucgAfcUfcauuasgsa | 1074 | UCUAAUGAGUCGACUUUGAGCUG | 1376 |
| 1633962 | | | | | | |
| AD- | gsascuuuGfaGfCfUfggaaagcaguL96 | 773 | asCfsugcUfuUfCfcagcUfcAfaagucsgsa | 1075 | UCGACUUUGAGCUGGAAAGCAGC | 1377 |
| 1633971 | | | | | | |
| AD- | gsasgcugGfaAfAfGfcagccguuuuL96 | 774 | asAfsaacGfgCfUfgcuuUfcCfagcucsasa | 1076 | UUGAGCUGGAAAGCAGCCGUUUC | 1378 |
| 1633977 | | | | | | |
| AD- | asgscuggAfaAfGfCfagccguuucuL96 | 775 | asGfsaaaCfgGfCfugcuUfuCfcagcuscsa | 1077 | UGAGCUGGAAAGCAGCCGUUUCU | 1379 |
| 1633978 | | | | | | |
| AD- | gscsuggaAfaGfCfAfgccguuucuuL96 | 776 | asAfsgaaAfcGfGfcugcUfuUfccagesusc | 1078 | GAGCUGGAAAGCAGCCGUUUCUC | 1380 |
| 1633979 | | | | | | |
| AD- | csusggaaAfgCfAfGfccguuucucuL96 | 777 | asGfsagaAfaCfGfgcugCfuUfuccagscsu | 1079 | AGCUGGAAAGCAGCCGUUUCUCC | 1381 |
| 1633980 | | | | | | |
| AD- | gsgsaaagCfaGfCfCfguuucuccuuL96 | 778 | asAfsggaGfaAfAfcggcUfgCfuuuccsasg | 1080 | CUGGAAAGCAGCCGUUUCUCCUU | 1382 |
| 1633982 | | | | | | |
| AD- | asasagcaGfcCfGfUfuucuccuuguL96 | 779 | asCfsaagGfaGfAfaacgGfcUfgcuuuscsc | 1081 | GGAAAGCAGCCGUUUCUCCUUGG | 1383 |
| 1633984 | | | | | | |
| AD- | asgscagcCfgUfUfUfcuccuugguuL96 | 780 | asAfsccaAfgGfAfgaaaCfgGfcugcususu | 1082 | AAAGCAGCCGUUUCUCCUUGGUC | 1384 |
| 1633986 | | | | | | |
| AD- | gscsagccGfuUfUfCfuccuuggucuL96 | 781 | asGfsaccAfaGfGfagaaAfcGfgcugcsusu | 1083 | AAGCAGCCGUUUCUCCUUGGUCU | 1385 |
| 1633987 | | | | | | |
| AD- | csasgccgUfuUfCfUfccuuggucuuL96 | 782 | asAfsgacCfaAfGfgagaAfaCfggcugscsu | 1084 | AGCAGCCGUUUCUCCUUGGUCUA | 1386 |
| 1633988 | | | | | | |
| AD- | csgsuuucUfcCfUfUfggucuaaguuL96 | 783 | asAfscuuAfgAfCfcaagGfaGfaaacgsgsc | 1085 | GCCGUUUCUCCUUGGUCUAAGUG | 1387 |
| 1633992 | | | | | | |
| AD- | gsusuucuCfcUfUfGfgucuaaguguL96 | 784 | asCfsacuUfaGfAfccaaGfgAfgaaacsgsg | 1086 | CCGUUUCUCCUUGGUCUAAGUGU | 1388 |
| 1633993 | | | | | | |
| AD- | ususucucCfuUfGfGfucuaaguguuL96 | 785 | asAfscacUfuAfGfaccaAfgGfagaaascsg | 1087 | CGUUUCUCCUUGGUCUAAGUGUG | 1389 |
| 1633994 | | | | | | |
| AD- | ususcuccUfuGfGfUfcuaaguguguL96 | 786 | asCfsacaCfuUfAfgaccAfaGfgagaasasc | 1088 | GUUUCUCCUUGGUCUAAGUGUGC | 1390 |
| 1633995 | | | | | | |
| AD- | uscsuccuUfgGfUfCfuaagugugcuL96 | 787 | asGfscacAfcUfUfagacCfaAfggagasasa | 1089 | UUUCUCCUUGGUCUAAGUGUGCU | 1391 |
| 1633996 | | | | | | |
| AD- | uscscuugGfuCfUfAfagugugcuguL96 | 788 | asCfsagcAfcAfCfuuagAfcCfaaggasgsa | 1090 | UCUCCUUGGUCUAAGUGUGCUGC | 1392 |
| 1633998 | | | | | | |
| AD- | uscsuaagUfgUfGfCfugcauggaguL96 | 789 | asCfsuccAfuGfCfagcaCfaCfuuagascsc | 1091 | GGUCUAAGUGUGCUGCAUGGAGU | 1393 |
| 1634005 | | | | | | |
| AD- | asgsugugCfuGfCfAfuggagugaguL96 | 790 | asCfsucaCfuCfCfaugcAfgCfacacususa | 1092 | UAAGUGUGCUGCAUGGAGUGAGC | 1394 |
| 1634009 | | | | | | |
| AD- | csasuggaGfuGfAfGfcaguagaaguL96 | 791 | asCfsuucUfaCfUfgcucAfcUfccaugscsa | 1093 | UGCAUGGAGUGAGCAGUAGAAGC | 1395 |
| 1634018 | | | | | | |
| AD- | gsasgugaGfcAfGfUfagaagccuguL96 | 792 | asCfsaggCfuUfCfuacuGfcUfcacucscsa | 1094 | UGGAGUGAGCAGUAGAAGCCUGC | 1396 |
| 1634022 | | | | | | |
| AD- | csasaaugCfaCfCfUfcccaguuuguL96 | 793 | asCfsaaaCfuGfGfgaggUfgCfauuugsusg | 1095 | CACAAAUGCACCUCCCAGUUUGC | 1397 |
| 1634050 | | | | | | |
| AD- | asasaugcAfcCfUfCfccaguuugcuL96 | 794 | asGfscaaAfcUfGfggagGfuGfcauuusgsu | 1096 | ACAAAUGCACCUCCCAGUUUGCU | 1398 |
| 1634051 | | | | | | |
| AD- | asasugcaCfcUfCfCfcaguuugcuuL96 | 795 | asAfsgcaAfaCfUfgggaGfgUfgcauususg | 1097 | CAAAUGCACCUCCCAGUUUGCUG | 1399 |
| 1634052 | | | | | | |
| AD- | asusgcacCfuCfCfCfaguuugcuguL96 | 796 | asCfsagcAfaAfCfugggAfgGfugcaususu | 1098 | AAAUGCACCUCCCAGUUUGCUGG | 1400 |
| 1634053 | | | | | | |
| AD- | usgscaccUfcCfCfAfguuugcugguL96 | 797 | asCfscagCfaAfAfcuggGfaGfgugcasusu | 1099 | AAUGCACCUCCCAGUUUGCUGGG | 1401 |
| 1634054 | | | | | | |
| AD- | csuscccaGfuUfUfGfcuggguuuauL96 | 798 | asUfsaaaCfcCfAfgcaaAfcUfgggagsgsu | 1100 | ACCUCCCAGUUUGCUGGGUUUAU | 1402 |
| 1634059 | | | | | | |
| AD- | cscscaguUfuGfCfUfggguuuauuuL96 | 799 | asAfsauaAfaCfCfcagcAfaAfcugggsasg | 1101 | CUCCCAGUUUGCUGGGUUUAUUU | 1403 |
| 1634061 | | | | | | |
| AD- | cscsaguuUfgCfUfGfgguuuauuuuL96 | 800 | asAfsaauAfaAfCfccagCfaAfacuggsgsa | 1102 | UCCCAGUUUGCUGGGUUUAUUUU | 1404 |
| 1634062 | | | | | | |
| AD- | csasguuuGfcUfGfGfguuuauuuuuL96 | 801 | asAfsaaaUfaAfAfcccaGfcAfaacugsgsg | 1103 | CCCAGUUUGCUGGGUUUAUUUUA | 1405 |
| 1634063 | | | | | | |
| AD- | asgsuuugCfuGfGfGfuuuauuuuauL96 | 802 | asUfsaaaAfuAfAfacccAfgCfaaacusgsg | 1104 | CCAGUUUGCUGGGUUUAUUUUAG | 1406 |
| 1634064 | | | | | | |
| AD- | gsusuugcUfgGfGfUfuuauuuuaguL96 | 803 | asCfsuaaAfaUfAfaaccCfaGfcaaacsusg | 1105 | CAGUUUGCUGGGUUUAUUUUAGA | 1407 |
| 1634065 | | | | | | |
| AD- | ususugcuGfgGfUfUfuauuuuagauL96 | 804 | asUfscuaAfaAfUfaaacCfcAfgcaaascsu | 1106 | AGUUUGCUGGGUUUAUUUUAGAG | 1408 |
| 1634066 | | | | | | |
| AD- | ususgcugGfgUfUfUfauuuuagaguL96 | 805 | asCfsucuAfaAfAfuaaaCfcCfagcaasasc | 1107 | GUUUGCUGGGUUUAUUUUAGAGA | 1409 |
| 1634067 | | | | | | |
| AD- | usgscuggGfuUfUfAfuuuuagagauL96 | 806 | asUfscucUfaAfAfauaaAfcCfcagcasasa | 1108 | UUUGCUGGGUUUAUUUUAGAGAA | 1410 |
| 1634068 | | | | | | |
| AD- | gsgsguuuAfuUfUfUfagagaaugguL96 | 807 | asCfscauUfcUfCfuaaaAfuAfaacccsasg | 1109 | CUGGGUUUAUUUUAGAGAAUGGG | 1411 |
| 1634071 | | | | | | |
| AD- | gsgsgaggCfaAfGfAfaccaguguuuL96 | 808 | asAfsacaCfuGfGfuucuUfgCfcucccscsa | 1110 | UGGGGAGGCAAGAACCAGUGUUU | 1412 |
| 1634072 | | | | | | |
| AD- | gsgsaggcAfaGfAfAfccaguguuuuL96 | 809 | asAfsaacAfcUfGfguucUfuGfccuccscsc | 1111 | GGGGAGGCAAGAACCAGUGUUUA | 1413 |
| 1634073 | | | | | | |
| AD- | asgsgcaaGfaAfCfCfaguguuuaguL96 | 810 | asCfsuaaAfcAfCfugguUfcUfugccuscsc | 1112 | GGAGGCAAGAACCAGUGUUUAGC | 1414 |
| 1634075 | | | | | | |
| AD- | gsgscaagAfaCfCfAfguguuuagcuL96 | 811 | asGfscuaAfaCfAfcuggUfuCfuugccsusc | 1113 | GAGGCAAGAACCAGUGUUUAGCG | 1415 |
| 1634076 | | | | | | |
| AD- | usgsuuuaGfcGfCfGfggacuacuguL96 | 812 | asCfsaguAfgUfCfccgcGfcUfaaacascsu | 1114 | AGUGUUUAGCGCGGGACUACUGU | 1416 |
| 1634088 | | | | | | |
| AD- | gsascuacUfgUfUfCfcaaaaagaauL96 | 813 | asUfsucuUfuUfUfggaaCfaGfuagucscsc | 1115 | GGGACUACUGUUCCAAAAAGAAU | 1417 |
| 1634100 | | | | | | |
| AD- | ascsuguuCfcAfAfAfaagaauuccuL96 | 814 | asGfsgaaUfuCfUfuuuuGfgAfacagusasg | 1116 | CUACUGUUCCAAAAAGAAUUCCA | 1418 |
| 1634104 | | | | | | |
| AD- | csusguucCfaAfAfAfagaauuccauL96 | 815 | asUfsggaAfuUfCfuuuuUfgGfaacagsusa | 1117 | UACUGUUCCAAAAAGAAUUCCAA | 1419 |
| 1634105 | | | | | | |
| AD- | csasaaaaGfaAfUfUfccaaccgacuL96 | 816 | asGfsucgGfuUfGfgaauUfcUfuuuugsgsa | 1118 | UCCAAAAAGAAUUCCAACCGACC | 1420 |
| 1634111 | | | | | | |
| AD- | ascscgacCfaGfCfUfuguuugugauL96 | 817 | asUfscacAfaAfCfaagcUfgGfucggususg | 1119 | CAACCGACCAGCUUGUUUGUGAA | 1421 |
| 1634123 | | | | | | |
| AD- | asasagugUfuCfCfCfuuuucaaguuL96 | 818 | asAfscuuGfaAfAfagggAfaCfacuuususu | 1120 | AAAAAGUGUUCCCUUUUCAAGUU | 1422 |
| 1634131 | | | | | | |
| AD- | asgsuguuCfcCfUfUfuucaaguuguL96 | 819 | asCfsaacUfuGfAfaaagGfgAfacacususu | 1121 | AAAGUGUUCCCUUUUCAAGUUGA | 1423 |
| 1634133 | | | | | | |
| AD- | gsusguucCfcUfUfUfucaaguugauL96 | 820 | asUfscaaCfuUfGfaaaaGfgGfaacacsusu | 1122 | AAGUGUUCCCUUUUCAAGUUGAG | 1424 |
| 1634134 | | | | | | |
| AD- | usgsuuccCfuUfUfUfcaaguugaguL96 | 821 | asCfsucaAfcUfUfgaaaAfgGfgaacascsu | 1123 | AGUGUUCCCUUUUCAAGUUGAGA | 1425 |
| 1634135 | | | | | | |
| AD- | gsusucccUfuUfUfCfaaguugagauL96 | 822 | asUfscucAfaCfUfugaaAfaGfggaacsasc | 1124 | GUGUUCCCUUUUCAAGUUGAGAA | 1426 |
| 1634136 | | | | | | |
| AD- | csasaguuGfaGfAfAfcaaaaauuguL96 | 823 | asCfsaauUfuUfUfguucUfcAfacuugsasa | 1125 | UUCAAGUUGAGAACAAAAAUUGG | 1427 |
| 1634146 | | | | | | |
| AD- | asasguugAfgAfAfCfaaaaauugguL96 | 824 | asCfscaaUfuUfUfuguuCfuCfaacuusgsa | 1126 | UCAAGUUGAGAACAAAAAUUGGG | 1428 |
| 1634147 | | | | | | |
| AD- | gsusugagAfaCfAfAfaaauuggguuL96 | 825 | asAfscccAfaUfUfuuugUfuCfucaacsusu | 1127 | AAGUUGAGAACAAAAAUUGGGUU | 1429 |
| 1634148 | | | | | | |
| AD- | ususgagaAfcAfAfAfaauuggguuuL96 | 826 | asAfsaccCfaAfUfuuuuGfuUfcucaascsu | 1128 | AGUUGAGAACAAAAAUUGGGUUU | 1430 |
| 1634149 | | | | | | |
| AD- | usgsagaaCfaAfAfAfauuggguuuuL96 | 827 | asAfsaacCfcAfAfuuuuUfgUfucucasasc | 1129 | GUUGAGAACAAAAAUUGGGUUUU | 1431 |
| 1634150 | | | | | | |
| AD- | gsasgaacAfaAfAfAfuuggguuuuuL96 | 828 | asAfsaaaCfcCfAfauuuUfuGfuucucsasa | 1130 | UUGAGAACAAAAAUUGGGUUUUA | 1432 |
| 1634151 | | | | | | |
| AD- | asgsaacaAfaAfAfUfuggguuuuauL96 | 829 | asUfsaaaAfcCfCfaauuUfuUfguucuscsa | 1131 | UGAGAACAAAAAUUGGGUUUUAA | 1433 |
| 1634152 | | | | | | |
| AD- | gsasacaaAfaAfUfUfggguuuuaauL96 | 830 | asUfsuaaAfaCfCfcaauUfuUfuguucsusc | 1132 | GAGAACAAAAAUUGGGUUUUAAA | 1434 |
| 1634153 | | | | | | |
| AD- | gsusauacAfuUfUfUfugcauugccuL96 | 831 | asGfsgcaAfuGfCfaaaaAfuGfuauacsusu | 1133 | AAGUAUACAUUUUUGCAUUGCCU | 1435 |
| 1634163 | | | | | | |
| AD- | asusacauUfuUfUfGfcauugccuuuL96 | 832 | asAfsaggCfaAfUfgcaaAfaAfuguausasc | 1134 | GUAUACAUUUUUGCAUUGCCUUC | 1436 |
| 1634165 | | | | | | |
| AD- | csasuuuuUfgCfAfUfugccuucgguL96 | 833 | asCfscgaAfgGfCfaaugCfaAfaaaugsusa | 1135 | UACAUUUUUGCAUUGCCUUCGGU | 1437 |
| 1634168 | | | | | | |
| AD- | asusuuuuGfcAfUfUfgccuucgguuL96 | 834 | asAfsccgAfaGfGfcaauGfcAfaaaausgsu | 1136 | ACAUUUUUGCAUUGCCUUCGGUU | 1438 |
| 1634169 | | | | | | |
| AD- | ususuuugCfaUfUfGfccuucgguuuL96 | 835 | asAfsaccGfaAfGfgcaaUfgCfaaaaasusg | 1137 | CAUUUUUGCAUUGCCUUCGGUUU | 1439 |
| 1634170 | | | | | | |
| AD- | ususuugcAfuUfGfCfcuucgguuuuL96 | 836 | asAfsaacCfgAfAfggcaAfuGfcaaaasasu | 1138 | AUUUUUGCAUUGCCUUCGGUUUG | 1440 |
| 1634171 | | | | | | |
| AD- | ususugcaUfuGfCfCfuucgguuuguL96 | 837 | asCfsaaaCfcGfAfaggcAfaUfgcaaasasa | 1139 | UUUUUGCAUUGCCUUCGGUUUGU | 1441 |
| 1634172 | | | | | | |
| AD- | ususgcauUfgCfCfUfucgguuuguuL96 | 838 | asAfscaaAfcCfGfaaggCfaAfugcaasasa | 1140 | UUUUGCAUUGCCUUCGGUUUGUA | 1442 |
| 1634173 | | | | | | |
| AD- | usgscauuGfcCfUfUfcgguuuguauL96 | 839 | asUfsacaAfaCfCfgaagGfcAfaugcasasa | 1141 | UUUGCAUUGCCUUCGGUUUGUAU | 1443 |
| 1634174 | | | | | | |
| AD- | gscsauugCfcUfUfCfgguuuguauuL96 | 840 | asAfsuacAfaAfCfcgaaGfgCfaaugcsasa | 1142 | UUGCAUUGCCUUCGGUUUGUAUU | 1444 |
| 1634175 | | | | | | |
| AD- | csasuugcCfuUfCfGfguuuguauuuL96 | 841 | asAfsauaCfaAfAfccgaAfgGfcaaugscsa | 1143 | UGCAUUGCCUUCGGUUUGUAUUU | 1445 |
| 1634176 | | | | | | |
| AD- | asusugccUfuCfGfGfuuuguauuuuL96 | 842 | asAfsaauAfcAfAfaccgAfaGfgcaausgsc | 1144 | GCAUUGCCUUCGGUUUGUAUUUA | 1446 |
| 1634177 | | | | | | |
| AD- | ususgccuUfcGfGfUfuuguauuuauL96 | 843 | asUfsaaaUfaCfAfaaccGfaAfggcaasusg | 1145 | CAUUGCCUUCGGUUUGUAUUUAG | 1447 |
| 1634178 | | | | | | |
| AD- | usgsccuuCfgGfUfUfuguauuuaguL96 | 844 | asCfsuaaAfuAfCfaaacCfgAfaggcasasu | 1146 | AUUGCCUUCGGUUUGUAUUUAGU | 1448 |
| 1634179 | | | | | | |
| AD- | gscscuucGfgUfUfUfguauuuaguuL96 | 845 | asAfscuaAfaUfAfcaaaCfcGfaaggcsasa | 1147 | UUGCCUUCGGUUUGUAUUUAGUG | 1449 |
| 1634180 | | | | | | |
| AD- | cscsuucgGfuUfUfGfuauuuaguguL96 | 846 | asCfsacuAfaAfUfacaaAfcCfgaaggscsa | 1148 | UGCCUUCGGUUUGUAUUUAGUGU | 1450 |
| 1634181 | | | | | | |
| AD- | csusucggUfuUfGfUfauuuaguguuL96 | 847 | asAfscacUfaAfAfuacaAfaCfcgaagsgsc | 1149 | GCCUUCGGUUUGUAUUUAGUGUC | 1451 |
| 1634182 | | | | | | |
| AD- | gsgsuuugUfaUfUfUfagugucuuguL96 | 848 | asCfsaagAfcAfCfuaaaUfaCfaaaccsgsa | 1150 | UCGGUUUGUAUUUAGUGUCUUGA | 1452 |
| 1634186 | | | | | | |
| AD- | usgsuauuUfaGfUfGfucuugaauguL96 | 849 | asCfsauuCfaAfGfacacUfaAfauacasasa | 1151 | UUUGUAUUUAGUGUCUUGAAUGU | 1453 |
| 1634190 | | | | | | |
| AD- | usasuuuaGfuGfUfCfuugaauguauL96 | 850 | asUfsacaUfuCfAfagacAfcUfaaauascsa | 1152 | UGUAUUUAGUGUCUUGAAUGUAA | 1454 |
| 1634192 | | | | | | |
| AD- | ususuaguGfuCfUfUfgaauguaaguL96 | 851 | asCfsuuaCfaUfUfcaagAfcAfcuaaasusa | 1153 | UAUUUAGUGUCUUGAAUGUAAGA | 1455 |
| 1634194 | | | | | | |
| AD- | gsuscuugAfaUfGfUfaagaacauguL96 | 852 | asCfsaugUfuCfUfuacaUfuCfaagacsasc | 1154 | GUGUCUUGAAUGUAAGAACAUGA | 1456 |
| 1634200 | | | | | | |
| AD- | gsusaagaAfcAfUfGfaccuccguguL96 | 853 | asCfsacgGfaGfGfucauGfuUfcuuacsasu | 1155 | AUGUAAGAACAUGACCUCCGUGU | 1457 |
| 1634209 | | | | | | |
| AD- | usasagaaCfaUfGfAfccuccguguuL96 | 854 | asAfscacGfgAfGfgucaUfgUfucuuascsa | 1156 | UGUAAGAACAUGACCUCCGUGUA | 1458 |
| 1634210 | | | | | | |
| AD- | asasgaacAfuGfAfCfcuccguguauL96 | 855 | asUfsacaCfgGfAfggucAfuGfuucuusasc | 1157 | GUAAGAACAUGACCUCCGUGUAG | 1459 |
| 1634211 | | | | | | |
| AD- | asgsaacaUfgAfCfCfuccguguaguL96 | 856 | asCfsuacAfcGfGfagguCfaUfguucususa | 1158 | UAAGAACAUGACCUCCGUGUAGU | 1460 |
| 1634212 | | | | | | |
| AD- | gsasacauGfaCfCfUfccguguaguuL96 | 857 | asAfscuaCfaCfGfgaggUfcAfuguucsusu | 1159 | AAGAACAUGACCUCCGUGUAGUG | 1461 |
| 1634213 | | | | | | |
| AD- | asascaugAfcCfUfCfcguguaguguL96 | 858 | asCfsacuAfcAfCfggagGfuCfauguuscsu | 1160 | AGAACAUGACCUCCGUGUAGUGU | 1462 |
| 1634214 | | | | | | |
| AD- | ascsaugaCfcUfCfCfguguaguguuL96 | 859 | asAfscacUfaCfAfcggaGfgUfcaugususc | 1161 | GAACAUGACCUCCGUGUAGUGUC | 1463 |
| 1634215 | | | | | | |
| AD- | usgsaccuCfcGfUfGfuagugucuguL96 | 860 | asCfsagaCfaCfUfacacGfgAfggucasusg | 1162 | CAUGACCUCCGUGUAGUGUCUGU | 1464 |
| 1634218 | | | | | | |
| AD- | cscsguguAfgUfGfUfcuguaauacuL96 | 861 | asGfsuauUfaCfAfgacaCfuAfcacggsasg | 1163 | CUCCGUGUAGUGUCUGUAAUACC | 1465 |
| 1634224 | | | | | | |
| AD- | csgsuguaGfuGfUfCfuguaauaccuL96 | 862 | asGfsguaUfuAfCfagacAfcUfacacgsgsa | 1164 | UCCGUGUAGUGUCUGUAAUACCU | 1466 |
| 1634225 | | | | | | |
| AD- | gsusguagUfgUfCfUfguaauaccuuL96 | 863 | asAfsgguAfuUfAfcagaCfaCfuacacsgsg | 1165 | CCGUGUAGUGUCUGUAAUACCUU | 1467 |
| 1634226 | | | | | | |
| AD- | usgsuaguGfuCfUfGfuaauaccuuuL96 | 864 | asAfsaggUfaUfUfacagAfcAfcuacascsg | 1166 | CGUGUAGUGUCUGUAAUACCUUA | 1468 |
| 1634227 | | | | | | |
| AD- | asgsugucUfgUfAfAfuaccuuaguuL96 | 865 | asAfscuaAfgGfUfauuaCfaGfacacusasc | 1167 | GUAGUGUCUGUAAUACCUUAGUU | 1469 |
| 1634230 | | | | | | |
| AD- | gsusgucuGfuAfAfUfaccuuaguuuL96 | 866 | asAfsacuAfaGfGfuauuAfcAfgacacsusa | 1168 | UAGUGUCUGUAAUACCUUAGUUU | 1470 |
| 1634231 | | | | | | |
| AD- | usgsucugUfaAfUfAfccuuaguuuuL96 | 867 | asAfsaacUfaAfGfguauUfaCfagacascsu | 1169 | AGUGUCUGUAAUACCUUAGUUUU | 1471 |
| 1634232 | | | | | | |
| AD- | gsuscuguAfaUfAfCfcuuaguuuuuL96 | 868 | asAfsaaaCfuAfAfgguaUfuAfcagacsasc | 1170 | GUGUCUGUAAUACCUUAGUUUUU | 1472 |
| 1634233 | | | | | | |
| AD- | ususuccaCfaGfAfUfgcuugugauuL96 | 869 | asAfsucaCfaAfGfcaucUfgUfggaaasasa | 1171 | UUUUUCCACAGAUGCUUGUGAUU | 1473 |
| 1634234 | | | | | | |
| AD- | csascagaUfgCfUfUfgugauuuuuuL96 | 870 | asAfsaaaAfuCfAfcaagCfaUfcugugsgsa | 1172 | UCCACAGAUGCUUGUGAUUUUUG | 1474 |
| 1634238 | | | | | | |
| AD- | ascsagauGfcUfUfGfugauuuuuguL96 | 871 | asCfsaaaAfaUfCfacaaGfcAfucugusgsg | 1173 | CCACAGAUGCUUGUGAUUUUUGA | 1475 |
| 1634239 | | | | | | |
| AD- | csasgaugCfuUfGfUfgauuuuugauL96 | 872 | asUfscaaAfaAfUfcacaAfgCfaucugsusg | 1174 | CACAGAUGCUUGUGAUUUUUGAA | 1476 |
| 1634240 | | | | | | |
| AD- | asgsaugcUfuGfUfGfauuuuugaauL96 | 873 | asUfsucaAfaAfAfucacAfaGfcaucusgsu | 1175 | ACAGAUGCUUGUGAUUUUUGAAC | 1477 |
| 1634241 | | | | | | |
| AD- | gsasugcuUfgUfGfAfuuuuugaacuL96 | 874 | asGfsuucAfaAfAfaucaCfaAfgcaucsusg | 1176 | CAGAUGCUUGUGAUUUUUGAACA | 1478 |
| 1634242 | | | | | | |
| AD- | usgsugauUfuUfUfGfaacaauacguL96 | 875 | asCfsguaUfuGfUfucaaAfaAfucacasasg | 1177 | CUUGUGAUUUUUGAACAAUACGU | 1479 |
| 1634248 | | | | | | |
| AD- | gsusgauuUfuUfGfAfacaauacguuL96 | 876 | asAfscguAfuUfGfuucaAfaAfaucacsasa | 1178 | UUGUGAUUUUUGAACAAUACGUG | 1480 |
| 1634249 | | | | | | |
| AD- | usgsauuuUfuGfAfAfcaauacguguL96 | 877 | asCfsacgUfaUfUfguucAfaAfaaucascsa | 1179 | UGUGAUUUUUGAACAAUACGUGA | 1481 |
| 1634250 | | | | | | |
| AD- | gsasuuuuUfgAfAfCfaauacgugauL96 | 878 | asUfscacGfuAfUfuguuCfaAfaaaucsasc | 1180 | GUGAUUUUUGAACAAUACGUGAA | 1482 |
| 1634251 | | | | | | |
| AD- | asusuuuuGfaAfCfAfauacgugaauL96 | 879 | asUfsucaCfgUfAfuuguUfcAfaaaauscsa | 1181 | UGAUUUUUGAACAAUACGUGAAA | 1483 |
| 1634252 | | | | | | |
| AD- | usgsaacaAfuAfCfGfugaaagauguL96 | 880 | asCfsaucUfuUfCfacguAfuUfguucasasa | 1182 | UUUGAACAAUACGUGAAAGAUGC | 1484 |
| 1634257 | | | | | | |
| AD- | gsasugcaAfgCfAfCfcugaauuucuL96 | 881 | asGfsaaaUfuCfAfggugCfuUfgcaucsusu | 1183 | AAGAUGCAAGCACCUGAAUUUCU | 1485 |
| 1634273 | | | | | | |
| AD- | asusgcaaGfcAfCfCfugaauuucuuL96 | 882 | asAfsgaaAfuUfCfagguGfcUfugcauscsu | 1184 | AGAUGCAAGCACCUGAAUUUCUG | 1486 |
| 1634274 | | | | | | |
| AD- | usgscaagCfaCfCfUfgaauuucuguL96 | 883 | asCfsagaAfaUfUfcaggUfgCfuugcasusc | 1185 | GAUGCAAGCACCUGAAUUUCUGU | 1487 |
| 1634275 | | | | | | |
| AD- | gscsaagcAfcCfUfGfaauuucuguuL96 | 884 | asAfscagAfaAfUfucagGfuGfcuugcsasu | 1186 | AUGCAAGCACCUGAAUUUCUGUU | 1488 |
| 1634276 | | | | | | |
| AD- | csasagcaCfcUfGfAfauuucuguuuL96 | 885 | asAfsacaGfaAfAfuucaGfgUfgcuugscsa | 1187 | UGCAAGCACCUGAAUUUCUGUUU | 1489 |
| 1634277 | | | | | | |
| AD- | asasgcacCfuGfAfAfuuucuguuuuL96 | 886 | asAfsaacAfgAfAfauucAfgGfugcuusgsc | 1188 | GCAAGCACCUGAAUUUCUGUUUG | 1490 |
| 1634278 | | | | | | |
| AD- | asgscaccUfgAfAfUfuucuguuuguL96 | 887 | asCfsaaaCfaGfAfaauuCfaGfgugcususg | 1189 | CAAGCACCUGAAUUUCUGUUUGA | 1491 |
| 1634279 | | | | | | |
| AD- | gscsaccuGfaAfUfUfucuguuugauL96 | 888 | asUfscaaAfcAfGfaaauUfcAfggugcsusu | 1190 | AAGCACCUGAAUUUCUGUUUGAA | 1492 |
| 1634280 | | | | | | |
| AD- | csasccugAfaUfUfUfcuguuugaauL96 | 889 | asUfsucaAfaCfAfgaaaUfuCfaggugscsu | 1191 | AGCACCUGAAUUUCUGUUUGAAU | 1493 |
| 1634281 | | | | | | |
| AD- | ascscugaAfuUfUfCfuguuugaauuL96 | 890 | asAfsuucAfaAfCfagaaAfuUfcaggusgsc | 1192 | GCACCUGAAUUUCUGUUUGAAUG | 1494 |
| 1634282 | | | | | | |
| AD- | cscsugaaUfuUfCfUfguuugaauguL96 | 891 | asCfsauuCfaAfAfcagaAfaUfucaggsusg | 1193 | CACCUGAAUUUCUGUUUGAAUGC | 1495 |
| 1634283 | | | | | | |
| AD- | usgsaauuUfcUfGfUfuugaaugcguL96 | 892 | asCfsgcaUfuCfAfaacaGfaAfauucasgsg | 1194 | CCUGAAUUUCUGUUUGAAUGCGG | 1496 |
| 1634285 | | | | | | |
| AD- | gsasauuuCfuGfUfUfugaaugcgguL96 | 893 | asCfscgcAfuUfCfaaacAfgAfaauucsasg | 1195 | CUGAAUUUCUGUUUGAAUGCGGA | 1497 |
| 1634286 | | | | | | |
| AD- | asasuuucUfgUfUfUfgaaugcggauL96 | 894 | asUfsccgCfaUfUfcaaaCfaGfaaauuscsa | 1196 | UGAAUUUCUGUUUGAAUGCGGAA | 1498 |
| 1634287 | | | | | | |
| AD- | ususgaauGfcGfGfAfaccauagcuuL96 | 895 | asAfsgcuAfuGfGfuuccGfcAfuucaasasc | 1197 | GUUUGAAUGCGGAACCAUAGCUG | 1499 |
| 1634296 | | | | | | |
| AD- | usgsaaugCfgGfAfAfccauagcuguL96 | 896 | asCfsagcUfaUfGfguucCfgCfauucasasa | 1198 | UUUGAAUGCGGAACCAUAGCUGG | 1500 |
| 1634297 | | | | | | |
| AD- | gsasaugcGfgAfAfCfcauagcugguL96 | 897 | asCfscagCfuAfUfgguuCfcGfcauucsasa | 1199 | UUGAAUGCGGAACCAUAGCUGGU | 1501 |
| 1634298 | | | | | | |
| AD- | csgsgaacCfaUfAfGfcugguuauuuL96 | 898 | asAfsauaAfcCfAfgcuaUfgGfuuccgscsa | 1200 | UGCGGAACCAUAGCUGGUUAUUU | 1502 |
| 1634303 | | | | | | |
| AD- | gsgsaaccAfuAfGfCfugguuauuuuL96 | 899 | asAfsaauAfaCfCfagcuAfuGfguuccsgsc | 1201 | GCGGAACCAUAGCUGGUUAUUUC | 1503 |
| 1634304 | | | | | | |
| AD- | gsasaccaUfaGfCfUfgguuauuucuL96 | 900 | asGfsaaaUfaAfCfcagcUfaUfgguucscsg | 1202 | CGGAACCAUAGCUGGUUAUUUCU | 1504 |
| 1634305 | | | | | | |
| AD- | asasccauAfgCfUfGfguuauuucuuL96 | 901 | asAfsgaaAfuAfAfccagCfuAfugguuscsc | 1203 | GGAACCAUAGCUGGUUAUUUCUC | 1505 |
| 1634306 | | | | | | |
| AD- | ascscauaGfcUfGfGfuuauuucucuL96 | 902 | asGfsagaAfaUfAfaccaGfcUfauggususc | 1204 | GAACCAUAGCUGGUUAUUUCUCC | 1506 |
| 1634307 | | | | | | |
| AD- | cscsauagCfuGfGfUfuauuucuccuL96 | 903 | asGfsgagAfaAfUfaaccAfgCfuauggsusu | 1205 | AACCAUAGCUGGUUAUUUCUCCC | 1507 |
| 1634308 | | | | | | |
| AD- | csasuagcUfgGfUfUfauuucucccuL96 | 904 | asGfsggaGfaAfAfuaacCfaGfcuaugsgsu | 1206 | ACCAUAGCUGGUUAUUUCUCCCU | 1508 |
| 1634309 | | | | | | |
| AD- | csusgguuAfuUfUfCfucccuuguguL96 | 905 | asCfsacaAfgGfGfagaaAfuAfaccagscsu | 1207 | AGCUGGUUAUUUCUCCCUUGUGU | 1509 |
| 1634314 | | | | | | |
| AD- | usgsguuaUfuUfCfUfcccuuguguuL96 | 906 | asAfscacAfaGfGfgagaAfaUfaaccasgsc | 1208 | GCUGGUUAUUUCUCCCUUGUGUU | 1510 |
| 1634315 | | | | | | |
| AD- | gsgsuuauUfuCfUfCfccuuguguuuL96 | 907 | asAfsacaCfaAfGfggagAfaAfuaaccsasg | 1209 | CUGGUUAUUUCUCCCUUGUGUUA | 1511 |
| 1634316 | | | | | | |
| AD- | ususauuuCfuCfCfCfuuguguuaguL96 | 908 | asCfsuaaCfaCfAfagggAfgAfaauaascsc | 1210 | GGUUAUUUCUCCCUUGUGUUAGU | 1512 |
| 1634318 | | | | | | |
| AD- | usasuuucUfcCfCfUfuguguuaguuL96 | 909 | asAfscuaAfcAfCfaaggGfaGfaaauasasc | 1211 | GUUAUUUCUCCCUUGUGUUAGUA | 1513 |
| 1634319 | | | | | | |
| AD- | asusuucuCfcCfUfUfguguuaguauL96 | 910 | asUfsacuAfaCfAfcaagGfgAfgaaausasa | 1212 | UUAUUUCUCCCUUGUGUUAGUAA | 1514 |
| 1634320 | | | | | | |
| AD- | ususucucCfcUfUfGfuguuaguaauL96 | 911 | asUfsuacUfaAfCfacaaGfgGfagaaasusa | 1213 | UAUUUCUCCCUUGUGUUAGUAAU | 1515 |
| 1634321 | | | | | | |
| AD- | uscsccuuGfuGfUfUfaguaauaaauL96 | 912 | asUfsuuaUfuAfCfuaacAfcAfagggasgsa | 1214 | UCUCCCUUGUGUUAGUAAUAAAC | 1516 |
| 1634325 | | | | | | |
| AD- | cscscuugUfgUfUfAfguaauaaacuL96 | 913 | asGfsuuuAfuUfAfcuaaCfaCfaagggsasg | 1215 | CUCCCUUGUGUUAGUAAUAAACG | 1517 |
| 1634326 | | | | | | |
| AD- | cscsuuguGfuUfAfGfuaauaaacguL96 | 914 | asCfsguuUfaUfUfacuaAfcAfcaaggsgsa | 1216 | UCCCUUGUGUUAGUAAUAAACGU | 1518 |
| 1634327 | | | | | | |
| AD- | csusugugUfuAfGfUfaauaaacguuL96 | 915 | asAfscguUfuAfUfuacuAfaCfacaagsgsg | 1217 | CCCUUGUGUUAGUAAUAAACGUC | 1519 |
| 1634328 | | | | | | |
| AD- | ususguguUfaGfUfAfauaaacgucuL96 | 916 | asGfsacgUfuUfAfuuacUfaAfcacaasgsg | 1218 | CCUUGUGUUAGUAAUAAACGUCU | 1520 |
| 1634329 | | | | | | |
| AD- | usgsuguuAfgUfAfAfuaaacgucuuL96 | 917 | asAfsgacGfuUfUfauuaCfuAfacacasasg | 1219 | CUUGUGUUAGUAAUAAACGUCUU | 1521 |
| 1634330 | | | | | | |
| AD- | gsusguuaGfuAfAfUfaaacgucuuuL96 | 918 | asAfsagaCfgUfUfuauuAfcUfaacacsasa | 1220 | UUGUGUUAGUAAUAAACGUCUUG | 1522 |
| 1634331 | | | | | | |
| AD- | usgsuuagUfaAfUfAfaacgucuuguL96 | 919 | asCfsaagAfcGfUfuuauUfaCfuaacascsa | 1221 | UGUGUUAGUAAUAAACGUCUUGC | 1523 |
| 1634332 | | | | | | |
| AD- | gsusuaguAfaUfAfAfacgucuugcuL96 | 920 | asGfscaaGfaCfGfuuuaUfuAfcuaacsasc | 1222 | GUGUUAGUAAUAAACGUCUUGCC | 1524 |
| 1634333 | | | | | | |
| AD- | ususaguaAfuAfAfAfcgucuugccuL96 | 921 | asGfsgcaAfgAfCfguuuAfuUfacuaascsa | 1223 | UGUUAGUAAUAAACGUCUUGCCA | 1525 |
| 1634334 | | | | | | |
| AD- | asasacguCfuUfGfCfcacaauaaguL96 | 922 | asCfsuuaUfuGfUfggcaAfgAfcguuusasu | 1224 | AUAAACGUCUUGCCACAAUAAGC | 1526 |
| 1634342 | | | | | | |
| AD- | asascgucUfuGfCfCfacaauaagcuL96 | 923 | asGfscuuAfuUfGfuggcAfaGfacguususa | 1225 | UAAACGUCUUGCCACAAUAAGCC | 1527 |
| 1634343 | | | | | | |
| AD- | ascsgucuUfgCfCfAfcaauaagccuL96 | 924 | asGfsgcuUfaUfUfguggCfaAfgacgususu | 1226 | AAACGUCUUGCCACAAUAAGCCU | 1528 |
| 1634344 | | | | | | |
| AD- | asgsuugaGfaAfCfAfaaaauuggguL96 | 925 | asCfsccaAfuUfUfuuguUfcUfcaacususg | 1227 | CAAGUUGAGAACAAAAAUUGGGU | 1529 |
| 68585 | | | | | | |

TABLE 4
Unmodified Sense and Antisense Strand Sequences of Angiotensinogen (AGT) dsRNA Agents

| Duplex | | SEQ | Range in | | SEQ | |
|---|---|---|---|---|---|---|
| Name | Sense Sequence 5′ to 3′ | ID NO: | NM_001384479.1 | Antisense Sequence 5′ to 3′ | ID NO: | NM_001384479.1 |
| AD- | AGCCUGAGGGCCACCAUCCUU | 1530 | 86-106 | AAGGAUGGUGGCCCUCAGGCUCA | 1738 | 84-106 |
| 1657992 | | | | | | |
| AD- | CCUGAGGGCCACCAUCCUCUU | 1531 | 88-108 | AAGAGGAUGGUGGCCCUCAGGCU | 1739 | 86-108 |
| 1657994 | | | | | | |
| AD- | AGGGCCACCAUCCUCUGCCUU | 1532 | 92-112 | AAGGCAGAGGATGGUGGCCCUCA | 1740 | 90-112 |
| 1657998 | | | | | | |
| AD- | GUGACCGGGUGUACAUACACU | 1533 | 138-158 | AGUGTATGUACACCCGGUCACCU | 1741 | 136-158 |
| 1658030 | | | | | | |
| AD- | CUUCCACCUCGUCAUCCACAU | 1534 | 160-180 | ATGUGGAUGACGAGGUGGAAGGG | 1742 | 158-180 |
| 1658032 | | | | | | |
| AD- | UUCCACCUCGUCAUCCACAAU | 1535 | 161-181 | ATUGTGGAUGACGAGGUGGAAGG | 1743 | 159-181 |
| 1658033 | | | | | | |
| AD- | UCCACCUCGUCAUCCACAAUU | 1536 | 162-182 | AAUUGUGGAUGACGAGGUGGAAG | 1744 | 160-182 |
| 1658034 | | | | | | |
| AD- | CCACCUCGUCAUCCACAAUGU | 1537 | 163-183 | ACAUTGTGGAUGACGAGGUGGAA | 1745 | 161-183 |
| 1658035 | | | | | | |
| AD- | CACCUCGUCAUCCACAAUGAU | 1538 | 164-184 | ATCATUGUGGATGACGAGGUGGA | 1746 | 162-184 |
| 1658036 | | | | | | |
| AD- | ACCUCGUCAUCCACAAUGAGU | 1539 | 165-185 | ACUCAUTGUGGAUGACGAGGUGG | 1747 | 163-185 |
| 1658037 | | | | | | |
| AD- | CCUCGUCAUCCACAAUGAGAU | 1540 | 166-186 | ATCUCATUGUGGAUGACGAGGUG | 1748 | 164-186 |
| 1658038 | | | | | | |
| AD- | CUCGUCAUCCACAAUGAGAGU | 1541 | 167-187 | ACUCTCAUUGUGGAUGACGAGGU | 1749 | 165-187 |
| 1658039 | | | | | | |
| AD- | UCGUCAUCCACAAUGAGAGUU | 1542 | 168-188 | AACUCUCAUUGTGGAUGACGAGG | 1750 | 166-188 |
| 1658040 | | | | | | |
| AD- | CGUCAUCCACAAUGAGAGUAU | 1543 | 169-189 | ATACTCTCAUUGUGGAUGACGAG | 1751 | 167-189 |
| 1658041 | | | | | | |
| AD- | GUCAUCCACAAUGAGAGUACU | 1544 | 170-190 | AGUACUCUCAUTGUGGAUGACGA | 1752 | 168-190 |
| 1658042 | | | | | | |
| AD- | UCAUCCACAAUGAGAGUACCU | 1545 | 171-191 | AGGUACTCUCATUGUGGAUGACG | 1753 | 169-191 |
| 1658043 | | | | | | |
| AD- | CAUCCACAAUGAGAGUACCUU | 1546 | 172-192 | AAGGTACUCUCAUUGUGGAUGAC | 1754 | 170-192 |
| 1658044 | | | | | | |
| AD- | AUCCACAAUGAGAGUACCUGU | 32 | 173-193 | ACAGGUACUCUCAUUGUGGAUGA | 334 | 171-193 |
| 1658045 | | | | | | |
| AD- | UCCACAAUGAGAGUACCUGUU | 1547 | 174-194 | AACAGGTACUCTCAUUGUGGAUG | 1755 | 172-194 |
| 1658046 | | | | | | |
| AD- | CCACAAUGAGAGUACCUGUGU | 1548 | 175-195 | ACACAGGUACUCUCAUUGUGGAU | 1756 | 173-195 |
| 1658047 | | | | | | |
| AD- | CACAAUGAGAGUACCUGUGAU | 1549 | 176-196 | ATCACAGGUACTCUCAUUGUGGA | 1757 | 174-196 |
| 1658048 | | | | | | |
| AD- | ACAAUGAGAGUACCUGUGAGU | 33 | 177-197 | ACUCACAGGUACUCUCAUUGUGG | 335 | 175-197 |
| 1658049 | | | | | | |
| AD- | CAAUGAGAGUACCUGUGAGCU | 1550 | 178-198 | AGCUCACAGGUACUCUCAUUGUG | 1758 | 176-198 |
| 1658050 | | | | | | |
| AD- | AAUGAGAGUACCUGUGAGCAU | 1551 | 179-199 | ATGCTCACAGGTACUCUCAUUGU | 1759 | 177-199 |
| 1658051 | | | | | | |
| AD- | AUGAGAGUACCUGUGAGCAGU | 1552 | 180-200 | ACUGCUCACAGGUACUCUCAUUG | 1760 | 178-200 |
| 1658052 | | | | | | |
| AD- | UGAGAGUACCUGUGAGCAGCU | 1553 | 181-201 | AGCUGCTCACAGGUACUCUCAUU | 1761 | 179-201 |
| 1658053 | | | | | | |
| AD- | GAGAGUACCUGUGAGCAGCUU | 1554 | 182-202 | AAGCTGCUCACAGGUACUCUCAU | 1762 | 180-202 |
| 1658054 | | | | | | |
| AD- | AGAGUACCUGUGAGCAGCUGU | 1555 | 183-203 | ACAGCUGCUCACAGGUACUCUCA | 1763 | 181-203 |
| 1658055 | | | | | | |
| AD- | GAGUACCUGUGAGCAGCUGGU | 1556 | 184-204 | ACCAGCTGCUCACAGGUACUCUC | 1764 | 182-204 |
| 1658056 | | | | | | |
| AD- | AGUACCUGUGAGCAGCUGGCU | 1557 | 185-205 | AGCCAGCUGCUCACAGGUACUCU | 1765 | 183-205 |
| 1658057 | | | | | | |
| AD- | GUACCUGUGAGCAGCUGGCAU | 1558 | 186-206 | ATGCCAGCUGCTCACAGGUACUC | 1766 | 184-206 |
| 1658058 | | | | | | |
| AD- | UACCUGUGAGCAGCUGGCAAU | 1559 | 187-207 | ATUGCCAGCUGCUCACAGGUACU | 1767 | 185-207 |
| 1658059 | | | | | | |
| AD- | AAUGGUCGGGAUGCUGGCCAU | 1560 | 352-372 | ATGGCCAGCAUCCCGACCAUUGC | 1768 | 350-372 |
| 1658184 | | | | | | |
| AD- | AUGGUCGGGAUGCUGGCCAAU | 1561 | 353-373 | ATUGGCCAGCATCCCGACCAUUG | 1769 | 351-373 |
| 1658185 | | | | | | |
| AD- | UGGUCGGGAUGCUGGCCAACU | 1562 | 354-374 | AGUUGGCCAGCAUCCCGACCAUU | 1770 | 352-374 |
| 1658186 | | | | | | |
| AD- | GGUCGGGAUGCUGGCCAACUU | 1563 | 355-375 | AAGUTGGCCAGCAUCCCGACCAU | 1771 | 353-375 |
| 1658187 | | | | | | |
| AD- | GUCGGGAUGCUGGCCAACUUU | 1564 | 356-376 | AAAGTUGGCCAGCAUCCCGACCA | 1772 | 354-376 |
| 1658188 | | | | | | |
| AD- | UCGGGAUGCUGGCCAACUUCU | 1565 | 357-377 | AGAAGUTGGCCAGCAUCCCGACC | 1773 | 355-377 |
| 1658189 | | | | | | |
| AD- | CGGGAUGCUGGCCAACUUCUU | 1566 | 358-378 | AAGAAGTUGGCCAGCAUCCCGAC | 1774 | 356-378 |
| 1658190 | | | | | | |
| AD- | GGGAUGCUGGCCAACUUCUUU | 49 | 359-379 | AAAGAAGUUGGCCAGCAUCCCGA | 351 | 357-379 |
| 1658191 | | | | | | |
| AD- | GGAUGCUGGCCAACUUCUUGU | 1567 | 360-380 | ACAAGAAGUUGGCCAGCAUCCCG | 1775 | 358-380 |
| 1658192 | | | | | | |
| AD- | GAUGCUGGCCAACUUCUUGGU | 1568 | 361-381 | ACCAAGAAGUUGGCCAGCAUCCC | 1776 | 359-381 |
| 1658193 | | | | | | |
| AD- | GCUGGCCAACUUCUUGGGCUU | 50 | 364-384 | AAGCCCAAGAAGUUGGCCAGCAU | 352 | 362-384 |
| 1658196 | | | | | | |
| AD- | CUGGCCAACUUCUUGGGCUUU | 1569 | 365-385 | AAAGCCCAAGAAGUUGGCCAGCA | 1777 | 363-385 |
| 1658197 | | | | | | |
| AD- | GCCAACUUCUUGGGCUUCCGU | 1570 | 368-388 | ACGGAAGCCCAAGAAGUUGGCCA | 1778 | 366-388 |
| 1658200 | | | | | | |
| AD- | CCAACUUCUUGGGCUUCCGUU | 1571 | 369-389 | AACGGAAGCCCAAGAAGUUGGCC | 1779 | 367-389 |
| 1658201 | | | | | | |
| AD- | CAACUUCUUGGGCUUCCGUAU | 51 | 370-390 | ATACGGAAGCCCAAGAAGUUGGC | 1780 | 368-390 |
| 1658202 | | | | | | |
| AD- | AACUUCUUGGGCUUCCGUAUU | 52 | 371-391 | AAUACGGAAGCCCAAGAAGUUGG | 354 | 369-391 |
| 1658203 | | | | | | |
| AD- | ACUUCUUGGGCUUCCGUAUAU | 53 | 372-392 | ATAUACGGAAGCCCAAGAAGUUG | 1781 | 370-392 |
| 1658204 | | | | | | |
| AD- | CUUCUUGGGCUUCCGUAUAUU | 1572 | 373-393 | AAUATACGGAAGCCCAAGAAGUU | 1782 | 371-393 |
| 1658205 | | | | | | |
| AD- | UUCUUGGGCUUCCGUAUAUAU | 1573 | 374-394 | ATAUAUACGGAAGCCCAAGAAGU | 1783 | 372-394 |
| 1658206 | | | | | | |
| AD- | UCUUGGGCUUCCGUAUAUAUU | 54 | 375-395 | AAUATATACGGAAGCCCAAGAAG | 1784 | 373-395 |
| 1658207 | | | | | | |
| AD- | CUUGGGCUUCCGUAUAUAUGU | 1574 | 376-396 | ACAUAUAUACGGAAGCCCAAGAA | 1785 | 374-396 |
| 1658208 | | | | | | |
| AD- | UUGGGCUUCCGUAUAUAUGGU | 55 | 377-397 | ACCATATAUACGGAAGCCCAAGA | 1786 | 375-397 |
| 1658209 | | | | | | |
| AD- | UGGGCUUCCGUAUAUAUGGCU | 1575 | 378-398 | AGCCAUAUAUACGGAAGCCCAAG | 1787 | 376-398 |
| 1658210 | | | | | | |
| AD- | GGGCUUCCGUAUAUAUGGCAU | 1576 | 379-399 | ATGCCATAUAUACGGAAGCCCAA | 1788 | 377-399 |
| 1658211 | | | | | | |
| AD- | GGCUUCCGUAUAUAUGGCAUU | 1577 | 380-400 | AAUGCCAUAUATACGGAAGCCCA | 1789 | 378-400 |
| 1658212 | | | | | | |
| AD- | GCUUCCGUAUAUAUGGCAUGU | 1578 | 381-401 | ACAUGCCAUAUAUACGGAAGCCC | 1790 | 379-401 |
| 1658213 | | | | | | |
| AD- | UAUAUAUGGCAUGCACAGUGU | 1579 | 388-408 | ACACTGTGCAUGCCAUAUAUACG | 1791 | 386-408 |
| 1658220 | | | | | | |
| AD- | AUAUAUGGCAUGCACAGUGAU | 1580 | 389-409 | ATCACUGUGCATGCCAUAUAUAC | 1792 | 387-409 |
| 1658221 | | | | | | |
| AD- | UAUAUGGCAUGCACAGUGAGU | 56 | 390-410 | ACUCACTGUGCAUGCCAUAUAUA | 1793 | 388-410 |
| 1658222 | | | | | | |
| AD- | AUAUGGCAUGCACAGUGAGCU | 1581 | 391-411 | AGCUCACUGUGCAUGCCAUAUAU | 1794 | 389-411 |
| 1658223 | | | | | | |
| AD- | UAUGGCAUGCACAGUGAGCUU | 1582 | 392-412 | AAGCTCACUGUGCAUGCCAUAUA | 1795 | 390-412 |
| 1658224 | | | | | | |
| AD- | AUGGCAUGCACAGUGAGCUAU | 1583 | 393-413 | ATAGCUCACUGTGCAUGCCAUAU | 1796 | 391-413 |
| 1658225 | | | | | | |
| AD- | UGGCAUGCACAGUGAGCUAUU | 1584 | 394-414 | AAUAGCTCACUGUGCAUGCCAUA | 1797 | 392-414 |
| 1658226 | | | | | | |
| AD- | GGCAUGCACAGUGAGCUAUGU | 1585 | 395-415 | ACAUAGCUCACTGUGCAUGCCAU | 1798 | 393-415 |
| 1658227 | | | | | | |
| AD- | GCAUGCACAGUGAGCUAUGGU | 57 | 396-416 | ACCATAGCUCACUGUGCAUGCCA | 1799 | 394-416 |
| 1658228 | | | | | | |
| AD- | UGGCACCCUGGCCUCUCUCUU | 1586 | 460-480 | AAGAGAGAGGCCAGGGUGCCAAA | 1800 | 458-480 |
| 1658242 | | | | | | |
| AD- | GGCACCCUGGCCUCUCUCUAU | 1587 | 461-481 | ATAGAGAGAGGCCAGGGUGCCAA | 1801 | 459-481 |
| 1658243 | | | | | | |
| AD- | GACAGGCUACAGGCAAUCCUU | 59 | 506-526 | AAGGAUTGCCUGUAGCCUGUCAG | 1802 | 504-526 |
| 1658288 | | | | | | |
| AD- | ACAGGCUACAGGCAAUCCUGU | 60 | 507-527 | ACAGGATUGCCTGUAGCCUGUCA | 1803 | 505-527 |
| 1658289 | | | | | | |
| AD- | UUCCUUGGAAGGACAAGAACU | 1588 | 531-551 | AGUUCUTGUCCTUCCAAGGAACA | 1804 | 529-551 |
| 1658313 | | | | | | |
| AD- | CCUUGGAAGGACAAGAACUGU | 67 | 533-553 | ACAGTUCUUGUCCUUCCAAGGAA | 1805 | 531-553 |
| 1658315 | | | | | | |
| AD- | CUUGGAAGGACAAGAACUGCU | 1589 | 534-554 | AGCAGUTCUUGTCCUUCCAAGGA | 1806 | 532-554 |
| 1658316 | | | | | | |
| AD- | CACCUGAAGCAGCCGUUUGUU | 68 | 692-712 | AACAAACGGCUGCUUCAGGUGCA | 370 | 690-712 |
| 1658448 | | | | | | |
| AD- | CUGAAGCAGCCGUUUGUGCAU | 1590 | 695-715 | ATGCACAAACGGCUGCUUCAGGU | 1807 | 693-715 |
| 1658451 | | | | | | |
| AD- | UUUGUGCAGGGCCUGGCUCUU | 159 | 707-727 | AAGAGCCAGGCCCUGCACAAACG | 1808 | 705-727 |
| 1658463 | | | | | | |
| AD- | UUGUGCAGGGCCUGGCUCUCU | 1592 | 708-728 | AGAGAGCCAGGCCCUGCACAAAC | 1809 | 706-728 |
| 1658464 | | | | | | |
| AD- | UGUGCAGGGCCUGGCUCUCUU | 1593 | 709-729 | AAGAGAGCCAGGCCCUGCACAAA | 1810 | 707-729 |
| 1658465 | | | | | | |
| AD- | GUGCAGGGCCUGGCUCUCUAU | 1594 | 710-730 | ATAGAGAGCCAGGCCCUGCACAA | 1811 | 708-730 |
| 1658466 | | | | | | |
| AD- | UGCAGGGCCUGGCUCUCUAUU | 1595 | 711-731 | AAUAGAGAGCCAGGCCCUGCACA | 1812 | 709-731 |
| 1658467 | | | | | | |
| AD- | ACGCUCUCUGGACUUCACAGU | 1596 | 748-768 | ACUGTGAAGUCCAGAGAGCGUGG | 1813 | 746-768 |
| 1658484 | | | | | | |
| AD- | CGCUCUCUGGACUUCACAGAU | 1597 | 749-769 | ATCUGUGAAGUCCAGAGAGCGUG | 1814 | 747-769 |
| 1658485 | | | | | | |
| AD- | CUGAGAAGAUUGACAGGUUCU | 1598 | 783-803 | AGAACCTGUCAAUCUUCUCAGCA | 1815 | 781-803 |
| 1658519 | | | | | | |
| AD- | UGAGAAGAUUGACAGGUUCAU | 1599 | 784-804 | ATGAACCUGUCAAUCUUCUCAGC | 1816 | 782-804 |
| 1658520 | | | | | | |
| AD | GAGAAGAUUGACAGGUUCAUU | 1600 | 785-805 | AAUGAACCUGUCAAUCUUCUCAG | 1817 | 783-805 |
| 1658521 | | | | | | |
| AD- | AGAAGAUUGACAGGUUCAUGU | 1601 | 786-806 | ACAUGAACCUGTCAAUCUUCUCA | 1818 | 784-806 |
| 1658522 | | | | | | |
| AD- | GAAGAUUGACAGGUUCAUGCU | 1602 | 787-807 | AGCATGAACCUGUCAAUCUUCUC | 1819 | 785-807 |
| 1658523 | | | | | | |
| AD- | AAGAUUGACAGGUUCAUGCAU | 1603 | 788-808 | ATGCAUGAACCTGUCAAUCUUCU | 1820 | 786-808 |
| 1658524 | | | | | | |
| AD- | AGAUUGACAGGUUCAUGCAGU | 1604 | 789-809 | ACUGCATGAACCUGUCAAUCUUC | 1821 | 787-809 |
| 1658525 | | | | | | |
| AD- | GAUUGACAGGUUCAUGCAGGU | 1605 | 790-810 | ACCUGCAUGAACCUGUCAAUCUU | 1822 | 788-810 |
| 1658526 | | | | | | |
| AD- | AUUGACAGGUUCAUGCAGGCU | 1606 | 791-811 | AGCCTGCAUGAACCUGUCAAUCU | 1823 | 789-811 |
| 1658527 | | | | | | |
| AD- | UUGACAGGUUCAUGCAGGCUU | 1607 | 792-812 | AAGCCUGCAUGAACCUGUCAAUC | 1824 | 790-812 |
| 1658528 | | | | | | |
| AD- | UGACAGGUUCAUGCAGGCUGU | 1608 | 793-813 | ACAGCCTGCAUGAACCUGUCAAU | 1825 | 791-813 |
| 1658529 | | | | | | |
| AD- | GACAGGUUCAUGCAGGCUGUU | 1609 | 794-814 | AACAGCCUGCATGAACCUGUCAA | 1826 | 792-814 |
| 1658530 | | | | | | |
| AD- | ACAGGUUCAUGCAGGCUGUGU | 79 | 795-815 | ACACAGCCUGCAUGAACCUGUCA | 381 | 793-815 |
| 1658531 | | | | | | |
| AD- | GUUCAUGCAGGCUGUGACAGU | 1610 | 799-819 | ACUGTCACAGCCUGCAUGAACCU | 1827 | 797-819 |
| 1658535 | | | | | | |
| AD- | AUGCAGGCUGUGACAGGAUGU | 80 | 803-823 | ACAUCCTGUCACAGCCUGCAUGA | 1828 | 801-823 |
| 1658539 | | | | | | |
| AD- | GCAGGCUGUGACAGGAUGGAU | 81 | 805-825 | ATCCAUCCUGUCACAGCCUGCAU | 1829 | 803-825 |
| 1658541 | | | | | | |
| AD- | CAGGCUGUGACAGGAUGGAAU | 1611 | 806-826 | ATUCCATCCUGTCACAGCCUGCA | 1830 | 804-826 |
| 1658542 | | | | | | |
| AD- | GCUUUCAACACCUACGUCCAU | 84 | 869-889 | ATGGACGUAGGTGUUGAAAGCCA | 1831 | 867-889 |
| 1658605 | | | | | | |
| AD- | GAGUUCUGGGUGGACAACAGU | 1612 | 935-955 | ACUGTUGUCCACCCAGAACUCCU | 1832 | 933-955 |
| 1658650 | | | | | | |
| AD- | GGACAACAGCACCUCAGUGUU | 91 | 946-966 | AACACUGAGGUGCUGUUGUCCAC | 393 | 944-966 |
| 1658661 | | | | | | |
| AD- | GACAACAGCACCUCAGUGUCU | 92 | 947-967 | AGACACTGAGGTGCUGUUGUCCA | 1833 | 945-967 |
| 1658662 | | | | | | |
| AD- | ACAACAGCACCUCAGUGUCUU | 1613 | 948-968 | AAGACACUGAGGUGCUGUUGUCC | 1834 | 946-968 |
| 1658663 | | | | | | |
| AD- | CAACAGCACCUCAGUGUCUGU | 93 | 949-969 | ACAGACACUGAGGUGCUGUUGUC | 395 | 947-969 |
| 1658664 | | | | | | |
| AD- | AACAGCACCUCAGUGUCUGUU | 1614 | 950-970 | AACAGACACUGAGGUGCUGUUGU | 1835 | 948-970 |
| 1658665 | | | | | | |
| AD- | AUGCCUCUGACCUGGACAAGU | 1615 | 1086-1106 | ACUUGUCCAGGTCAGAGGCAUAG | 1836 | 1084-1106 |
| 1658801 | | | | | | |
| AD- | UGCCUCUGACCUGGACAAGGU | 1616 | 1087-1107 | ACCUTGTCCAGGUCAGAGGCAUA | 1837 | 1085-1107 |
| 1658802 | | | | | | |
| AD- | AAGGUGGAGGGUCUCACUUUU | 1617 | 1103-1123 | AAAAGUGAGACCCUCCACCUUGU | 1838 | 1101-1123 |
| 1658818 | | | | | | |
| AD- | AGGUGGAGGGUCUCACUUUCU | 1618 | 1104-1124 | AGAAAGTGAGACCCUCCACCUUG | 1839 | 1102-1124 |
| 1658819 | | | | | | |
| AD- | GGUGGAGGGUCUCACUUUCCU | 1619 | 1105-1125 | AGGAAAGUGAGACCCUCCACCUU | 1840 | 1103-1125 |
| 1658820 | | | | | | |
| AD- | GUGGAGGGUCUCACUUUCCAU | 110 | 1106-1126 | ATGGAAAGUGAGACCCUCCACCU | 1841 | 1104-1126 |
| 1658821 | | | | | | |
| AD- | GAGGGUCUCACUUUCCAGCAU | 1620 | 1109-1129 | ATGCTGGAAAGTGAGACCCUCCA | 1842 | 1107-1129 |
| 1658824 | | | | | | |
| AD- | AGGGUCUCACUUUCCAGCAAU | 1621 | 1110-1130 | ATUGCUGGAAAGUGAGACCCUCC | 1843 | 1108-1130 |
| 1658825 | | | | | | |
| AD- | GGGUCUCACUUUCCAGCAAAU | 1622 | 1111-1131 | ATUUGCTGGAAAGUGAGACCCUC | 1844 | 1109-1131 |
| 1658826 | | | | | | |
| AD- | GGUCUCACUUUCCAGCAAAAU | 1623 | 1112-1132 | ATUUTGCUGGAAAGUGAGACCCU | 1845 | 1110-1132 |
| 1658827 | | | | | | |
| AD- | GUCUCACUUUCCAGCAAAACU | 1624 | 1113-1133 | AGUUTUGCUGGAAAGUGAGACCC | 1846 | 1111-1133 |
| 1658828 | | | | | | |
| AD- | UCUCACUUUCCAGCAAAACUU | 1625 | 1114-1134 | AAGUTUTGCUGGAAAGUGAGACC | 1847 | 1112-1134 |
| 1658829 | | | | | | |
| AD- | CUCACUUUCCAGCAAAACUCU | 111 | 1115-1135 | AGAGTUTUGCUGGAAAGUGAGAC | 1848 | 1113-1135 |
| 1658830 | | | | | | |
| AD- | UCACUUUCCAGCAAAACUCCU | 1626 | 1116-1136 | AGGAGUTUUGCTGGAAAGUGAGA | 1849 | 1114-1136 |
| 1658831 | | | | | | |
| AD- | CACUUUCCAGCAAAACUCCCU | 1627 | 1117-1137 | AGGGAGTUUUGCUGGAAAGUGAG | 1850 | 1115-1137 |
| 1658832 | | | | | | |
| AD- | ACUUUCCAGCAAAACUCCCUU | 1628 | 1118-1138 | AAGGGAGUUUUGCUGGAAAGUGA | 1851 | 1116-1138 |
| 1658833 | | | | | | |
| AD- | CUUUCCAGCAAAACUCCCUCU | 1629 | 1119-1139 | AGAGGGAGUUUTGCUGGAAAGUG | 1852 | 1117-1139 |
| 1658834 | | | | | | |
| AD- | UUUCCAGCAAAACUCCCUCAU | 1630 | 1120-1140 | ATGAGGGAGUUTUGCUGGAAAGU | 1853 | 1118-1140 |
| 1658835 | | | | | | |
| AD- | UUCCAGCAAAACUCCCUCAAU | 1631 | 1121-1141 | ATUGAGGGAGUTUUGCUGGAAAG | 1854 | 1119-1141 |
| 1658836 | | | | | | |
| AD- | UCCAGCAAAACUCCCUCAACU | 1632 | 1122-1142 | AGUUGAGGGAGTUUUGCUGGAAA | 1855 | 1120-1142 |
| 1658837 | | | | | | |
| AD- | CCAGCAAAACUCCCUCAACUU | 1633 | 1123-1143 | AAGUTGAGGGAGUUUUGCUGGAA | 1856 | 1121-1143 |
| 1658838 | | | | | | |
| AD- | CAGCAAAACUCCCUCAACUGU | 112 | 1124-1144 | ACAGTUGAGGGAGUUUUGCUGGA | 1857 | 1122-1144 |
| 1658839 | | | | | | |
| AD- | AGCAAAACUCCCUCAACUGGU | 113 | 1125-1145 | ACCAGUTGAGGGAGUUUUGCUGG | 1858 | 1123-1145 |
| 1658840 | | | | | | |
| AD- | GCAAAACUCCCUCAACUGGAU | 1634 | 1126-1146 | ATCCAGTUGAGGGAGUUUUGCUG | 1859 | 1124-1146 |
| 1658841 | | | | | | |
| AD- | CAAAACUCCCUCAACUGGAUU | 1635 | 1127-1147 | AAUCCAGUUGAGGGAGUUUUGCU | 1860 | 1125-1147 |
| 1658842 | | | | | | |
| AD- | AAAACUCCCUCAACUGGAUGU | 114 | 1128-1148 | ACAUCCAGUUGAGGGAGUUUUGC | 416 | 1126-1148 |
| 1658843 | | | | | | |
| AD- | AAACUCCCUCAACUGGAUGAU | 1636 | 1129-1149 | ATCATCCAGUUGAGGGAGUUUUG | 1861 | 1127-1149 |
| 1658844 | | | | | | |
| AD- | AACUCCCUCAACUGGAUGAAU | 1637 | 1130-1150 | ATUCAUCCAGUTGAGGGAGUUUU | 1862 | 1128-1150 |
| 1658845 | | | | | | |
| AD- | ACUCCCUCAACUGGAUGAAGU | 115 | 1131-1151 | ACUUCATCCAGTUGAGGGAGUUU | 1863 | 1129-1151 |
| 1658846 | | | | | | |
| AD- | CUCCCUCAACUGGAUGAAGAU | 1638 | 1132-1152 | ATCUTCAUCCAGUUGAGGGAGUU | 1864 | 1130-1152 |
| 1658847 | | | | | | |
| AD- | UCCCUCAACUGGAUGAAGAAU | 1639 | 1133-1153 | ATUCTUCAUCCAGUUGAGGGAGU | 1865 | 1131-1153 |
| 1658848 | | | | | | |
| AD- | CCCUCAACUGGAUGAAGAAAU | 1640 | 1134-1154 | ATUUCUTCAUCCAGUUGAGGGAG | 1866 | 1132-1154 |
| 1658849 | | | | | | |
| AD- | CUCAACUGGAUGAAGAAACUU | 1641 | 1136-1156 | AAGUTUCUUCATCCAGUUGAGGG | 1867 | 1134-1156 |
| 1658850 | | | | | | |
| AD- | AAGGAUCUUAUGACCUGCAGU | 1642 | 1200-1220 | ACUGCAGGUCATAAGAUCCUUGC | 1868 | 1198-1220 |
| 1658874 | | | | | | |
| AD- | AGGAUCUUAUGACCUGCAGGU | 1643 | 1201-1221 | ACCUGCAGGUCAUAAGAUCCUUG | 1869 | 1199-1221 |
| 1658875 | | | | | | |
| AD- | CUUAUGACCUGCAGGACCUGU | 121 | 1206-1226 | ACAGGUCCUGCAGGUCAUAAGAU | 423 | 1204-1226 |
| 1658880 | | | | | | |
| AD- | CGAGCUGAACCUGCAAAAAUU | 122 | 1261-1281 | AAUUTUTGCAGGUUCAGCUCGGU | 1870 | 1259-1281 |
| 1658929 | | | | | | |
| AD- | GAGCUGAACCUGCAAAAAUUU | 123 | 1262-1282 | AAAUTUTUGCAGGUUCAGCUCGG | 1871 | 1260-1282 |
| 1658930 | | | | | | |
| AD- | AGCUGAACCUGCAAAAAUUGU | 124 | 1263-1283 | ACAATUTUUGCAGGUUCAGCUCG | 1872 | 1261-1283 |
| 1658931 | | | | | | |
| AD- | GCUGAACCUGCAAAAAUUGAU | 125 | 1264-1284 | ATCAAUTUUUGCAGGUUCAGCUC | 1873 | 1262-1284 |
| 1658932 | | | | | | |
| AD- | CUGAACCUGCAAAAAUUGAGU | 126 | 1265-1285 | ACUCAATUUUUGCAGGUUCAGCU | 1874 | 1263-1285 |
| 1658933 | | | | | | |
| AD- | UGAACCUGCAAAAAUUGAGCU | 127 | 1266-1286 | AGCUCAAUUUUTGCAGGUUCAGC | 1875 | 1264-1286 |
| 1658934 | | | | | | |
| AD- | GAACCUGCAAAAAUUGAGCAU | 1644 | 1267-1287 | ATGCTCAAUUUTUGCAGGUUCAG | 1876 | 1265-1287 |
| 1658935 | | | | | | |
| AD- | UGCAAAAAUUGAGCAAUGACU | 128 | 1272-1292 | AGUCAUTGCUCAAUUUUUGCAGG | 1877 | 1270-1292 |
| 1658940 | | | | | | |
| AD- | GAGGUGCUGAACAGCAUUUUU | 133 | 1307-1327 | AAAAAUGCUGUTCAGCACCUCCC | 1878 | 1305-1327 |
| 1658954 | | | | | | |
| AD- | AGGUGCUGAACAGCAUUUUUU | 1645 | 1308-1328 | AAAAAATGCUGTUCAGCACCUCC | 1879 | 1306-1328 |
| 1658955 | | | | | | |
| AD- | GGUGCUGAACAGCAUUUUUUU | 1646 | 1309-1329 | AAAAAAAUGCUGUUCAGCACCUC | 1880 | 1307-1329 |
| 1658956 | | | | | | |
| AD- | GUGCUGAACAGCAUUUUUUUU | 1647 | 1310-1330 | AAAAAAAAUGCTGUUCAGCACCU | 1881 | 1308-1330 |
| 1658957 | | | | | | |
| AD- | UGCUGAACAGCAUUUUUUUUU | 1648 | 1311-1331 | AAAAAAAAAUGCUGUUCAGCACC | 1882 | 1309-1331 |
| 1658958 | | | | | | |
| AD- | GCUGAACAGCAUUUUUUUUGU | 1649 | 1312-1332 | ACAAAAAAAAUGCUGUUCAGCAC | 1883 | 1310-1332 |
| 1658959 | | | | | | |
| AD- | CUGAACAGCAUUUUUUUUGAU | 1650 | 1313-1333 | ATCAAAAAAAATGCUGUUCAGCA | 1884 | 1311-1333 |
| 1658960 | | | | | | |
| AD- | UGAGAGAGAGCCCACAGAGUU | 1651 | 1345-1365 | AACUCUGUGGGCUCUCUCUCAUC | 1885 | 1343-1365 |
| 1658992 | | | | | | |
| AD- | AGAGAGAGCCCACAGAGUCUU | 1652 | 1347-1367 | AAGACUCUGUGGGCUCUCUCUCA | 1886 | 1345-1367 |
| 1658994 | | | | | | |
| AD- | GAGAGAGCCCACAGAGUCUAU | 1653 | 1348-1368 | ATAGACTCUGUGGGCUCUCUCUC | 1887 | 1346-1368 |
| 1658995 | | | | | | |
| AD- | GAACCGCCCAUUCCUGUUUGU | 1654 | 1408-1428 | ACAAACAGGAATGGGCGGUUCAG | 1888 | 1406-1428 |
| 1659055 | | | | | | |
| AD- | AACCGCCCAUUCCUGUUUGCU | 146 | 1409-1429 | AGCAAACAGGAAUGGGCGGUUCA | 448 | 1407-1429 |
| 1659056 | | | | | | |
| AD- | ACCGCCCAUUCCUGUUUGCUU | 147 | 1410-1430 | AAGCAAACAGGAAUGGGCGGUUC | 449 | 1408-1430 |
| 1659057 | | | | | | |
| AD- | CCGCCCAUUCCUGUUUGCUGU | 148 | 1411-1431 | ACAGCAAACAGGAAUGGGCGGUU | 450 | 1409-1431 |
| 1659058 | | | | | | |
| AD- | CGCCCAUUCCUGUUUGCUGUU | 149 | 1412-1432 | AACAGCAAACAGGAAUGGGCGGU | 451 | 1410-1432 |
| 1659059 | | | | | | |
| AD- | GCCCAUUCCUGUUUGCUGUGU | 1655 | 1413-1433 | ACACAGCAAACAGGAAUGGGCGG | 1889 | 1411-1433 |
| 1659060 | | | | | | |
| AD- | CCCAUUCCUGUUUGCUGUGUU | 1656 | 1414-1434 | AACACAGCAAACAGGAAUGGGCG | 1890 | 1412-1434 |
| 1659061 | | | | | | |
| AD- | CCAUUCCUGUUUGCUGUGUAU | 1657 | 1415-1435 | ATACACAGCAAACAGGAAUGGGC | 1891 | 1413-1435 |
| 1659062 | | | | | | |
| AD- | CAUUCCUGUUUGCUGUGUAUU | 1658 | 1416-1436 | AAUACACAGCAAACAGGAAUGGG | 1892 | 1414-1436 |
| 1659063 | | | | | | |
| AD- | AUUCCUGUUUGCUGUGUAUGU | 150 | 1417-1437 | ACAUACACAGCAAACAGGAAUGG | 452 | 1415-1437 |
| 1659064 | | | | | | |
| AD- | UUCCUGUUUGCUGUGUAUGAU | 1659 | 1418-1438 | ATCATACACAGCAAACAGGAAUG | 1893 | 1416-1438 |
| 1659065 | | | | | | |
| AD- | UCCUGUUUGCUGUGUAUGAUU | 151 | 1419-1439 | AAUCAUACACAGCAAACAGGAAU | 453 | 1417-1439 |
| 1659066 | | | | | | |
| AD- | CCUGUUUGCUGUGUAUGAUCU | 1660 | 1420-1440 | AGAUCATACACAGCAAACAGGAA | 1894 | 1418-1440 |
| 1659067 | | | | | | |
| AD- | CUGUUUGCUGUGUAUGAUCAU | 1661 | 1421-1441 | ATGATCAUACACAGCAAACAGGA | 1895 | 1419-1441 |
| 1659068 | | | | | | |
| AD- | UGUUUGCUGUGUAUGAUCAAU | 1662 | 1422-1442 | ATUGAUCAUACACAGCAAACAGG | 1896 | 1420-1442 |
| 1659069 | | | | | | |
| AD- | GUUUGCUGUGUAUGAUCAAAU | 1663 | 1423-1443 | ATUUGATCAUACACAGCAAACAG | 1897 | 1421-1443 |
| 1659070 | | | | | | |
| AD- | UUUGCUGUGUAUGAUCAAAGU | 1664 | 1424-1444 | ACUUTGAUCAUACACAGCAAACA | 1898 | 1422-1444 |
| 1659071 | | | | | | |
| AD- | CAGUCUCCCACCUUUUCUUCU | 1665 | 1606-1626 | AGAAGAAAAGGTGGGAGACUGGG | 1899 | 1604-1626 |
| 1659161 | | | | | | |
| AD- | GUCUCCCACCUUUUCUUCUAU | 1666 | 1608-1628 | ATAGAAGAAAAGGUGGGAGACUG | 1900 | 1606-1628 |
| 1659162 | | | | | | |
| AD- | CUCCCACCUUUUCUUCUAAUU | 158 | 1610-1630 | AAUUAGAAGAAAAGGUGGGAGAC | 460 | 1608-1630 |
| 1659163 | | | | | | |
| AD- | UCCCACCUUUUCUUCUAAUGU | 159 | 1611-1631 | ACAUTAGAAGAAAAGGUGGGAGA | 1901 | 1609-1631 |
| 1659164 | | | | | | |
| AD- | CCCACCUUUUCUUCUAAUGAU | 160 | 1612-1632 | ATCATUAGAAGAAAAGGUGGGAG | 1902 | 1610-1632 |
| 1659165 | | | | | | |
| AD- | CCACCUUUUCUUCUAAUGAGU | 1667 | 1613-1633 | ACUCAUTAGAAGAAAAGGUGGGA | 1903 | 1611-1633 |
| 1659166 | | | | | | |
| AD- | CACCUUUUCUUCUAAUGAGUU | 1668 | 1614-1634 | AACUCATUAGAAGAAAAGGUGGG | 1904 | 1612-1634 |
| 1659167 | | | | | | |
| AD- | ACCUUUUCUUCUAAUGAGUCU | 1669 | 1615-1635 | AGACTCAUUAGAAGAAAAGGUGG | 1905 | 1613-1635 |
| 1659168 | | | | | | |
| AD- | CCGUUUCUCCUUGGUCUAAGU | 1670 | 1655-1675 | ACUUAGACCAAGGAGAAACGGCU | 1906 | 1653-1675 |
| 1659208 | | | | | | |
| AD- | CGUUUCUCCUUGGUCUAAGUU | 179 | 1656-1676 | AACUTAGACCAAGGAGAAACGGC | 1907 | 1654-1676 |
| 1659209 | | | | | | |
| AD- | GUUUCUCCUUGGUCUAAGUGU | 180 | 1657-1677 | ACACTUAGACCAAGGAGAAACGG | 1908 | 1655-1677 |
| 1659210 | | | | | | |
| AD- | GUUUGCUGGGUUUAUUUUAGU | 199 | 1729-1749 | ACUAAAAUAAACCCAGCAAACUG | 501 | 1727-1749 |
| 1659282 | | | | | | |
| AD- | UUUGCUGGGUUUAUUUUAGAU | 200 | 1730-1750 | ATCUAAAAUAAACCCAGCAAACU | 1909 | 1728-1750 |
| 1659283 | | | | | | |
| AD- | UUGCUGGGUUUAUUUUAGAGU | 201 | 1731-1751 | ACUCTAAAAUAAACCCAGCAAAC | 1910 | 1729-1751 |
| 1659284 | | | | | | |
| AD- | UGCUGGGUUUAUUUUAGAGAU | 202 | 1732-1752 | ATCUCUAAAAUAAACCCAGCAAA | 1911 | 1730-1752 |
| 1659285 | | | | | | |
| AD- | GCUGGGUUUAUUUUAGAGAAU | 1671 | 1733-1753 | ATUCTCTAAAATAAACCCAGCAA | 1912 | 1731-1753 |
| 1659286 | | | | | | |
| AD- | CUGGGUUUAUUUUAGAGAAUU | 1672 | 1734-1754 | AAUUCUCUAAAAUAAACCCAGCA | 1913 | 1732-1754 |
| 1659287 | | | | | | |
| AD- | UGGGUUUAUUUUAGAGAAUGU | 1673 | 1735-1755 | ACAUTCTCUAAAAUAAACCCAGC | 1914 | 1733-1755 |
| 1659288 | | | | | | |
| AD- | GGGUUUAUUUUAGAGAAUGGU | 203 | 1736-1756 | ACCATUCUCUAAAAUAAACCCAG | 1915 | 1734-1756 |
| 1659289 | | | | | | |
| AD- | GAGGCAAGAACCAGUGUUUAU | 1674 | 1763-1783 | ATAAACACUGGTUCUUGCCUCCC | 1916 | 1761-1783 |
| 1659290 | | | | | | |
| AD- | AGGCAAGAACCAGUGUUUAGU | 206 | 1764-1784 | ACUAAACACUGGUUCUUGCCUCC | 508 | 1762-1784 |
| 1659291 | | | | | | |
| AD- | GGCAAGAACCAGUGUUUAGCU | 207 | 1765-1785 | AGCUAAACACUGGUUCUUGCCUC | 509 | 1763-1785 |
| 1659292 | | | | | | |
| AD- | GCAAGAACCAGUGUUUAGCGU | 1675 | 1766-1786 | ACGCTAAACACTGGUUCUUGCCU | 1917 | 1764-1786 |
| 1659293 | | | | | | |
| AD- | CAAGAACCAGUGUUUAGCGCU | 1676 | 1767-1787 | AGCGCUAAACACUGGUUCUUGCC | 1918 | 1765-1787 |
| 1659294 | | | | | | |
| AD- | AAGAACCAGUGUUUAGCGCGU | 1677 | 1768-1788 | ACGCGCTAAACACUGGUUCUUGC | 1919 | 1766-1788 |
| 1659295 | | | | | | |
| AD- | AGAACCAGUGUUUAGCGCGGU | 1678 | 1769-1789 | ACCGCGCUAAACACUGGUUCUUG | 1920 | 1767-1789 |
| 1659296 | | | | | | |
| AD- | GAACCAGUGUUUAGCGCGGGU | 1679 | 1770-1790 | ACCCGCGCUAAACACUGGUUCUU | 1921 | 1768-1790 |
| 1659297 | | | | | | |
| AD- | AACCAGUGUUUAGCGCGGGAU | 1680 | 1771-1791 | ATCCCGCGCUAAACACUGGUUCU | 1922 | 1769-1791 |
| 1659298 | | | | | | |
| AD- | CUGUUCCAAAAAGAAUUCCAU | 211 | 1794-1814 | ATGGAATUCUUTUUGGAACAGUA | 1923 | 1792-1814 |
| 1659321 | | | | | | |
| AD- | UGUUCCAAAAAGAAUUCCAAU | 1681 | 1795-1815 | ATUGGAAUUCUTUUUGGAACAGU | 1924 | 1793-1815 |
| 1659322 | | | | | | |
| AD- | GUUCCAAAAAGAAUUCCAACU | 1682 | 1796-1816 | AGUUGGAAUUCTUUUUGGAACAG | 1925 | 1794-1816 |
| 1659323 | | | | | | |
| AD- | UCCAAAAAGAAUUCCAACCGU | 1683 | 1798-1818 | ACGGTUGGAAUTCUUUUUGGAAC | 1926 | 1796-1818 |
| 1659325 | | | | | | |
| AD- | CCAAAAAGAAUUCCAACCGAU | 1684 | 1799-1819 | ATCGGUTGGAATUCUUUUUGGAA | 1927 | 1797-1819 |
| 1659326 | | | | | | |
| AD- | CAAAAAGAAUUCCAACCGACU | 212 | 1800-1820 | AGUCGGTUGGAAUUCUUUUUGGA | 1928 | 1798-1820 |
| 1659327 | | | | | | |
| AD- | AAAAAGAAUUCCAACCGACCU | 1685 | 1801-1821 | AGGUCGGUUGGAAUUCUUUUUGG | 1929 | 1799-1821 |
| 1659328 | | | | | | |
| AD- | AAAAGAAUUCCAACCGACCAU | 1686 | 1802-1822 | ATGGTCGGUUGGAAUUCUUUUUG | 1930 | 1800-1822 |
| 1659329 | | | | | | |
| AD- | AAAGAAUUCCAACCGACCAGU | 1687 | 1803-1823 | ACUGGUCGGUUGGAAUUCUUUUU | 1931 | 1801-1823 |
| 1659330 | | | | | | |
| AD- | AAGAAUUCCAACCGACCAGCU | 1688 | 1804-1824 | AGCUGGTCGGUTGGAAUUCUUUU | 1932 | 1802-1824 |
| 1659331 | | | | | | |
| AD- | AGAAUUCCAACCGACCAGCUU | 1689 | 1805-1825 | AAGCTGGUCGGTUGGAAUUCUUU | 1933 | 1803-1825 |
| 1659332 | | | | | | |
| AD- | GAAUUCCAACCGACCAGCUUU | 1690 | 1806-1826 | AAAGCUGGUCGGUUGGAAUUCUU | 1934 | 1804-1826 |
| 1659333 | | | | | | |
| AD- | AAUUCCAACCGACCAGCUUGU | 1691 | 1807-1827 | ACAAGCTGGUCGGUUGGAAUUCU | 1935 | 1805-1827 |
| 1659334 | | | | | | |
| AD- | AUUCCAACCGACCAGCUUGUU | 1692 | 1808-1828 | AACAAGCUGGUCGGUUGGAAUUC | 1936 | 1806-1828 |
| 1659335 | | | | | | |
| AD- | UUCCAACCGACCAGCUUGUUU | 1693 | 1809-1829 | AAACAAGCUGGTCGGUUGGAAUU | 1937 | 1807-1829 |
| 1659336 | | | | | | |
| AD- | UCCAACCGACCAGCUUGUUUU | 1694 | 1810-1830 | AAAACAAGCUGGUCGGUUGGAAU | 1938 | 1808-1830 |
| 1659337 | | | | | | |
| AD- | CCAACCGACCAGCUUGUUUGU | 1695 | 1811-1831 | ACAAACAAGCUGGUCGGUUGGAA | 1939 | 1809-1831 |
| 1659338 | | | | | | |
| AD- | CAACCGACCAGCUUGUUUGUU | 1696 | 1812-1832 | AACAAACAAGCTGGUCGGUUGGA | 1940 | 1810-1832 |
| 1659339 | | | | | | |
| AD- | AACCGACCAGCUUGUUUGUGU | 1697 | 1813-1833 | ACACAAACAAGCUGGUCGGUUGG | 1941 | 1811-1833 |
| 1659340 | | | | | | |
| AD- | ACCGACCAGCUUGUUUGUGAU | 213 | 1814-1834 | ATCACAAACAAGCUGGUCGGUUG | 1942 | 1812-1834 |
| 1659341 | | | | | | |
| AD- | CCGACCAGCUUGUUUGUGAAU | 1698 | 1815-1835 | ATUCACAAACAAGCUGGUCGGUU | 1943 | 1813-1835 |
| 1659342 | | | | | | |
| AD- | CGACCAGCUUGUUUGUGAAAU | 1699 | 1816-1836 | ATUUCACAAACAAGCUGGUCGGU | 1944 | 1814-1836 |
| 1659343 | | | | | | |
| AD- | GACCAGCUUGUUUGUGAAACU | 1700 | 1817-1837 | AGUUTCACAAACAAGCUGGUCGG | 1945 | 1815-1837 |
| 1659344 | | | | | | |
| AD- | ACCAGCUUGUUUGUGAAACAU | 1701 | 1818-1838 | ATGUTUCACAAACAAGCUGGUCG | 1946 | 1816-1838 |
| 1659345 | | | | | | |
| AD- | CCAGCUUGUUUGUGAAACAAU | 1702 | 1819-1839 | ATUGTUTCACAAACAAGCUGGUC | 1947 | 1817-1839 |
| 1659346 | | | | | | |
| AD- | CAGCUUGUUUGUGAAACAAAU | 1703 | 1820-1840 | ATUUGUTUCACAAACAAGCUGGU | 1948 | 1818-1840 |
| 1659347 | | | | | | |
| AD- | AGCUUGUUUGUGAAACAAAAU | 1704 | 1821-1841 | ATUUTGTUUCACAAACAAGCUGG | 1949 | 1819-1841 |
| 1659348 | | | | | | |
| AD- | CUUGUUUGUGAAACAAAAAAU | 1705 | 1823-1843 | ATUUTUTGUUUCACAAACAAGCU | 1950 | 1821-1843 |
| 1659350 | | | | | | |
| AD- | UUGUUUGUGAAACAAAAAAGU | 1706 | 1824-1844 | ACUUTUTUGUUTCACAAACAAGC | 1951 | 1822-1844 |
| 1659351 | | | | | | |
| AD- | UGUUCCCUUUUCAAGUUGAGU | 217 | 1844-1864 | ACUCAACUUGAAAAGGGAACACU | 519 | 1842-1864 |
| 1659371 | | | | | | |
| AD- | GUUCCCUUUUCAAGUUGAGAU | 218 | 1845-1865 | ATCUCAACUUGAAAAGGGAACAC | 1952 | 1843-1865 |
| 1659372 | | | | | | |
| AD- | UUCCCUUUUCAAGUUGAGAAU | 1707 | 1846-1866 | ATUCTCAACUUGAAAAGGGAACA | 1953 | 1844-1866 |
| 1659373 | | | | | | |
| AD- | CAAGUUGAGAACAAAAAUUGU | 219 | 1855-1875 | ACAATUTUUGUTCUCAACUUGAA | 1954 | 1853-1875 |
| 1659382 | | | | | | |
| AD- | AAGUUGAGAACAAAAAUUGGU | 220 | 1856-1876 | ACCAAUTUUUGTUCUCAACUUGA | 1955 | 1854-1876 |
| 1659383 | | | | | | |
| AD- | AGUUGAGAACAAAAAUUGGGU | 321 | 1857-1877 | ACCCAATUUUUGUUCUCAACUUG | 1956 | 1855-1877 |
| 1659384 | | | | | | |
| AD- | GUUGAGAACAAAAAUUGGGUU | 221 | 1858-1878 | AACCCAAUUUUTGUUCUCAACUU | 1957 | 1856-1878 |
| 1659385 | | | | | | |
| AD- | UUGAGAACAAAAAUUGGGUUU | 222 | 1859-1879 | AAACCCAAUUUTUGUUCUCAACU | 1958 | 1857-1879 |
| 1659386 | | | | | | |
| AD- | UGAGAACAAAAAUUGGGUUUU | 223 | 1860-1880 | AAAACCCAAUUTUUGUUCUCAAC | 1959 | 1858-1880 |
| 1659387 | | | | | | |
| AD- | GAGAACAAAAAUUGGGUUUUU | 224 | 1861-1881 | AAAAACCCAAUTUUUGUUCUCAA | 1960 | 1859-1881 |
| 1659388 | | | | | | |
| AD- | AGAACAAAAAUUGGGUUUUAU | 225 | 1862-1882 | ATAAAACCCAATUUUUGUUCUCA | 1961 | 1860-1882 |
| 1659389 | | | | | | |
| AD- | GAACAAAAAUUGGGUUUUAAU | 226 | 1863-1883 | ATUAAAACCCAAUUUUUGUUCUC | 1962 | 1861-1883 |
| 1659390 | | | | | | |
| AD- | AACAAAAAUUGGGUUUUAAAU | 1708 | 1864-1884 | ATUUAAAACCCAAUUUUUGUUCU | 1963 | 1862-1884 |
| 1659391 | | | | | | |
| AD- | AGUAUACAUUUUUGCAUUGCU | 1709 | 1889-1909 | AGCAAUGCAAAAAUGUAUACUUU | 1964 | 1887-1909 |
| 1659399 | | | | | | |
| AD- | GUAUACAUUUUUGCAUUGCCU | 227 | 1890-1910 | AGGCAATGCAAAAAUGUAUACUU | 1965 | 1888-1910 |
| 1659400 | | | | | | |
| AD- | UAUACAUUUUUGCAUUGCCUU | 1710 | 1891-1911 | AAGGCAAUGCAAAAAUGUAUACU | 1966 | 1889-1911 |
| 1659401 | | | | | | |
| AD- | AUACAUUUUUGCAUUGCCUUU | 228 | 1892-1912 | AAAGGCAAUGCAAAAAUGUAUAC | 530 | 1890-1912 |
| 1659402 | | | | | | |
| AD- | CAUUUUUGCAUUGCCUUCGGU | 229 | 1895-1915 | ACCGAAGGCAATGCAAAAAUGUA | 1967 | 1893-1915 |
| 1659405 | | | | | | |
| AD- | AUUUUUGCAUUGCCUUCGGUU | 230 | 1896-1916 | AACCGAAGGCAAUGCAAAAAUGU | 532 | 1894-1916 |
| 1659406 | | | | | | |
| AD- | UUUUUGCAUUGCCUUCGGUUU | 231 | 1897-1917 | AAACCGAAGGCAAUGCAAAAAUG | 533 | 1895-1917 |
| 1659407 | | | | | | |
| AD- | UUUUGCAUUGCCUUCGGUUUU | 232 | 1898-1918 | AAAACCGAAGGCAAUGCAAAAAU | 534 | 1896-1918 |
| 1659408 | | | | | | |
| AD- | UUUGCAUUGCCUUCGGUUUGU | 233 | 1899-1919 | ACAAACCGAAGGCAAUGCAAAAA | 535 | 1897-1919 |
| 1659409 | | | | | | |
| AD- | UUGCAUUGCCUUCGGUUUGUU | 234 | 1900-1920 | AACAAACCGAAGGCAAUGCAAAA | 536 | 1898-1920 |
| 1659410 | | | | | | |
| AD- | UGCAUUGCCUUCGGUUUGUAU | 235 | 1901-1921 | ATACAAACCGAAGGCAAUGCAAA | 1968 | 1899-1921 |
| 1659411 | | | | | | |
| AD- | GCAUUGCCUUCGGUUUGUAUU | 236 | 1902-1922 | AAUACAAACCGAAGGCAAUGCAA | 538 | 1900-1922 |
| 1659412 | | | | | | |
| AD- | CAUUGCCUUCGGUUUGUAUUU | 237 | 1903-1923 | AAAUACAAACCGAAGGCAAUGCA | 539 | 1901-1923 |
| 1659413 | | | | | | |
| AD- | AUUGCCUUCGGUUUGUAUUUU | 238 | 1904-1924 | AAAATACAAACCGAAGGCAAUGC | 1969 | 1902-1924 |
| 1659414 | | | | | | |
| AD- | UUGCCUUCGGUUUGUAUUUAU | 239 | 1905-1925 | ATAAAUACAAACCGAAGGCAAUG | 1970 | 1903-1925 |
| 1659415 | | | | | | |
| AD- | UGCCUUCGGUUUGUAUUUAGU | 240 | 1906-1926 | ACUAAATACAAACCGAAGGCAAU | 1971 | 1904-1926 |
| 1659416 | | | | | | |
| AD- | GCCUUCGGUUUGUAUUUAGUU | 241 | 1907-1927 | AACUAAAUACAAACCGAAGGCAA | 543 | 1905-1927 |
| 1659417 | | | | | | |
| AD- | CCUUCGGUUUGUAUUUAGUGU | 242 | 1908-1928 | ACACTAAAUACAAACCGAAGGCA | 1972 | 1906-1928 |
| 1659418 | | | | | | |
| AD- | CUUCGGUUUGUAUUUAGUGUU | 243 | 1909-1929 | AACACUAAAUACAAACCGAAGGC | 545 | 1907-1929 |
| 1659419 | | | | | | |
| AD- | UUCGGUUUGUAUUUAGUGUCU | 1711 | 1910-1930 | AGACACTAAAUACAAACCGAAGG | 1973 | 1908-1930 |
| 1659420 | | | | | | |
| AD- | UCGGUUUGUAUUUAGUGUCUU | 1712 | 1911-1931 | AAGACACUAAATACAAACCGAAG | 1974 | 1909-1931 |
| 1659421 | | | | | | |
| AD- | CGGUUUGUAUUUAGUGUCUUU | 1713 | 1912-1932 | AAAGACACUAAAUACAAACCGAA | 1975 | 1910-1932 |
| 1659422 | | | | | | |
| AD- | GGUUUGUAUUUAGUGUCUUGU | 244 | 1913-1933 | ACAAGACACUAAAUACAAACCGA | 546 | 1911-1933 |
| 1659423 | | | | | | |
| AD- | GUUUGUAUUUAGUGUCUUGAU | 1714 | 1914-1934 | ATCAAGACACUAAAUACAAACCG | 1976 | 1912-1934 |
| 1659424 | | | | | | |
| AD- | UUUGUAUUUAGUGUCUUGAAU | 1715 | 1915-1935 | ATUCAAGACACTAAAUACAAACC | 1977 | 1913-1935 |
| 1659425 | | | | | | |
| AD- | UUGUAUUUAGUGUCUUGAAUU | 1716 | 1916-1936 | AAUUCAAGACACUAAAUACAAAC | 1978 | 1914-1936 |
| 1659426 | | | | | | |
| AD- | UGUAUUUAGUGUCUUGAAUGU | 245 | 1917-1937 | ACAUTCAAGACACUAAAUACAAA | 1979 | 1915-1937 |
| 1659427 | | | | | | |
| AD- | GUAUUUAGUGUCUUGAAUGUU | 1717 | 1918-1938 | AACATUCAAGACACUAAAUACAA | 1980 | 1916-1938 |
| 1659428 | | | | | | |
| AD- | UAUUUAGUGUCUUGAAUGUAU | 246 | 1919-1939 | ATACAUTCAAGACACUAAAUACA | 1981 | 1917-1939 |
| 1659429 | | | | | | |
| AD- | AUUUAGUGUCUUGAAUGUAAU | 1718 | 1920-1940 | ATUACATUCAAGACACUAAAUAC | 1982 | 1918-1940 |
| 1659430 | | | | | | |
| AD- | UUUAGUGUCUUGAAUGUAAGU | 247 | 1921-1941 | ACUUACAUUCAAGACACUAAAUA | 549 | 1919-1941 |
| 1659431 | | | | | | |
| AD- | UUAGUGUCUUGAAUGUAAGAU | 1719 | 1922-1942 | ATCUTACAUUCAAGACACUAAAU | 1983 | 1920-1942 |
| 1659432 | | | | | | |
| AD- | UAGUGUCUUGAAUGUAAGAAU | 1720 | 1923-1943 | ATUCTUACAUUCAAGACACUAAA | 1984 | 1921-1943 |
| 1659433 | | | | | | |
| AD- | AGUGUCUUGAAUGUAAGAACU | 1721 | 1924-1944 | AGUUCUTACAUTCAAGACACUAA | 1985 | 1922-1944 |
| 1659434 | | | | | | |
| AD- | UGUCUUGAAUGUAAGAACAUU | 1722 | 1926-1946 | AAUGTUCUUACAUUCAAGACACU | 1986 | 1924-1946 |
| 1659436 | | | | | | |
| AD- | GUCUUGAAUGUAAGAACAUGU | 248 | 1927-1947 | ACAUGUTCUUACAUUCAAGACAC | 1987 | 1925-1947 |
| 1659437 | | | | | | |
| AD- | UUGAAUGUAAGAACAUGACCU | 1723 | 1930-1950 | AGGUCATGUUCTUACAUUCAAGA | 1988 | 1928-1950 |
| 1659440 | | | | | | |
| AD- | GUAAGAACAUGACCUCCGUGU | 249 | 1936-1956 | ACACGGAGGUCAUGUUCUUACAU | 551 | 1934-1956 |
| 1659446 | | | | | | |
| AD- | UAAGAACAUGACCUCCGUGUU | 250 | 1937-1957 | AACACGGAGGUCAUGUUCUUACA | 552 | 1935-1957 |
| 1659447 | | | | | | |
| AD- | AAGAACAUGACCUCCGUGUAU | 251 | 1938-1958 | ATACACGGAGGTCAUGUUCUUAC | 1989 | 1936-1958 |
| 1659448 | | | | | | |
| AD- | AGAACAUGACCUCCGUGUAGU | 252 | 1939-1959 | ACUACACGGAGGUCAUGUUCUUA | 554 | 1937-1959 |
| 1659449 | | | | | | |
| AD- | GAACAUGACCUCCGUGUAGUU | 253 | 1940-1960 | AACUACACGGAGGUCAUGUUCUU | 555 | 1938-1960 |
| 1659450 | | | | | | |
| AD- | AACAUGACCUCCGUGUAGUGU | 254 | 1941-1961 | ACACTACACGGAGGUCAUGUUCU | 1990 | 1939-1961 |
| 1659451 | | | | | | |
| AD- | ACAUGACCUCCGUGUAGUGUU | 255 | 1942-1962 | AACACUACACGGAGGUCAUGUUC | 557 | 1940-1962 |
| 1659452 | | | | | | |
| AD- | CAUGACCUCCGUGUAGUGUCU | 1724 | 1943-1963 | AGACACTACACGGAGGUCAUGUU | 1991 | 1941-1963 |
| 1659453 | | | | | | |
| AD- | AUGACCUCCGUGUAGUGUCUU | 1725 | 1944-1964 | AAGACACUACACGGAGGUCAUGU | 1992 | 1942-1964 |
| 1659454 | | | | | | |
| AD- | CUUAGUUUUUUCCACAGAUGU | 1726 | 1971-1991 | ACAUCUGUGGAAAAAACUAAGGU | 1993 | 1969-1991 |
| 1659481 | | | | | | |
| AD- | UUAGUUUUUUCCACAGAUGCU | 1727 | 1972-1992 | AGCATCTGUGGAAAAAACUAAGG | 1994 | 1970-1992 |
| 1659482 | | | | | | |
| AD- | UAGUUUUUUCCACAGAUGCUU | 1728 | 1973-1993 | AAGCAUCUGUGGAAAAAACUAAG | 1995 | 1971-1993 |
| 1659483 | | | | | | |
| AD- | AGUUUUUUCCACAGAUGCUUU | 1729 | 1974-1994 | AAAGCATCUGUGGAAAAAACUAA | 1996 | 1972-1994 |
| 1659484 | | | | | | |
| AD- | GUUUUUUCCACAGAUGCUUGU | 1730 | 1975-1995 | ACAAGCAUCUGTGGAAAAAACUA | 1997 | 1973-1995 |
| 1659485 | | | | | | |
| AD- | UUUUUCCACAGAUGCUUGUGU | 1731 | 1977-1997 | ACACAAGCAUCTGUGGAAAAAAC | 1998 | 1975-1997 |
| 1659487 | | | | | | |
| AD- | UUUUCCACAGAUGCUUGUGAU | 1732 | 1978-1998 | ATCACAAGCAUCUGUGGAAAAAA | 1999 | 1976-1998 |
| 1659488 | | | | | | |
| AD- | UUUCCACAGAUGCUUGUGAUU | 265 | 1979-1999 | AAUCACAAGCATCUGUGGAAAAA | 2000 | 1977-1999 |
| 1659489 | | | | | | |
| AD- | UUCCACAGAUGCUUGUGAUUU | 1733 | 1980-2000 | AAAUCACAAGCAUCUGUGGAAAA | 2001 | 1978-2000 |
| 1659490 | | | | | | |
| AD- | UCCACAGAUGCUUGUGAUUUU | 1734 | 1981-2001 | AAAATCACAAGCAUCUGUGGAAA | 2002 | 1979-2001 |
| 1659491 | | | | | | |
| AD- | CCACAGAUGCUUGUGAUUUUU | 1735 | 1982-2002 | AAAAAUCACAAGCAUCUGUGGAA | 2003 | 1980-2002 |
| 1659492 | | | | | | |
| AD- | CACAGAUGCUUGUGAUUUUUU | 266 | 1983-2003 | AAAAAATCACAAGCAUCUGUGGA | 2004 | 1981-2003 |
| 1659493 | | | | | | |
| AD- | ACCUGAAUUUCUGUUUGAAUU | 286 | 2027-2047 | AAUUCAAACAGAAAUUCAGGUGC | 588 | 2025-2047 |
| 1659537 | | | | | | |
| AD- | CCUGAAUUUCUGUUUGAAUGU | 287 | 2028-2048 | ACAUTCAAACAGAAAUUCAGGUG | 2005 | 2026-2048 |
| 1659538 | | | | | | |
| AD- | GGAACCAUAGCUGGUUAUUUU | 295 | 2049-2069 | AAAATAACCAGCUAUGGUUCCGC | 2006 | 2047-2069 |
| 1659559 | | | | | | |
| AD- | GAACCAUAGCUGGUUAUUUCU | 296 | 2050-2070 | AGAAAUAACCAGCUAUGGUUCCG | 598 | 2048-2070 |
| 1659560 | | | | | | |
| AD- | AACCAUAGCUGGUUAUUUCUU | 297 | 2051-2071 | AAGAAATAACCAGCUAUGGUUCC | 2007 | 2049-2071 |
| 1659561 | | | | | | |
| AD- | ACCAUAGCUGGUUAUUUCUCU | 298 | 2052-2072 | AGAGAAAUAACCAGCUAUGGUUC | 600 | 2050-2072 |
| 1659562 | | | | | | |
| AD- | CCAUAGCUGGUUAUUUCUCCU | 299 | 2053-2073 | AGGAGAAAUAACCAGCUAUGGUU | 601 | 2051-2073 |
| 1659563 | | | | | | |
| AD- | CCUUGUGUUAGUAAUAAACGU | 310 | 2072-2092 | ACGUTUAUUACTAACACAAGGGA | 2008 | 2070-2092 |
| 1659582 | | | | | | |
| AD- | CUUGUGUUAGUAAUAAACGUU | 311 | 2073-2093 | AACGTUTAUUACUAACACAAGGG | 2009 | 2071-2093 |
| 1659583 | | | | | | |
| AD- | UUGUGUUAGUAAUAAACGUCU | 312 | 2074-2094 | AGACGUTUAUUACUAACACAAGG | 2010 | 2072-2094 |
| 1659584 | | | | | | |
| AD- | UGUGUUAGUAAUAAACGUCUU | 313 | 2075-2095 | AAGACGTUUAUTACUAACACAAG | 2011 | 2073-2095 |
| 1659585 | | | | | | |
| AD- | GUGUUAGUAAUAAACGUCUUU | 314 | 2076-2096 | AAAGACGUUUATUACUAACACAA | 2012 | 2074-2096 |
| 1659586 | | | | | | |
| AD- | UGUUAGUAAUAAACGUCUUGU | 315 | 2077-2097 | ACAAGACGUUUAUUACUAACACA | 617 | 2075-2097 |
| 1659587 | | | | | | |
| AD- | GUUAGUAAUAAACGUCUUGCU | 316 | 2078-2098 | AGCAAGACGUUTAUUACUAACAC | 2013 | 2076-2098 |
| 1659588 | | | | | | |
| AD- | UCUCCCACCUUUUCUUCUAAU | 1736 | 1609-1629 | ATUAGAAGAAAAGGUGGGAGACU | 2014 | 1607-1629 |
| 1321384 | | | | | | |
| AD- | CCUCAACUGGAUGAAGAAACU | 1737 | 1135-1155 | AGUUTCTUCAUCCAGUUGAGGGA | 2015 | 1133-1155 |
| 1321390 | | | | | | |

TABLE 5
Modified Sense and Antisense Strand Sequences of Angiotensinogen (AGT) dsRNA Agents

| | | SEQ | | SEQ | | SEQ |
|---|---|---|---|---|---|---|
| Duplex | | ID | | ID | | ID |
| Name | Sense Sequence 5′ to 3′ | NO: | Antisense Sequence 5′ to 3′ | NO: | mRNA Target Sequence | NO: |
| AD- | asgsccugagGfGfCfcaccauccuuL96 | 2016 | asdAsggdAudGguggdCcCfucaggcuscsa | 2338 | UGAGCCUGAGGGCCACCAUCCUC | 2660 |
| 1657992 | | | | | | |
| AD- | cscsugagggCfCfAfccauccucuuL96 | 2017 | asdAsgadGgdAuggudGgCfccucaggscsu | 2339 | AGCCUGAGGGCCACCAUCCUCUG | 2661 |
| 1657994 | | | | | | |
| AD- | asgsggccacCfAfUfccucugccuuL96 | 2018 | asdAsggdCadGaggadTgGfuggcccuscsa | 2340 | UGAGGGCCACCAUCCUCUGCCUC | 2662 |
| 1657998 | | | | | | |
| AD- | gsusgaccggGfUfGfuacauacacuL96 | 2019 | asdGsugdTadTguacdAcCfcggucacscsu | 2341 | AGGUGACCGGGUGUACAUACACC | 2663 |
| 1658030 | | | | | | |
| AD- | csusuccaccUfCfGfucauccacauL96 | 2020 | asdTsgudGgdAugacdGaGfguggaagsgsg | 2342 | CCCUUCCACCUCGUCAUCCACAA | 2664 |
| 1658032 | | | | | | |
| AD- | ususccaccuCfGfUfcauccacaauL96 | 2021 | asdTsugdTgdGaugadCgAfgguggaasgsg | 2343 | CCUUCCACCUCGUCAUCCACAAU | 2665 |
| 1658033 | | | | | | |
| AD- | uscscaccucGfUfCfauccacaauuL96 | 2022 | asdAsuudGudGgaugdAcGfagguggasasg | 2344 | CUUCCACCUCGUCAUCCACAAUG | 2666 |
| 1658034 | | | | | | |
| AD- | cscsaccucgUfCfAfuccacaauguL96 | 2023 | asdCsaudTgdTggaudGaCfgagguggsasa | 2345 | UUCCACCUCGUCAUCCACAAUGA | 2667 |
| 1658035 | | | | | | |
| AD- | csasccucguCfAfUfccacaaugauL96 | 2024 | asdTscadTudGuggadTgAfcgaggugsgsa | 2346 | UCCACCUCGUCAUCCACAAUGAG | 266 |
| 1658036 | | | | | | |
| AD- | ascscucgucAfUfCfcacaaugaguL96 | 2025 | asdCsucdAudTguggdAuGfacgaggusgsg | 2347 | CCACCUCGUCAUCCACAAUGAGA | 2669 |
| 1658037 | | | | | | |
| AD- | cscsucgucaUfCfCfacaaugagauL96 | 2026 | asdTscudCadTugugdGaUfgacgaggsusg | 2348 | CACCUCGUCAUCCACAAUGAGAG | 2670 |
| 1658038 | | | | | | |
| AD- | csuscgucauCfCfAfcaaugagaguL96 | 2027 | asdCsucdTcdAuugudGgAfugacgagsgsu | 2349 | ACCUCGUCAUCCACAAUGAGAGU | 2671 |
| 1658039 | | | | | | |
| AD- | uscsgucaucCfAfCfaaugagaguuL96 | 2028 | asdAscudCudCauugdTgGfaugacgasgsg | 2350 | CCUCGUCAUCCACAAUGAGAGUA | 2672 |
| 1658040 | | | | | | |
| AD- | csgsucauccAfCfAfaugagaguauL96 | 2029 | asdTsacdTcdTcauudGuGfgaugacgsasg | 2351 | CUCGUCAUCCACAAUGAGAGUAC | 2673 |
| 1658041 | | | | | | |
| AD- | gsuscauccaCfAfAfugagaguacuL96 | 2030 | asdGsuadCudCucaudTgUfggaugacsgsa | 2352 | UCGUCAUCCACAAUGAGAGUACC | 2674 |
| 1658042 | | | | | | |
| AD- | uscsauccacAfAfUfgagaguaccuL96 | 2031 | asdGsgudAcdTcucadTuGfuggaugascsg | 2353 | CGUCAUCCACAAUGAGAGUACCU | 2675 |
| 1658043 | | | | | | |
| AD- | csasuccacaAfUfGfagaguaccuuL96 | 2032 | asdAsggdTadCucucdAuUfguggaugsasc | 2354 | GUCAUCCACAAUGAGAGUACCUG | 2676 |
| 1658044 | | | | | | |
| AD- | asusccacaaUfGfAfgaguaccuguL96 | 2033 | asdCsagdGudAcucudCaUfuguggausgsa | 2355 | UCAUCCACAAUGAGAGUACCUGU | 1240 |
| 1658045 | | | | | | |
| AD- | uscscacaauGfAfGfaguaccuguuL96 | 2034 | asdAscadGgdTacucdTcAfuuguggasusg | 2356 | CAUCCACAAUGAGAGUACCUGUG | 2677 |
| 1658046 | | | | | | |
| AD- | cscsacaaugAfGfAfguaccuguguL96 | 2035 | asdCsacdAgdGuacudCuCfauuguggsasu | 2357 | AUCCACAAUGAGAGUACCUGUGA | 2678 |
| 1658047 | | | | | | |
| AD- | csascaaugaGfAfGfuaccugugauL96 | 2036 | asdTscadCadGguacdTcUfcauugugsgsa | 2358 | UCCACAAUGAGAGUACCUGUGAG | 2679 |
| 1658048 | | | | | | |
| AD- | ascsaaugagAfGfUfaccugugaguL96 | 2037 | asdCsucdAcdAgguadCuCfucauugusgsg | 2359 | CCACAAUGAGAGUACCUGUGAGC | 1241 |
| 1658049 | | | | | | |
| AD- | csasaugagaGfUfAfccugugagcuL96 | 2038 | asdGscudCadCaggudAcUfcucauugsusg | 2360 | CACAAUGAGAGUACCUGUGAGCA | 2680 |
| 1658050 | | | | | | |
| AD- | asasugagagUfAfCfcugugagcauL96 | 2039 | asdTsgcdTcdAcaggdTaCfucucauusgsu | 2361 | ACAAUGAGAGUACCUGUGAGCAG | 2681 |
| 1658051 | | | | | | |
| AD- | asusgagaguAfCfCfugugagcaguL96 | 2040 | asdCsugdCudCacagdGuAfcucucaususg | 2362 | CAAUGAGAGUACCUGUGAGCAGC | 2682 |
| 1658052 | | | | | | |
| AD- | usgsagaguaCfCfUfgugagcagcuL96 | 2041 | asdGscudGcdTcacadGgUfacucucasusu | 2363 | AAUGAGAGUACCUGUGAGCAGCU | 2683 |
| 1658053 | | | | | | |
| AD- | gsasgaguacCfUfGfugagcagcuuL96 | 2042 | asdAsgcdTgdCucacdAgGfuacucucsasu | 2364 | AUGAGAGUACCUGUGAGCAGCUG | 2684 |
| 1658054 | | | | | | |
| AD- | asgsaguaccUfGfUfgagcagcuguL96 | 2043 | asdCsagdCudGcucadCaGfguacucuscsa | 2365 | UGAGAGUACCUGUGAGCAGCUGG | 2685 |
| 1658055 | | | | | | |
| AD- | gsasguaccuGfUfGfagcagcugguL96 | 2044 | asdCscadGcdTgcucdAcAfgguacucsusc | 2366 | GAGAGUACCUGUGAGCAGCUGGC | 2686 |
| 1658056 | | | | | | |
| AD- | asgsuaccugUfGfAfgcagcuggcuL96 | 2045 | asdGsccdAgdCugcudCaCfagguacuscsu | 2367 | AGAGUACCUGUGAGCAGCUGGCA | 2687 |
| 1658057 | | | | | | |
| AD- | gsusaccuguGfAfGfcagcuggcauL96 | 2046 | asdTsgcdCadGcugcdTcAfcagguacsusc | 2368 | GAGUACCUGUGAGCAGCUGGCAA | 2688 |
| 1658058 | | | | | | |
| AD- | usasccugugAfGfCfagcuggcaauL96 | 2047 | asdTsugdCcdAgcugdCuCfacagguascsu | 2369 | AGUACCUGUGAGCAGCUGGCAAA | 2689 |
| 1658059 | | | | | | |
| AD- | asasuggucgGfGfAfugcuggccauL96 | 2048 | asdTsggdCcdAgcaudCcCfgaccauusgsc | 2370 | GCAAUGGUCGGGAUGCUGGCCAA | 2690 |
| 1658184 | | | | | | |
| AD- | asusggucggGfAfUfgcuggccaauL96 | 2049 | asdTsugdGcdCagcadTcCfcgaccaususg | 2371 | CAAUGGUCGGGAUGCUGGCCAAC | 2691 |
| 1658185 | | | | | | |
| AD- | usgsgucgggAfUfGfcuggccaacuL96 | 2050 | asdGsuudGgdCcagcdAuCfccgaccasusu | 2372 | AAUGGUCGGGAUGCUGGCCAACU | 2692 |
| 1658186 | | | | | | |
| AD- | gsgsucgggaUfGfCfuggccaacuuL96 | 2051 | asdAsgudTgdGccagdCaUfcccgaccsasu | 2373 | AUGGUCGGGAUGCUGGCCAACUU | 2693 |
| 1658187 | | | | | | |
| AD- | gsuscgggauGfCfUfggccaacuuuL96 | 2052 | asdAsagdTudGgccadGcAfucccgacscsa | 2374 | UGGUCGGGAUGCUGGCCAACUUC | 2694 |
| 1658188 | | | | | | |
| AD- | uscsgggaugCfUfGfgccaacuucuL96 | 2053 | asdGsaadGudTggccdAgCfaucccgascsc | 2375 | GGUCGGGAUGCUGGCCAACUUCU | 2695 |
| 1658189 | | | | | | |
| AD- | csgsggaugcUfGfGfccaacuucuuL96 | 2054 | asdAsgadAgdTuggcdCaGfcaucccgsasc | 2376 | GUCGGGAUGCUGGCCAACUUCUU | 2696 |
| 1658190 | | | | | | |
| AD- | gsgsgaugcuGfGfCfcaacuucuuuL96 | 2055 | asdAsagdAadGuuggdCcAfgcaucccsgsa | 2377 | UCGGGAUGCUGGCCAACUUCUUG | 1257 |
| 1658191 | | | | | | |
| AD- | gsgsaugcugGfCfCfaacuucuuguL96 | 2056 | asdCsaadGadAguugdGcCfagcauccscsg | 2378 | CGGGAUGCUGGCCAACUUCUUGG | 2697 |
| 1658192 | | | | | | |
| AD- | gsasugcuggCfCfAfacuucuugguL96 | 2057 | asdCscadAgdAaguudGgCfcagcaucscsc | 2379 | GGGAUGCUGGCCAACUUCUUGGG | 2698 |
| 1658193 | | | | | | |
| AD- | gscsuggccaAfCfUfucuugggcuuL96 | 2058 | asdAsgcdCcdAagaadGuUfggccagcsasu | 2380 | AUGCUGGCCAACUUCUUGGGCUU | 1258 |
| 1658196 | | | | | | |
| AD- | csusggccaaCfUfUfcuugggcuuuL96 | 2059 | asdAsagdCcdCaagadAgUfuggccagscsa | 2381 | UGCUGGCCAACUUCUUGGGCUUC | 2699 |
| 1658197 | | | | | | |
| AD- | gscscaacuuCfUfUfgggcuuccguL96 | 2060 | asdCsggdAadGcccadAgAfaguuggcscsa | 2382 | UGGCCAACUUCUUGGGCUUCCGU | 2700 |
| 1658200 | | | | | | |
| AD- | cscsaacuucUfUfGfggcuuccguuL96 | 2061 | asdAscgdGadAgcccdAaGfaaguuggscsc | 2383 | GGCCAACUUCUUGGGCUUCCGUA | 2701 |
| 1658201 | | | | | | |
| AD- | csasacuucuUfGfGfgcuuccguauL96 | 2062 | asdTsacdGgdAagccdCaAfgaaguugsgsc | 2384 | GCCAACUUCUUGGGCUUCCGUAU | 1259 |
| 1658202 | | | | | | |
| AD- | asascuucuuGfGfGfcuuccguauuL96 | 2063 | asdAsuadCgdGaagcdCcAfagaaguusgsg | 2385 | CCAACUUCUUGGGCUUCCGUAUA | 1260 |
| 1658203 | | | | | | |
| AD- | ascsuucuugGfGfCfuuccguauauL96 | 2064 | asdTsaudAcdGgaagdCcCfaagaagususg | 2386 | CAACUUCUUGGGCUUCCGUAUAU | 1261 |
| 1658204 | | | | | | |
| AD- | csusucuuggGfCfUfuccguauauuL96 | 2065 | asdAsuadTadCggaadGcCfcaagaagsusu | 2387 | AACUUCUUGGGCUUCCGUAUAUA | 2702 |
| 1658205 | | | | | | |
| AD- | ususcuugggCfUfUfccguauauauL96 | 2066 | asdTsaudAudAcggadAgCfccaagaasgsu | 2388 | ACUUCUUGGGCUUCCGUAUAUAU | 2703 |
| 1658206 | | | | | | |
| AD- | uscsuugggcUfUfCfcguauauauuL96 | 2067 | asdAsuadTadTacggdAaGfcccaagasasg | 2389 | CUUCUUGGGCUUCCGUAUAUAUG | 1262 |
| 1658207 | | | | | | |
| AD- | csusugggcuUfCfCfguauauauguL96 | 2068 | asdCsaudAudAuacgdGaAfgcccaagsasa | 2390 | UUCUUGGGCUUCCGUAUAUAUGG | 2704 |
| 1658208 | | | | | | |
| AD- | ususgggcuuCfCfGfuauauaugguL96 | 2069 | asdCscadTadTauacdGgAfagcccaasgsa | 2391 | UCUUGGGCUUCCGUAUAUAUGGC | 1263 |
| 1658209 | | | | | | |
| AD- | usgsggcuucCfGfUfauauauggcuL96 | 2070 | asdGsccdAudAuauadCgGfaagcccasasg | 2392 | CUUGGGCUUCCGUAUAUAUGGCA | 2705 |
| 1658210 | | | | | | |
| AD- | gsgsgcuuccGfUfAfuauauggcauL96 | 2071 | asdTsgcdCadTauaudAcGfgaagcccsasa | 2393 | UUGGGCUUCCGUAUAUAUGGCAU | 2706 |
| 1658211 | | | | | | |
| AD- | gsgscuuccgUfAfUfauauggcauuL96 | 2072 | asdAsugdCcdAuauadTaCfggaagccscsa | 2394 | UGGGCUUCCGUAUAUAUGGCAUG | 2707 |
| 1658212 | | | | | | |
| AD- | gscsuuccguAfUfAfuauggcauguL96 | 2073 | asdCsaudGcdCauaudAuAfcggaagcscsc | 2395 | GGGCUUCCGUAUAUAUGGCAUGC | 2708 |
| 1658213 | | | | | | |
| AD- | usasuauaugGfCfAfugcacaguguL96 | 2074 | asdCsacdTgdTgcaudGcCfauauauascsg | 2396 | CGUAUAUAUGGCAUGCACAGUGA | 2709 |
| 1658220 | | | | | | |
| AD- | asusauauggCfAfUfgcacagugauL96 | 2075 | asdTscadCudGugcadTgCfcauauausasc | 2397 | GUAUAUAUGGCAUGCACAGUGAG | 2710 |
| 1658221 | | | | | | |
| AD- | usasuauggcAfUfGfcacagugaguL96 | 2076 | asdCsucdAcdTgugcdAuGfccauauasusa | 2398 | UAUAUAUGGCAUGCACAGUGAGC | 1264 |
| 1658222 | | | | | | |
| AD- | asusauggcaUfGfCfacagugagcuL96 | 2077 | asdGscudCadCugugdCaUfgccauausasu | 2399 | AUAUAUGGCAUGCACAGUGAGCU | 2711 |
| 1658223 | | | | | | |
| AD- | usasuggcauGfCfAfcagugagcuuL96 | 2078 | asdAsgcdTcdAcugudGcAfugccauasusa | 2400 | UAUAUGGCAUGCACAGUGAGCUA | 2712 |
| 1658224 | | | | | | |
| AD- | asusggcaugCfAfCfagugagcuauL96 | 2079 | asdTsagdCudCacugdTgCfaugccausasu | 2401 | AUAUGGCAUGCACAGUGAGCUAU | 2713 |
| 1658225 | | | | | | |
| AD- | usgsgcaugcAfCfAfgugagcuauuL96 | 2080 | asdAsuadGcdTcacudGuGfcaugccasusa | 2402 | UAUGGCAUGCACAGUGAGCUAUG | 2714 |
| 1658226 | | | | | | |
| AD- | gsgscaugcaCfAfGfugagcuauguL96 | 2081 | asdCsaudAgdCucacdTgUfgcaugccsasu | 2403 | AUGGCAUGCACAGUGAGCUAUGG | 2715 |
| 1658227 | | | | | | |
| AD- | gscsaugcacAfGfUfgagcuaugguL96 | 2082 | asdCscadTadGcucadCuGfugcaugcscsa | 2404 | UGGCAUGCACAGUGAGCUAUGGG | 1265 |
| 1658228 | | | | | | |
| AD- | usgsgcacccUfGfGfccucucucuuL96 | 2083 | asdAsgadGadGaggcdCaGfggugccasasa | 2405 | UUUGGCACCCUGGCCUCUCUCUA | 2716 |
| 1658242 | | | | | | |
| AD- | gsgscacccuGfGfCfcucucucuauL96 | 2084 | asdTsagdAgdAgaggdCcAfgggugccsasa | 2406 | UUGGCACCCUGGCCUCUCUCUAU | 2717 |
| 1658243 | | | | | | |
| AD- | gsascaggcuAfCfAfggcaauccuuL96 | 2085 | asdAsggdAudTgccudGuAfgccugucsasg | 2407 | CUGACAGGCUACAGGCAAUCCUG | 1267 |
| 1658288 | | | | | | |
| AD- | ascsaggcuaCfAfGfgcaauccuguL96 | 2086 | asdCsagdGadTugccdTgUfagccuguscsa | 2408 | UGACAGGCUACAGGCAAUCCUGG | 1268 |
| 1658289 | | | | | | |
| AD- | ususccuuggAfAfGfgacaagaacuL96 | 2087 | asdGsuudCudTguccdTuCfcaaggaascsa | 2409 | UGUUCCUUGGAAGGACAAGAACU | 2718 |
| 1658313 | | | | | | |
| AD- | cscsuuggaaGfGfAfcaagaacuguL96 | 2088 | asdCsagdTudCuugudCcUfuccaaggsasa | 2410 | UUCCUUGGAAGGACAAGAACUGC | 1275 |
| 1658315 | | | | | | |
| AD- | csusuggaagGfAfCfaagaacugcuL96 | 2089 | asdGscadGudTcuugdTcCfuuccaagsgsa | 2411 | UCCUUGGAAGGACAAGAACUGCA | 2719 |
| 1658316 | | | | | | |
| AD- | csasccugaaGfCfAfgccguuuguuL96 | 2090 | asdAscadAadCggcudGcUfucaggugscsa | 2412 | UGCACCUGAAGCAGCCGUUUGUG | 1276 |
| 1658448 | | | | | | |
| AD- | csusgaagcaGfCfCfguuugugcauL96 | 2091 | asdTsgcdAcdAaacgdGcUfgcuucagsgsu | 2413 | ACCUGAAGCAGCCGUUUGUGCAG | 2720 |
| 1658451 | | | | | | |
| AD- | ususugugcaGfGfGfccuggcucuuL96 | 2092 | asdAsgadGcdCaggcdCcUfgcacaaascsg | 2414 | CGUUUGUGCAGGGCCUGGCUCUC | 2721 |
| 1658463 | | | | | | |
| AD- | ususgugcagGfGfCfcuggcucucuL96 | 2093 | asdGsagdAgdCcaggdCcCfugcacaasasc | 2415 | GUUUGUGCAGGGCCUGGCUCUCU | 2722 |
| 1658464 | | | | | | |
| AD- | usgsugcaggGfCfCfuggcucucuuL96 | 2094 | asdAsgadGadGccagdGcCfcugcacasasa | 2416 | UUUGUGCAGGGCCUGGCUCUCUA | 2723 |
| 1658465 | | | | | | |
| AD- | gsusgcagggCfCfUfggcucucuauL96 | 2095 | asdTsagdAgdAgccadGgCfccugcacsasa | 2417 | UUGUGCAGGGCCUGGCUCUCUAU | 2724 |
| 1658466 | | | | | | |
| AD- | usgscagggcCfUfGfgcucucuauuL96 | 2096 | asdAsuadGadGagccdAgGfcccugcascsa | 2418 | UGUGCAGGGCCUGGCUCUCUAUA | 2725 |
| 1658467 | | | | | | |
| AD- | ascsgcucucUfGfGfacuucacaguL96 | 2097 | asdCsugdTgdAagucdCaGfagagcgusgsg | 2419 | CCACGCUCUCUGGACUUCACAGA | 2726 |
| 1658484 | | | | | | |
| AD- | csgscucucuGfGfAfcuucacagauL96 | 2098 | asdTscudGudGaagudCcAfgagagcgsusg | 2420 | CACGCUCUCUGGACUUCACAGAA | 2727 |
| 1658485 | | | | | | |
| AD- | csusgagaagAfUfUfgacagguucuL96 | 2099 | asdGsaadCcdTgucadAuCfuucucagscsa | 2421 | UGCUGAGAAGAUUGACAGGUUCA | 2728 |
| 1658519 | | | | | | |
| AD- | usgsagaagaUfUfGfacagguucauL96 | 2100 | asdTsgadAcdCugucdAaUfcuucucasgsc | 2422 | GCUGAGAAGAUUGACAGGUUCAU | 2729 |
| 1658520 | | | | | | |
| AD- | gsasgaagauUfGfAfcagguucauuL96 | 2101 | asdAsugdAadCcugudCaAfucuucucsasg | 2423 | CUGAGAAGAUUGACAGGUUCAUG | 2730 |
| 1658521 | | | | | | |
| AD- | asgsaagauuGfAfCfagguucauguL96 | 2102 | asdCsaudGadAccugdTcAfaucuucuscsa | 2424 | UGAGAAGAUUGACAGGUUCAUGC | 2731 |
| 1658522 | | | | | | |
| AD- | gsasagauugAfCfAfgguucaugcuL96 | 2103 | asdGscadTgdAaccudGuCfaaucuucsusc | 2425 | GAGAAGAUUGACAGGUUCAUGCA | 2732 |
| 1658523 | | | | | | |
| AD- | asasgauugaCfAfGfguucaugcauL96 | 2104 | asdTsgcdAudGaaccdTgUfcaaucuuscsu | 2426 | AGAAGAUUGACAGGUUCAUGCAG | 2733 |
| 1658524 | | | | | | |
| AD- | asgsauugacAfGfGfuucaugcaguL96 | 2105 | asdCsugdCadTgaacdCuGfucaaucususc | 2427 | GAAGAUUGACAGGUUCAUGCAGG | 2734 |
| 1658525 | | | | | | |
| AD- | gsasuugacaGfGfUfucaugcagguL96 | 2106 | asdCscudGcdAugaadCcUfgucaaucsusu | 2428 | AAGAUUGACAGGUUCAUGCAGGC | 2735 |
| 1658526 | | | | | | |
| AD- | asusugacagGfUfUfcaugcaggcuL96 | 2107 | asdGsccdTgdCaugadAcCfugucaauscsu | 2429 | AGAUUGACAGGUUCAUGCAGGCU | 2736 |
| 1658527 | | | | | | |
| AD- | ususgacaggUfUfCfaugcaggcuuL96 | 2108 | asdAsgcdCudGcaugdAaCfcugucaasusc | 2430 | GAUUGACAGGUUCAUGCAGGCUG | 2737 |
| 1658528 | | | | | | |
| AD- | usgsacagguUfCfAfugcaggcuguL96 | 2109 | asdCsagdCcdTgcaudGaAfccugucasasu | 2431 | AUUGACAGGUUCAUGCAGGCUGU | 2738 |
| 1658529 | | | | | | |
| AD- | gsascagguuCfAfUfgcaggcuguuL96 | 2110 | asdAscadGcdCugcadTgAfaccugucsasa | 2432 | UUGACAGGUUCAUGCAGGCUGUG | 2739 |
| 1658530 | | | | | | |
| AD- | ascsagguucAfUfGfcaggcuguguL96 | 2111 | asdCsacdAgdCcugcdAuGfaaccuguscsa | 2433 | UGACAGGUUCAUGCAGGCUGUGA | 1287 |
| 1658531 | | | | | | |
| AD- | gsusucaugcAfGfGfcugugacaguL96 | 2112 | asdCsugdTcdAcagcdCuGfcaugaacscsu | 2434 | AGGUUCAUGCAGGCUGUGACAGG | 2740 |
| 1658535 | | | | | | |
| AD- | asusgcaggcUfGfUfgacaggauguL96 | 2113 | asdCsaudCcdTgucadCaGfccugcausgsa | 2435 | UCAUGCAGGCUGUGACAGGAUGG | 1288 |
| 1658539 | | | | | | |
| AD- | gscsaggcugUfGfAfcaggauggauL96 | 2114 | asdTsccdAudCcugudCaCfagccugcsasu | 2436 | AUGCAGGCUGUGACAGGAUGGAA | 1289 |
| 1658541 | | | | | | |
| AD- | csasggcuguGfAfCfaggauggaauL96 | 2115 | asdTsucdCadTccugdTcAfcagccugscsa | 2437 | UGCAGGCUGUGACAGGAUGGAAG | 2741 |
| 1658542 | | | | | | |
| AD- | gscsuuucaaCfAfCfcuacguccauL96 | 2116 | asdTsggdAcdGuaggdTgUfugaaagcscsa | 2438 | UGGCUUUCAACACCUACGUCCAC | 1292 |
| 1658605 | | | | | | |
| AD- | gsasguucugGfGfUfggacaacaguL96 | 2117 | asdCsugdTudGuccadCcCfagaacucscsu | 2439 | AGGAGUUCUGGGUGGACAACAGC | 2742 |
| 1658650 | | | | | | |
| AD- | gsgsacaacaGfCfAfccucaguguuL96 | 2118 | asdAscadCudGaggudGcUfguuguccsasc | 2440 | GUGGACAACAGCACCUCAGUGUC | 1299 |
| 1658661 | | | | | | |
| AD- | gsascaacagCfAfCfcucagugucuL96 | 2119 | asdGsacdAcdTgaggdTgCfuguugucscsa | 2441 | UGGACAACAGCACCUCAGUGUCU | 1300 |
| 1658662 | | | | | | |
| AD- | ascsaacagcAfCfCfucagugucuuL96 | 2120 | asdAsgadCadCugagdGuGfcuguuguscsc | 2442 | GGACAACAGCACCUCAGUGUCUG | 2743 |
| 1658663 | | | | | | |
| AD- | csasacagcaCfCfUfcagugucuguL96 | 2121 | asdCsagdAcdAcugadGgUfgcuguugsusc | 2443 | GACAACAGCACCUCAGUGUCUGU | 1301 |
| 1658664 | | | | | | |
| AD- | asascagcacCfUfCfagugucuguuL96 | 2122 | asdAscadGadCacugdAgGfugcuguusgsu | 2444 | ACAACAGCACCUCAGUGUCUGUU | 2744 |
| 1658665 | | | | | | |
| AD- | asusgccucuGfAfCfcuggacaaguL96 | 2123 | asdCsuudGudCcaggdTcAfgaggcausasg | 2445 | CUAUGCCUCUGACCUGGACAAGG | 2745 |
| 1658801 | | | | | | |
| AD- | usgsccucugAfCfCfuggacaagguL96 | 2124 | asdCscudTgdTccagdGuCfagaggcasusa | 2446 | UAUGCCUCUGACCUGGACAAGGU | 2746 |
| 1658802 | | | | | | |
| AD- | asasgguggaGfGfGfucucacuuuuL96 | 2125 | asdAsaadGudGagacdCcUfccaccuusgsu | 2447 | ACAAGGUGGAGGGUCUCACUUUC | 2747 |
| 1658818 | | | | | | |
| AD- | asgsguggagGfGfUfcucacuuucuL96 | 2126 | asdGsaadAgdTgagadCcCfuccaccususg | 2448 | CAAGGUGGAGGGUCUCACUUUCC | 2748 |
| 1658819 | | | | | | |
| AD- | gsgsuggaggGfUfCfucacuuuccuL96 | 2127 | asdGsgadAadGugagdAcCfcuccaccsusu | 2449 | AAGGUGGAGGGUCUCACUUUCCA | 2749 |
| 1658820 | | | | | | |
| AD- | gsusggagggUfCfUfcacuuuccauL96 | 2128 | asdTsggdAadAgugadGaCfccuccacscsu | 2450 | AGGUGGAGGGUCUCACUUUCCAG | 1318 |
| 1658821 | | | | | | |
| AD- | gsasgggucuCfAfCfuuuccagcauL96 | 2129 | asdTsgcdTgdGaaagdTgAfgacccucscsa | 2451 | UGGAGGGUCUCACUUUCCAGCAA | 2750 |
| 1658824 | | | | | | |
| AD- | asgsggucucAfCfUfuuccagcaauL96 | 2130 | asdTsugdCudGgaaadGuGfagacccuscsc | 2452 | GGAGGGUCUCACUUUCCAGCAAA | 2751 |
| 1658825 | | | | | | |
| AD- | gsgsgucucaCfUfUfuccagcaaauL96 | 2131 | asdTsuudGcdTggaadAgUfgagacccsusc | 2453 | GAGGGUCUCACUUUCCAGCAAAA | 2752 |
| 1658826 | | | | | | |
| AD- | gsgsucucacUfUfUfccagcaaaauL96 | 2132 | asdTsuudTgdCuggadAaGfugagaccscsu | 2454 | AGGGUCUCACUUUCCAGCAAAAC | 2753 |
| 1658827 | | | | | | |
| AD- | gsuscucacuUfUfCfcagcaaaacuL96 | 2133 | asdGsuudTudGcuggdAaAfgugagacscsc | 2455 | GGGUCUCACUUUCCAGCAAAACU | 2754 |
| 1658828 | | | | | | |
| AD- | uscsucacuuUfCfCfagcaaaacuuL96 | 2134 | asdAsgudTudTgcugdGaAfagugagascsc | 2456 | GGUCUCACUUUCCAGCAAAACUC | 2755 |
| 1658829 | | | | | | |
| AD- | csuscacuuuCfCfAfgcaaaacucuL96 | 2135 | asdGsagdTudTugcudGgAfaagugagsasc | 2457 | GUCUCACUUUCCAGCAAAACUCC | 1319 |
| 1658830 | | | | | | |
| AD- | uscsacuuucCfAfGfcaaaacuccuL96 | 2136 | asdGsgadGudTuugcdTgGfaaagugasgsa | 2458 | UCUCACUUUCCAGCAAAACUCCC | 2756 |
| 1658831 | | | | | | |
| AD- | csascuuuccAfGfCfaaaacucccuL96 | 2137 | asdGsggdAgdTuuugdCuGfgaaagugsasg | 2459 | CUCACUUUCCAGCAAAACUCCCU | 2757 |
| 1658832 | | | | | | |
| AD- | ascsuuuccaGfCfAfaaacucccuuL96 | 2138 | asdAsggdGadGuuuudGcUfggaaagusgsa | 2460 | UCACUUUCCAGCAAAACUCCCUC | 2758 |
| 1658833 | | | | | | |
| AD- | csusuuccagCfAfAfaacucccucuL96 | 2139 | asdGsagdGgdAguuudTgCfuggaaagsusg | 2461 | CACUUUCCAGCAAAACUCCCUCA | 2759 |
| 1658834 | | | | | | |
| AD- | ususuccagcAfAfAfacucccucauL96 | 2140 | asdTsgadGgdGaguudTuGfcuggaaasgsu | 2462 | ACUUUCCAGCAAAACUCCCUCAA | 2760 |
| 1658835 | | | | | | |
| AD- | ususccagcaAfAfAfcucccucaauL96 | 2141 | asdTsugdAgdGgagudTuUfgcuggaasasg | 2463 | CUUUCCAGCAAAACUCCCUCAAC | 2761 |
| 1658836 | | | | | | |
| AD- | uscscagcaaAfAfCfucccucaacuL96 | 2142 | asdGsuudGadGggagdTuUfugcuggasasa | 2464 | UUUCCAGCAAAACUCCCUCAACU | 2762 |
| 1658837 | | | | | | |
| AD- | cscsagcaaaAfCfUfcccucaacuuL96 | 2143 | asdAsgudTgdAgggadGuUfuugcuggsasa | 2465 | UUCCAGCAAAACUCCCUCAACUG | 2763 |
| 1658838 | | | | | | |
| AD- | csasgcaaaaCfUfCfccucaacuguL96 | 2144 | asdCsagdTudGagggdAgUfuuugcugsgsa | 2466 | UCCAGCAAAACUCCCUCAACUGG | 1320 |
| 1658839 | | | | | | |
| AD- | asgscaaaacUfCfCfcucaacugguL96 | 2145 | asdCscadGudTgaggdGaGfuuuugcusgsg | 2467 | CCAGCAAAACUCCCUCAACUGGA | 1321 |
| 1658840 | | | | | | |
| AD- | gscsaaaacuCfCfCfucaacuggauL96 | 2146 | asdTsccdAgdTugagdGgAfguuuugcsusg | 2468 | CAGCAAAACUCCCUCAACUGGAU | 2764 |
| 1658841 | | | | | | |
| AD- | csasaaacucCfCfUfcaacuggauuL96 | 2147 | asdAsucdCadGuugadGgGfaguuuugscsu | 2469 | AGCAAAACUCCCUCAACUGGAUG | 2765 |
| 1658842 | | | | | | |
| AD- | asasaacuccCfUfCfaacuggauguL96 | 2148 | asdCsaudCcdAguugdAgGfgaguuuusgsc | 2470 | GCAAAACUCCCUCAACUGGAUGA | 1322 |
| 1658843 | | | | | | |
| AD- | asasacucccUfCfAfacuggaugauL96 | 2149 | asdTscadTcdCaguudGaGfggaguuususg | 2471 | CAAAACUCCCUCAACUGGAUGAA | 2766 |
| 1658844 | | | | | | |
| AD- | asascucccuCfAfAfcuggaugaauL96 | 2150 | asdTsucdAudCcagudTgAfgggaguususu | 2472 | AAAACUCCCUCAACUGGAUGAAG | 2767 |
| 1658845 | | | | | | |
| AD- | ascsucccucAfAfCfuggaugaaguL96 | 2151 | asdCsuudCadTccagdTuGfagggagususu | 2473 | AAACUCCCUCAACUGGAUGAAGA | 1323 |
| 1658846 | | | | | | |
| AD- | csuscccucaAfCfUfggaugaagauL96 | 2152 | asdTscudTcdAuccadGuUfgagggagsusu | 2474 | AACUCCCUCAACUGGAUGAAGAA | 2768 |
| 1658847 | | | | | | |
| AD- | uscsccucaaCfUfGfgaugaagaauL96 | 2153 | asdTsucdTudCauccdAgUfugagggasgsu | 2475 | ACUCCCUCAACUGGAUGAAGAAA | 2769 |
| 1658848 | | | | | | |
| AD- | cscscucaacUfGfGfaugaagaaauL96 | 2154 | asdTsuudCudTcaucdCaGfuugagggsasg | 2476 | CUCCCUCAACUGGAUGAAGAAAC | 2770 |
| 1658849 | | | | | | |
| AD- | csuscaacugGfAfUfgaagaaacuuL96 | 2155 | asdAsgudTudCuucadTcCfaguugagsgsg | 2477 | CCCUCAACUGGAUGAAGAAACUA | 2771 |
| 1658850 | | | | | | |
| AD- | asasggaucuUfAfUfgaccugcaguL96 | 2156 | asdCsugdCadGgucadTaAfgauccuusgsc | 2478 | GCAAGGAUCUUAUGACCUGCAGG | 2772 |
| 1658874 | | | | | | |
| AD- | asgsgaucuuAfUfGfaccugcagguL96 | 2157 | asdCscudGcdAggucdAuAfagauccususg | 2479 | CAAGGAUCUUAUGACCUGCAGGA | 2773 |
| 1658875 | | | | | | |
| AD- | csusuaugacCfUfGfcaggaccuguL96 | 2158 | asdCsagdGudCcugcdAgGfucauaagsasu | 2480 | AUCUUAUGACCUGCAGGACCUGC | 1329 |
| 1658880 | | | | | | |
| AD- | csgsagcugaAfCfCfugcaaaaauuL96 | 2159 | asdAsuudTudTgcagdGuUfcagcucgsgsu | 2481 | ACCGAGCUGAACCUGCAAAAAUU | 1330 |
| 1658929 | | | | | | |
| AD- | gsasgcugaaCfCfUfgcaaaaauuuL96 | 2160 | asdAsaudTudTugcadGgUfucagcucsgsg | 2482 | CCGAGCUGAACCUGCAAAAAUUG | 1331 |
| 1658930 | | | | | | |
| AD- | asgscugaacCfUfGfcaaaaauuguL96 | 2161 | asdCsaadTudTuugcdAgGfuucagcuscsg | 2483 | CGAGCUGAACCUGCAAAAAUUGA | 1332 |
| 1658931 | | | | | | |
| AD- | gscsugaaccUfGfCfaaaaauugauL96 | 2162 | asdTscadAudTuuugdCaGfguucagcsusc | 2484 | GAGCUGAACCUGCAAAAAUUGAG | 1333 |
| 1658932 | | | | | | |
| AD- | csusgaaccuGfCfAfaaaauugaguL96 | 2163 | asdCsucdAadTuuuudGcAfgguucagscsu | 2485 | AGCUGAACCUGCAAAAAUUGAGC | 1334 |
| 1658933 | | | | | | |
| AD- | usgsaaccugCfAfAfaaauugagcuL96 | 2164 | asdGscudCadAuuuudTgCfagguucasgsc | 2486 | GCUGAACCUGCAAAAAUUGAGCA | 1335 |
| 1658934 | | | | | | |
| AD- | gsasaccugcAfAfAfaauugagcauL96 | 2165 | asdTsgcdTcdAauuudTuGfcagguucsasg | 2487 | CUGAACCUGCAAAAAUUGAGCAA | 2774 |
| 1658935 | | | | | | |
| AD- | usgscaaaaaUfUfGfagcaaugacuL96 | 2166 | asdGsucdAudTgcucdAaUfuuuugcasgsg | 2488 | CCUGCAAAAAUUGAGCAAUGACC | 1336 |
| 1658940 | | | | | | |
| AD- | gsasggugcuGfAfAfcagcauuuuuL96 | 2167 | asdAsaadAudGcugudTcAfgcaccucscsc | 2489 | GGGAGGUGCUGAACAGCAUUUUU | 1341 |
| 1658954 | | | | | | |
| AD- | asgsgugcugAfAfCfagcauuuuuuL96 | 2168 | asdAsaadAadTgcugdTuCfagcaccuscsc | 2490 | GGAGGUGCUGAACAGCAUUUUUU | 2775 |
| 1658955 | | | | | | |
| AD- | gsgsugcugaAfCfAfgcauuuuuuuL96 | 2169 | asdAsaadAadAugcudGuUfcagcaccsusc | 2491 | GAGGUGCUGAACAGCAUUUUUUU | 2776 |
| 1658956 | | | | | | |
| AD- | gsusgcugaaCfAfGfcauuuuuuuuL96 | 2170 | asdAsaadAadAaugcdTgUfucagcacscsu | 2492 | AGGUGCUGAACAGCAUUUUUUUU | 2777 |
| 1658957 | | | | | | |
| AD- | usgscugaacAfGfCfauuuuuuuuuL96 | 2171 | asdAsaadAadAaaugdCuGfuucagcascsc | 2493 | GGUGCUGAACAGCAUUUUUUUUG | 2778 |
| 1658958 | | | | | | |
| AD- | gscsugaacaGfCfAfuuuuuuuuguL96 | 2172 | asdCsaadAadAaaaudGcUfguucagcsasc | 2494 | GUGCUGAACAGCAUUUUUUUUGA | 2779 |
| 1658959 | | | | | | |
| AD- | csusgaacagCfAfUfuuuuuuugauL96 | 2173 | asdTscadAadAaaaadTgCfuguucagscsa | 2495 | UGCUGAACAGCAUUUUUUUUGAG | 2780 |
| 1658960 | | | | | | |
| AD- | usgsagagagAfGfCfccacagaguuL96 | 2174 | asdAscudCudGugggdCuCfucucucasusc | 2496 | GAUGAGAGAGAGCCCACAGAGUC | 2781 |
| 1658992 | | | | | | |
| AD- | asgsagagagCfCfCfacagagucuuL96 | 2175 | asdAsgadCudCugugdGgCfucucucuscsa | 2497 | UGAGAGAGAGCCCACAGAGUCUA | 2782 |
| 1658994 | | | | | | |
| AD- | gsasgagagcCfCfAfcagagucuauL96 | 2176 | asdTsagdAcdTcugudGgGfcucucucsusc | 2498 | GAGAGAGAGCCCACAGAGUCUAC | 2783 |
| 1658995 | | | | | | |
| AD- | gsasaccgccCfAfUfuccuguuuguL96 | 2177 | asdCsaadAcdAggaadTgGfgcgguucsasg | 2499 | CUGAACCGCCCAUUCCUGUUUGC | 2784 |
| 1659055 | | | | | | |
| AD- | asasccgcccAfUfUfccuguuugcuL96 | 2178 | asdGscadAadCaggadAuGfggcgguuscsa | 2500 | UGAACCGCCCAUUCCUGUUUGCU | 1354 |
| 1659056 | | | | | | |
| AD- | ascscgcccaUfUfCfcuguuugcuuL96 | 2179 | asdAsgcdAadAcaggdAaUfgggggususc | 2501 | GAACCGCCCAUUCCUGUUUGCUG | 1355 |
| 1659057 | | | | | | |
| AD- | cscsgcccauUfCfCfuguuugcuguL96 | 2180 | asdCsagdCadAacagdGaAfugggggsusu | 2502 | AACCGCCCAUUCCUGUUUGCUGU | 1356 |
| 1659058 | | | | | | |
| AD- | csgscccauuCfCfUfguuugcuguuL96 | 2181 | asdAscadGcdAaacadGgAfaugggcgsgsu | 2503 | ACCGCCCAUUCCUGUUUGCUGUG | 1357 |
| 1659059 | | | | | | |
| AD- | gscsccauucCfUfGfuuugcuguguL96 | 2182 | asdCsacdAgdCaaacdAgGfaaugggcsgsg | 2504 | CCGCCCAUUCCUGUUUGCUGUGU | 2785 |
| 1659060 | | | | | | |
| AD- | cscscauuccUfGfUfuugcuguguuL96 | 2183 | asdAscadCadGcaaadCaGfgaaugggscsg | 2505 | CGCCCAUUCCUGUUUGCUGUGUA | 2786 |
| 1659061 | | | | | | |
| AD- | cscsauuccuGfUfUfugcuguguauL96 | 2184 | asdTsacdAcdAgcaadAcAfggaauggsgsc | 2506 | GCCCAUUCCUGUUUGCUGUGUAU | 2787 |
| 1659062 | | | | | | |
| AD- | csasuuccugUfUfUfgcuguguauuL96 | 2185 | asdAsuadCadCagcadAaCfaggaaugsgsg | 2507 | CCCAUUCCUGUUUGCUGUGUAUG | 2788 |
| 1659063 | | | | | | |
| AD- | asusuccuguUfUfGfcuguguauguL96 | 2186 | asdCsaudAcdAcagcdAaAfcaggaausgsg | 2508 | CCAUUCCUGUUUGCUGUGUAUGA | 1358 |
| 1659064 | | | | | | |
| AD- | ususccuguuUfGfCfuguguaugauL96 | 2187 | asdTscadTadCacagdCaAfacaggaasusg | 2509 | CAUUCCUGUUUGCUGUGUAUGAU | 2789 |
| 1659065 | | | | | | |
| AD- | uscscuguuuGfCfUfguguaugauuL96 | 2188 | asdAsucdAudAcacadGcAfaacaggasasu | 2510 | AUUCCUGUUUGCUGUGUAUGAUC | 1359 |
| 1659066 | | | | | | |
| AD- | cscsuguuugCfUfGfuguaugaucuL96 | 2189 | asdGsaudCadTacacdAgCfaaacaggsasa | 2511 | UUCCUGUUUGCUGUGUAUGAUCA | 2790 |
| 1659067 | | | | | | |
| AD- | csusguuugcUfGfUfguaugaucauL96 | 2190 | asdTsgadTcdAuacadCaGfcaaacagsgsa | 2512 | UCCUGUUUGCUGUGUAUGAUCAA | 2791 |
| 1659068 | | | | | | |
| AD- | usgsuuugcuGfUfGfuaugaucaauL96 | 2191 | asdTsugdAudCauacdAcAfgcaaacasgsg | 2513 | CCUGUUUGCUGUGUAUGAUCAAA | 2792 |
| 1659069 | | | | | | |
| AD- | gsusuugcugUfGfUfaugaucaaauL96 | 2192 | asdTsuudGadTcauadCaCfagcaaacsasg | 2514 | CUGUUUGCUGUGUAUGAUCAAAG | 2793 |
| 1659070 | | | | | | |
| AD- | ususugcuguGfUfAfugaucaaaguL96 | 2193 | asdCsuudTgdAucaudAcAfcagcaaascsa | 2515 | UGUUUGCUGUGUAUGAUCAAAGC | 2794 |
| 1659071 | | | | | | |
| AD- | csasgucuccCfAfCfcuuuucuucuL96 | 2194 | asdGsaadGadAaaggdTgGfgagacugsgsg | 2516 | CCCAGUCUCCCACCUUUUCUUCU | 2795 |
| 1659161 | | | | | | |
| AD- | gsuscucccaCfCfUfuuucuucuauL96 | 2195 | asdTsagdAadGaaaadGgUfgggagacsusg | 2517 | CAGUCUCCCACCUUUUCUUCUAA | 2796 |
| 1659162 | | | | | | |
| AD- | csuscccaccUfUfUfucuucuaauuL96 | 2196 | asdAsuudAgdAagaadAaGfgugggagsasc | 2518 | GUCUCCCACCUUUUCUUCUAAUG | 1366 |
| 1659163 | | | | | | |
| AD- | uscsccaccuUfUfUfcuucuaauguL96 | 2197 | asdCsaudTadGaagadAaAfggugggasgsa | 2519 | UCUCCCACCUUUUCUUCUAAUGA | 1367 |
| 1659164 | | | | | | |
| AD- | cscscaccuuUfUfCfuucuaaugauL96 | 2198 | asdTscadTudAgaagdAaAfaggugggsasg | 2520 | CUCCCACCUUUUCUUCUAAUGAG | 1368 |
| 1659165 | | | | | | |
| AD- | cscsaccuuuUfCfUfucuaaugaguL96 | 2199 | asdCsucdAudTagaadGaAfaagguggsgsa | 2521 | UCCCACCUUUUCUUCUAAUGAGU | 2797 |
| 1659166 | | | | | | |
| AD- | csasccuuuuCfUfUfcuaaugaguuL96 | 2200 | asdAscudCadTuagadAgAfaaaggugsgsg | 2522 | CCCACCUUUUCUUCUAAUGAGUC | 2798 |
| 1659167 | | | | | | |
| AD- | ascscuuuucUfUfCfuaaugagucuL96 | 2201 | asdGsacdTcdAuuagdAaGfaaaaggusgsg | 2523 | CCACCUUUUCUUCUAAUGAGUCG | 2799 |
| 1659168 | | | | | | |
| AD- | cscsguuucuCfCfUfuggucuaaguL96 | 2202 | asdCsuudAgdAccaadGgAfgaaacggscsu | 2524 | AGCCGUUUCUCCUUGGUCUAAGU | 2800 |
| 1659208 | | | | | | |
| AD- | csgsuuucucCfUfUfggucuaaguuL96 | 2203 | asdAscudTadGaccadAgGfagaaacgsgsc | 2525 | GCCGUUUCUCCUUGGUCUAAGUG | 1387 |
| 1659209 | | | | | | |
| AD- | gsusuucuccUfUfGfgucuaaguguL96 | 2204 | asdCsacdTudAgaccdAaGfgagaaacsgsg | 2526 | CCGUUUCUCCUUGGUCUAAGUGU | 1388 |
| 1659210 | | | | | | |
| AD- | gsusuugcugGfGfUfuuauuuuaguL96 | 2205 | asdCsuadAadAuaaadCcCfagcaaacsusg | 2527 | CAGUUUGCUGGGUUUAUUUUAGA | 1407 |
| 1659282 | | | | | | |
| AD- | ususugcuggGfUfUfuauuuuagauL96 | 2206 | asdTscudAadAauaadAcCfcagcaaascsu | 2528 | AGUUUGCUGGGUUUAUUUUAGAG | 1408 |
| 1659283 | | | | | | |
| AD- | ususgcugggUfUfUfauuuuagaguL96 | 2207 | asdCsucdTadAaauadAaCfccagcaasasc | 2529 | GUUUGCUGGGUUUAUUUUAGAGA | 1409 |
| 1659284 | | | | | | |
| AD- | usgscuggguUfUfAfuuuuagagauL96 | 2208 | asdTscudCudAaaaudAaAfcccagcasasa | 2530 | UUUGCUGGGUUUAUUUUAGAGAA | 1410 |
| 1659285 | | | | | | |
| AD- | gscsuggguuUfAfUfuuuagagaauL96 | 2209 | asdTsucdTcdTaaaadTaAfacccagcsasa | 2531 | UUGCUGGGUUUAUUUUAGAGAAU | 2801 |
| 1659286 | | | | | | |
| AD- | csusggguuuAfUfUfuuagagaauuL96 | 2210 | asdAsuudCudCuaaadAuAfaacccagscsa | 2532 | UGCUGGGUUUAUUUUAGAGAAUG | 2802 |
| 1659287 | | | | | | |
| AD- | usgsgguuuaUfUfUfuagagaauguL96 | 2211 | asdCsaudTcdTcuaadAaUfaaacccasgsc | 2533 | GCUGGGUUUAUUUUAGAGAAUGG | 2803 |
| 1659288 | | | | | | |
| AD- | gsgsguuuauUfUfUfagagaaugguL96 | 2212 | asdCscadTudCucuadAaAfuaaacccsasg | 2534 | CUGGGUUUAUUUUAGAGAAUGGG | 1411 |
| 1659289 | | | | | | |
| AD- | gsasggcaagAfAfCfcaguguuuauL96 | 2213 | asdTsaadAcdAcuggdTuCfuugccucscsc | 2535 | GGGAGGCAAGAACCAGUGUUUAG | 2804 |
| 1659290 | | | | | | |
| AD- | asgsgcaagaAfCfCfaguguuuaguL96 | 2214 | asdCsuadAadCacugdGuUfcuugccuscsc | 2536 | GGAGGCAAGAACCAGUGUUUAGC | 1414 |
| 1659291 | | | | | | |
| AD- | gsgscaagaaCfCfAfguguuuagcuL96 | 2215 | asdGscudAadAcacudGgUfucuugccsusc | 2537 | GAGGCAAGAACCAGUGUUUAGCG | 1415 |
| 1659292 | | | | | | |
| AD- | gscsaagaacCfAfGfuguuuagcguL96 | 2216 | asdCsgcdTadAacacdTgGfuucuugcscsu | 2538 | AGGCAAGAACCAGUGUUUAGCGC | 2805 |
| 1659293 | | | | | | |
| AD- | csasagaaccAfGfUfguuuagcgcuL96 | 2217 | asdGscgdCudAaacadCuGfguucuugscsc | 2539 | GGCAAGAACCAGUGUUUAGCGCG | 2806 |
| 1659294 | | | | | | |
| AD- | asasgaaccaGfUfGfuuuagcgcguL96 | 2218 | asdCsgcdGcdTaaacdAcUfgguucuusgsc | 2540 | GCAAGAACCAGUGUUUAGCGCGG | 2807 |
| 1659295 | | | | | | |
| AD- | asgsaaccagUfGfUfuuagcgcgguL96 | 2219 | asdCscgdCgdCuaaadCaCfugguucususg | 2541 | CAAGAACCAGUGUUUAGCGCGGG | 2808 |
| 1659296 | | | | | | |
| AD- | gsasaccaguGfUfUfuagcgcggguL96 | 2220 | asdCsccdGcdGcuaadAcAfcugguucsusu | 2542 | AAGAACCAGUGUUUAGCGCGGGA | 2809 |
| 1659297 | | | | | | |
| AD- | asasccagugUfUfUfagcgcgggauL96 | 2221 | asdTsccdCgdCgcuadAaCfacugguuscsu | 2543 | AGAACCAGUGUUUAGCGCGGGAC | 2810 |
| 1659298 | | | | | | |
| AD- | csusguuccaAfAfAfagaauuccauL96 | 2222 | asdTsggdAadTucuudTuUfggaacagsusa | 2544 | UACUGUUCCAAAAAGAAUUCCAA | 1419 |
| 1659321 | | | | | | |
| AD- | usgsuuccaaAfAfAfgaauuccaauL96 | 2223 | asdTsugdGadAuucudTuUfuggaacasgsu | 2545 | ACUGUUCCAAAAAGAAUUCCAAC | 2811 |
| 1659322 | | | | | | |
| AD- | gsusuccaaaAfAfGfaauuccaacuL96 | 2224 | asdGsuudGgdAauucdTuUfuuggaacsasg | 2546 | CUGUUCCAAAAAGAAUUCCAACC | 2812 |
| 1659323 | | | | | | |
| AD- | uscscaaaaaGfAfAfuuccaaccguL96 | 2225 | asdCsggdTudGgaaudTcUfuuuuggasasc | 2547 | GUUCCAAAAAGAAUUCCAACCGA | 2813 |
| 1659325 | | | | | | |
| AD- | cscsaaaaagAfAfUfuccaaccgauL96 | 2226 | asdTscgdGudTggaadTuCfuuuuuggsasa | 2548 | UUCCAAAAAGAAUUCCAACCGAC | 2814 |
| 1659326 | | | | | | |
| AD- | csasaaaagaAfUfUfccaaccgacuL96 | 2227 | asdGsucdGgdTuggadAuUfcuuuuugsgsa | 2549 | UCCAAAAAGAAUUCCAACCGACC | 1420 |
| 1659327 | | | | | | |
| AD- | asasaaagaaUfUfCfcaaccgaccuL96 | 2228 | asdGsgudCgdGuuggdAaUfucuuuuusgsg | 2550 | CCAAAAAGAAUUCCAACCGACCA | 2815 |
| 1659328 | | | | | | |
| AD- | asasaagaauUfCfCfaaccgaccauL96 | 2229 | asdTsggdTcdGguugdGaAfuucuuuususg | 2551 | CAAAAAGAAUUCCAACCGACCAG | 2816 |
| 1659329 | | | | | | |
| AD- | asasagaauuCfCfAfaccgaccaguL96 | 2230 | asdCsugdGudCgguudGgAfauucuuususu | 2552 | AAAAAGAAUUCCAACCGACCAGC | 2817 |
| 1659330 | | | | | | |
| AD- | asasgaauucCfAfAfccgaccagcuL96 | 2231 | asdGscudGgdTcggudTgGfaauucuususu | 2553 | AAAAGAAUUCCAACCGACCAGCU | 2818 |
| 1659331 | | | | | | |
| AD- | asgsaauuccAfAfCfcgaccagcuuL96 | 2232 | asdAsgcdTgdGucggdTuGfgaauucususu | 2554 | AAAGAAUUCCAACCGACCAGCUU | 2819 |
| 1659332 | | | | | | |
| AD- | gsasauuccaAfCfCfgaccagcuuuL96 | 2233 | asdAsagdCudGgucgdGuUfggaauucsusu | 2555 | AAGAAUUCCAACCGACCAGCUUG | 2820 |
| 1659333 | | | | | | |
| AD- | asasuuccaaCfCfGfaccagcuuguL96 | 2234 | asdCsaadGcdTggucdGgUfuggaauuscsu | 2556 | AGAAUUCCAACCGACCAGCUUGU | 2821 |
| 1659334 | | | | | | |
| AD- | asusuccaacCfGfAfccagcuuguuL96 | 2235 | asdAscadAgdCuggudCgGfuuggaaususc | 2557 | GAAUUCCAACCGACCAGCUUGUU | 2822 |
| 1659335 | | | | | | |
| AD- | ususccaaccGfAfCfcagcuuguuuL96 | 2236 | asdAsacdAadGcuggdTcGfguuggaasusu | 2558 | AAUUCCAACCGACCAGCUUGUUU | 2823 |
| 1659336 | | | | | | |
| AD- | uscscaaccgAfCfCfagcuuguuuuL96 | 2237 | asdAsaadCadAgcugdGuCfgguuggasasu | 2559 | AUUCCAACCGACCAGCUUGUUUG | 2824 |
| 1659337 | | | | | | |
| AD- | cscsaaccgaCfCfAfgcuuguuuguL96 | 2238 | asdCsaadAcdAagcudGgUfcgguuggsasa | 2560 | UUCCAACCGACCAGCUUGUUUGU | 2825 |
| 1659338 | | | | | | |
| AD- | csasaccgacCfAfGfcuuguuuguuL96 | 2239 | asdAscadAadCaagcdTgGfucgguugsgsa | 2561 | UCCAACCGACCAGCUUGUUUGUG | 2826 |
| 1659339 | | | | | | |
| AD- | asasccgaccAfGfCfuuguuuguguL96 | 2240 | asdCsacdAadAcaagdCuGfgucgguusgsg | 2562 | CCAACCGACCAGCUUGUUUGUGA | 2827 |
| 1659340 | | | | | | |
| AD- | ascscgaccaGfCfUfuguuugugauL96 | 2241 | asdTscadCadAacaadGcUfggucggususg | 2563 | CAACCGACCAGCUUGUUUGUGAA | 1421 |
| 1659341 | | | | | | |
| AD- | cscsgaccagCfUfUfguuugugaauL96 | 2242 | asdTsucdAcdAaacadAgCfuggucggsusu | 2564 | AACCGACCAGCUUGUUUGUGAAA | 2828 |
| 1659342 | | | | | | |
| AD- | csgsaccagcUfUfGfuuugugaaauL96 | 2243 | asdTsuudCadCaaacdAaGfcuggucgsgsu | 2565 | ACCGACCAGCUUGUUUGUGAAAC | 2829 |
| 1659343 | | | | | | |
| AD- | gsasccagcuUfGfUfuugugaaacuL96 | 2244 | asdGsuudTcdAcaaadCaAfgcuggucsgsg | 2566 | CCGACCAGCUUGUUUGUGAAACA | 2830 |
| 1659344 | | | | | | |
| AD- | ascscagcuuGfUfUfugugaaacauL96 | 2245 | asdTsgudTudCacaadAcAfagcugguscsg | 2567 | CGACCAGCUUGUUUGUGAAACAA | 2831 |
| 1659345 | | | | | | |
| AD- | cscsagcuugUfUfUfgugaaacaauL96 | 2246 | asdTsugdTudTcacadAaCfaagcuggsusc | 2568 | GACCAGCUUGUUUGUGAAACAAA | 2832 |
| 1659346 | | | | | | |
| AD- | csasgcuuguUfUfGfugaaacaaauL96 | 2247 | asdTsuudGudTucacdAaAfcaagcugsgsu | 2569 | ACCAGCUUGUUUGUGAAACAAAA | 2833 |
| 1659347 | | | | | | |
| AD- | asgscuuguuUfGfUfgaaacaaaauL96 | 2248 | asdTsuudTgdTuucadCaAfacaagcusgsg | 2570 | CCAGCUUGUUUGUGAAACAAAAA | 2834 |
| 1659348 | | | | | | |
| AD- | csusuguuugUfGfAfaacaaaaaauL96 | 2249 | asdTsuudTudTguuudCaCfaaacaagscsu | 2571 | AGCUUGUUUGUGAAACAAAAAAG | 2835 |
| 1659350 | | | | | | |
| AD- | ususguuuguGfAfAfacaaaaaaguL96 | 2250 | asdCsuudTudTuguudTcAfcaaacaasgsc | 2572 | GCUUGUUUGUGAAACAAAAAAGU | 2836 |
| 1659351 | | | | | | |
| AD- | usgsuucccuUfUfUfcaaguugaguL96 | 2251 | asdCsucdAadCuugadAaAfgggaacascsu | 2573 | AGUGUUCCCUUUUCAAGUUGAGA | 1425 |
| 1659371 | | | | | | |
| AD- | gsusucccuuUfUfCfaaguugagauL96 | 2252 | asdTscudCadAcuugdAaAfagggaacsasc | 2574 | GUGUUCCCUUUUCAAGUUGAGAA | 1426 |
| 1659372 | | | | | | |
| AD- | ususcccuuuUfCfAfaguugagaauL96 | 2253 | asdTsucdTcdAacuudGaAfaagggaascsa | 2575 | UGUUCCCUUUUCAAGUUGAGAAC | 2837 |
| 1659373 | | | | | | |
| AD- | csasaguugaGfAfAfcaaaaauuguL96 | 2254 | asdCsaadTudTuugudTcUfcaacuugsasa | 2576 | UUCAAGUUGAGAACAAAAAUUGG | 1427 |
| 1659382 | | | | | | |
| AD- | asasguugagAfAfCfaaaaauugguL96 | 2255 | asdCscadAudTuuugdTuCfucaacuusgsa | 2577 | UCAAGUUGAGAACAAAAAUUGGG | 1428 |
| 1659383 | | | | | | |
| AD- | asgsuugagaAfCfAfaaaauuggguL96 | 2256 | asdCsccdAadTuuuudGuUfcucaacususg | 2578 | CAAGUUGAGAACAAAAAUUGGGU | 1529 |
| 1659384 | | | | | | |
| AD- | gsusugagaaCfAfAfaaauuggguuL96 | 2257 | asdAsccdCadAuuuudTgUfucucaacsusu | 2579 | AAGUUGAGAACAAAAAUUGGGUU | 1429 |
| 1659385 | | | | | | |
| AD- | ususgagaacAfAfAfaauuggguuuL96 | 2258 | asdAsacdCcdAauuudTuGfuucucaascsu | 2580 | AGUUGAGAACAAAAAUUGGGUUU | 1430 |
| 1659386 | | | | | | |
| AD- | usgsagaacaAfAfAfauuggguuuuL96 | 2259 | asdAsaadCcdCaauudTuUfguucucasasc | 2581 | GUUGAGAACAAAAAUUGGGUUUU | 1431 |
| 1659387 | | | | | | |
| AD- | gsasgaacaaAfAfAfuuggguuuuuL96 | 2260 | asdAsaadAcdCcaaudTuUfuguucucsasa | 2582 | UUGAGAACAAAAAUUGGGUUUUA | 1432 |
| 1659388 | | | | | | |
| AD- | asgsaacaaaAfAfUfuggguuuuauL96 | 2261 | asdTsaadAadCccaadTuUfuuguucuscsa | 2583 | UGAGAACAAAAAUUGGGUUUUAA | 1433 |
| 1659389 | | | | | | |
| AD- | gsasacaaaaAfUfUfggguuuuaauL96 | 2262 | asdTsuadAadAcccadAuUfuuuguucsusc | 2584 | GAGAACAAAAAUUGGGUUUUAAA | 1434 |
| 1659390 | | | | | | |
| AD- | asascaaaaaUfUfGfgguuuuaaauL96 | 2263 | asdTsuudAadAacccdAaUfuuuuguuscsu | 2585 | AGAACAAAAAUUGGGUUUUAAAA | 2838 |
| 1659391 | | | | | | |
| AD- | asgsuauacaUfUfUfuugcauugcuL96 | 2264 | asdGscadAudGcaaadAaUfguauacususu | 2586 | AAAGUAUACAUUUUUGCAUUGCC | 2839 |
| 1659399 | | | | | | |
| AD- | gsusauacauUfUfUfugcauugccuL96 | 2265 | asdGsgcdAadTgcaadAaAfuguauacsusu | 2587 | AAGUAUACAUUUUUGCAUUGCCU | 1435 |
| 1659400 | | | | | | |
| AD- | usasuacauuUfUfUfgcauugccuuL96 | 2266 | asdAsggdCadAugcadAaAfauguauascsu | 2588 | AGUAUACAUUUUUGCAUUGCCUU | 2840 |
| 1659401 | | | | | | |
| AD- | asusacauuuUfUfGfcauugccuuuL96 | 2267 | asdAsagdGcdAaugcdAaAfaauguausasc | 2589 | GUAUACAUUUUUGCAUUGCCUUC | 1436 |
| 1659402 | | | | | | |
| AD- | csasuuuuugCfAfUfugccuucgguL96 | 2268 | asdCscgdAadGgcaadTgCfaaaaaugsusa | 2590 | UACAUUUUUGCAUUGCCUUCGGU | 1437 |
| 1659405 | | | | | | |
| AD- | asusuuuugcAfUfUfgccuucgguuL96 | 2269 | asdAsccdGadAggcadAuGfcaaaaausgsu | 2591 | ACAUUUUUGCAUUGCCUUCGGUU | 1438 |
| 1659406 | | | | | | |
| AD- | ususuuugcaUfUfGfccuucgguuuL96 | 2270 | asdAsacdCgdAaggcdAaUfgcaaaaasusg | 2592 | CAUUUUUGCAUUGCCUUCGGUUU | 1439 |
| 1659407 | | | | | | |
| AD- | ususuugcauUfGfCfcuucgguuuuL96 | 2271 | asdAsaadCcdGaaggdCaAfugcaaaasasu | 2593 | AUUUUUGCAUUGCCUUCGGUUUG | 1440 |
| 1659408 | | | | | | |
| AD- | ususugcauuGfCfCfuucgguuuguL96 | 2272 | asdCsaadAcdCgaagdGcAfaugcaaasasa | 2594 | UUUUUGCAUUGCCUUCGGUUUGU | 1441 |
| 1659409 | | | | | | |
| AD- | ususgcauugCfCfUfucgguuuguuL96 | 2273 | asdAscadAadCcgaadGgCfaaugcaasasa | 2595 | UUUUGCAUUGCCUUCGGUUUGUA | 1442 |
| 1659410 | | | | | | |
| AD- | usgscauugcCfUfUfcgguuuguauL96 | 2274 | asdTsacdAadAccgadAgGfcaaugcasasa | 2596 | UUUGCAUUGCCUUCGGUUUGUAU | 1443 |
| 1659411 | | | | | | |
| AD- | gscsauugccUfUfCfgguuuguauuL96 | 2275 | asdAsuadCadAaccgdAaGfgcaaugcsasa | 2597 | UUGCAUUGCCUUCGGUUUGUAUU | 1444 |
| 1659412 | | | | | | |
| AD- | csasuugccuUfCfGfguuuguauuuL96 | 2276 | asdAsaudAcdAaaccdGaAfggcaaugscsa | 2598 | UGCAUUGCCUUCGGUUUGUAUUU | 1445 |
| 1659413 | | | | | | |
| AD- | asusugccuuCfGfGfuuuguauuuuL96 | 2277 | asdAsaadTadCaaacdCgAfaggcaausgsc | 2599 | GCAUUGCCUUCGGUUUGUAUUUA | 1446 |
| 1659414 | | | | | | |
| AD- | ususgccuucGfGfUfuuguauuuauL96 | 2278 | asdTsaadAudAcaaadCcGfaaggcaasusg | 2600 | CAUUGCCUUCGGUUUGUAUUUAG | 1447 |
| 1659415 | | | | | | |
| AD- | usgsccuucgGfUfUfuguauuuaguL96 | 2279 | asdCsuadAadTacaadAcCfgaaggcasasu | 2601 | AUUGCCUUCGGUUUGUAUUUAGU | 1448 |
| 1659416 | | | | | | |
| AD- | gscscuucggUfUfUfguauuuaguuL96 | 2280 | asdAscudAadAuacadAaCfcgaaggcsasa | 2602 | UUGCCUUCGGUUUGUAUUUAGUG | 1449 |
| 1659417 | | | | | | |
| AD- | cscsuucgguUfUfGfuauuuaguguL96 | 2281 | asdCsacdTadAauacdAaAfccgaaggscsa | 2603 | UGCCUUCGGUUUGUAUUUAGUGU | 1450 |
| 1659418 | | | | | | |
| AD- | csusucgguuUfGfUfauuuaguguuL96 | 2282 | asdAscadCudAaauadCaAfaccgaagsgsc | 2604 | GCCUUCGGUUUGUAUUUAGUGUC | 1451 |
| 1659419 | | | | | | |
| AD- | ususcgguuuGfUfAfuuuagugucuL96 | 2283 | asdGsacdAcdTaaaudAcAfaaccgaasgsg | 2605 | CCUUCGGUUUGUAUUUAGUGUCU | 2841 |
| 1659420 | | | | | | |
| AD- | uscsgguuugUfAfUfuuagugucuuL96 | 2284 | asdAsgadCadCuaaadTaCfaaaccgasasg | 2606 | CUUCGGUUUGUAUUUAGUGUCUU | 2842 |
| 1659421 | | | | | | |
| AD- | csgsguuuguAfUfUfuagugucuuuL96 | 2285 | asdAsagdAcdAcuaadAuAfcaaaccgsasa | 2607 | UUCGGUUUGUAUUUAGUGUCUUG | 2843 |
| 1659422 | | | | | | |
| AD- | gsgsuuuguaUfUfUfagugucuuguL96 | 2286 | asdCsaadGadCacuadAaUfacaaaccsgsa | 2608 | UCGGUUUGUAUUUAGUGUCUUGA | 1452 |
| 1659423 | | | | | | |
| AD- | gsusuuguauUfUfAfgugucuugauL96 | 2287 | asdTscadAgdAcacudAaAfuacaaacscsg | 2609 | CGGUUUGUAUUUAGUGUCUUGAA | 2844 |
| 1659424 | | | | | | |
| AD- | ususuguauuUfAfGfugucuugaauL96 | 2288 | asdTsucdAadGacacdTaAfauacaaascsc | 2610 | GGUUUGUAUUUAGUGUCUUGAAU | 2845 |
| 1659425 | | | | | | |
| AD- | ususguauuuAfGfUfgucuugaauuL96 | 2289 | asdAsuudCadAgacadCuAfaauacaasasc | 2611 | GUUUGUAUUUAGUGUCUUGAAUG | 2846 |
| 1659426 | | | | | | |
| AD- | usgsuauuuaGfUfGfucuugaauguL96 | 2290 | asdCsaudTcdAagacdAcUfaaauacasasa | 2612 | UUUGUAUUUAGUGUCUUGAAUGU | 1453 |
| 1659427 | | | | | | |
| AD- | gsusauuuagUfGfUfcuugaauguuL96 | 2291 | asdAscadTudCaagadCaCfuaaauacsasa | 2613 | UUGUAUUUAGUGUCUUGAAUGUA | 2847 |
| 1659428 | | | | | | |
| AD- | usasuuuaguGfUfCfuugaauguauL96 | 2292 | asdTsacdAudTcaagdAcAfcuaaauascsa | 2614 | UGUAUUUAGUGUCUUGAAUGUAA | 1454 |
| 1659429 | | | | | | |
| AD- | asusuuagugUfCfUfugaauguaauL96 | 2293 | asdTsuadCadTucaadGaCfacuaaausasc | 2615 | GUAUUUAGUGUCUUGAAUGUAAG | 2848 |
| 1659430 | | | | | | |
| AD- | ususuaguguCfUfUfgaauguaaguL96 | 2294 | asdCsuudAcdAuucadAgAfcacuaaasusa | 2616 | UAUUUAGUGUCUUGAAUGUAAGA | 1455 |
| 1659431 | | | | | | |
| AD- | ususagugucUfUfGfaauguaagauL96 | 2295 | asdTscudTadCauucdAaGfacacuaasasu | 2617 | AUUUAGUGUCUUGAAUGUAAGAA | 2849 |
| 1659432 | | | | | | |
| AD- | usasgugucuUfGfAfauguaagaauL96 | 2296 | asdTsucdTudAcauudCaAfgacacuasasa | 2618 | UUUAGUGUCUUGAAUGUAAGAAC | 2850 |
| 1659433 | | | | | | |
| AD- | asgsugucuuGfAfAfuguaagaacuL96 | 2297 | asdGsuudCudTacaudTcAfagacacusasa | 2619 | UUAGUGUCUUGAAUGUAAGAACA | 2851 |
| 1659434 | | | | | | |
| AD- | usgsucuugaAfUfGfuaagaacauuL96 | 2298 | asdAsugdTudCuuacdAuUfcaagacascsu | 2620 | AGUGUCUUGAAUGUAAGAACAUG | 2852 |
| 1659436 | | | | | | |
| AD- | gsuscuugaaUfGfUfaagaacauguL96 | 2299 | asdCsaudGudTcuuadCaUfucaagacsasc | 2621 | GUGUCUUGAAUGUAAGAACAUGA | 1456 |
| 1659437 | | | | | | |
| AD- | ususgaauguAfAfGfaacaugaccuL96 | 2300 | asdGsgudCadTguucdTuAfcauucaasgsa | 2622 | UCUUGAAUGUAAGAACAUGACCU | 2853 |
| 1659440 | | | | | | |
| AD- | gsusaagaacAfUfGfaccuccguguL96 | 2301 | asdCsacdGgdAggucdAuGfuucuuacsasu | 2623 | AUGUAAGAACAUGACCUCCGUGU | 1457 |
| 1659446 | | | | | | |
| AD- | usasagaacaUfGfAfccuccguguuL96 | 2302 | asdAscadCgdGaggudCaUfguucuuascsa | 2624 | UGUAAGAACAUGACCUCCGUGUA | 1458 |
| 1659447 | | | | | | |
| AD- | asasgaacauGfAfCfcuccguguauL96 | 2303 | asdTsacdAcdGgaggdTcAfuguucuusasc | 2625 | GUAAGAACAUGACCUCCGUGUAG | 1459 |
| 1659448 | | | | | | |
| AD- | asgsaacaugAfCfCfuccguguaguL96 | 2304 | asdCsuadCadCggagdGuCfauguucususa | 2626 | UAAGAACAUGACCUCCGUGUAGU | 1460 |
| 1659449 | | | | | | |
| AD- | gsasacaugaCfCfUfccguguaguuL96 | 2305 | asdAscudAcdAcggadGgUfcauguucsusu | 2627 | AAGAACAUGACCUCCGUGUAGUG | 1461 |
| 1659450 | | | | | | |
| AD- | asascaugacCfUfCfcguguaguguL96 | 2306 | asdCsacdTadCacggdAgGfucauguuscsu | 2628 | AGAACAUGACCUCCGUGUAGUGU | 1462 |
| 1659451 | | | | | | |
| AD- | ascsaugaccUfCfCfguguaguguuL96 | 2307 | asdAscadCudAcacgdGaGfgucaugususc | 2629 | GAACAUGACCUCCGUGUAGUGUC | 1463 |
| 1659452 | | | | | | |
| AD- | csasugaccuCfCfGfuguagugucuL96 | 2308 | asdGsacdAcdTacacdGgAfggucaugsusu | 2630 | AACAUGACCUCCGUGUAGUGUCU | 2854 |
| 1659453 | | | | | | |
| AD- | asusgaccucCfGfUfguagugucuuL96 | 2309 | asdAsgadCadCuacadCgGfaggucausgsu | 2631 | ACAUGACCUCCGUGUAGUGUCUG | 2855 |
| 1659454 | | | | | | |
| AD- | csusuaguuuUfUfUfccacagauguL96 | 2310 | asdCsaudCudGuggadAaAfaacuaagsgsu | 2632 | ACCUUAGUUUUUUCCACAGAUGC | 2856 |
| 1659481 | | | | | | |
| AD- | ususaguuuuUfUfCfcacagaugcuL96 | 2311 | asdGscadTcdTguggdAaAfaaacuaasgsg | 2633 | CCUUAGUUUUUUCCACAGAUGCU | 2857 |
| 1659482 | | | | | | |
| AD- | usasguuuuuUfCfCfacagaugcuuL96 | 2312 | asdAsgcdAudCugugdGaAfaaaacuasasg | 2634 | CUUAGUUUUUUCCACAGAUGCUU | 2858 |
| 1659483 | | | | | | |
| AD- | asgsuuuuuuCfCfAfcagaugcuuuL96 | 2313 | asdAsagdCadTcugudGgAfaaaaacusasa | 2635 | UUAGUUUUUUCCACAGAUGCUUG | 2859 |
| 1659484 | | | | | | |
| AD- | gsusuuuuucCfAfCfagaugcuuguL96 | 2314 | asdCsaadGcdAucugdTgGfaaaaaacsusa | 2636 | UAGUUUUUUCCACAGAUGCUUGU | 2860 |
| 1659485 | | | | | | |
| AD- | ususuuuccaCfAfGfaugcuuguguL96 | 2315 | asdCsacdAadGcaucdTgUfggaaaaasasc | 2637 | GUUUUUUCCACAGAUGCUUGUGA | 2861 |
| 1659487 | | | | | | |
| AD- | ususuuccacAfGfAfugcuugugauL96 | 2316 | asdTscadCadAgcaudCuGfuggaaaasasa | 2638 | UUUUUUCCACAGAUGCUUGUGAU | 2862 |
| 1659488 | | | | | | |
| AD- | ususuccacaGfAfUfgcuugugauuL96 | 2317 | asdAsucdAcdAagcadTcUfguggaaasasa | 2639 | UUUUUCCACAGAUGCUUGUGAUU | 1473 |
| 1659489 | | | | | | |
| AD- | ususccacagAfUfGfcuugugauuuL96 | 2318 | asdAsaudCadCaagcdAuCfuguggaasasa | 2640 | UUUUCCACAGAUGCUUGUGAUUU | 2863 |
| 1659490 | | | | | | |
| AD- | uscscacagaUfGfCfuugugauuuuL96 | 2319 | asdAsaadTcdAcaagdCaUfcuguggasasa | 2641 | UUUCCACAGAUGCUUGUGAUUUU | 2864 |
| 1659491 | | | | | | |
| AD- | cscsacagauGfCfUfugugauuuuuL96 | 2320 | asdAsaadAudCacaadGcAfucuguggsasa | 2642 | UUCCACAGAUGCUUGUGAUUUUU | 2865 |
| 1659492 | | | | | | |
| AD- | csascagaugCfUfUfgugauuuuuuL96 | 2321 | asdAsaadAadTcacadAgCfaucugugsgsa | 2643 | UCCACAGAUGCUUGUGAUUUUUG | 1474 |
| 1659493 | | | | | | |
| AD- | ascscugaauUfUfCfuguuugaauuL96 | 2322 | asdAsuudCadAacagdAaAfuucaggusgsc | 2644 | GCACCUGAAUUUCUGUUUGAAUG | 1494 |
| 1659537 | | | | | | |
| AD- | cscsugaauuUfCfUfguuugaauguL96 | 2323 | asdCsaudTcdAaacadGaAfauucaggsusg | 2645 | CACCUGAAUUUCUGUUUGAAUGC | 1495 |
| 1659538 | | | | | | |
| AD- | gsgsaaccauAfGfCfugguuauuuuL96 | 2324 | asdAsaadTadAccagdCuAfugguuccsgsc | 2646 | GCGGAACCAUAGCUGGUUAUUUC | 1503 |
| 1659559 | | | | | | |
| AD- | gsasaccauaGfCfUfgguuauuucuL96 | 2325 | asdGsaadAudAaccadGcUfaugguucscsg | 2647 | CGGAACCAUAGCUGGUUAUUUCU | 1504 |
| 1659560 | | | | | | |
| AD- | asasccauagCfUfGfguuauuucuuL96 | 2326 | asdAsgadAadTaaccdAgCfuaugguuscsc | 2648 | GGAACCAUAGCUGGUUAUUUCUC | 1505 |
| 1659561 | | | | | | |
| AD- | ascscauagcUfGfGfuuauuucucuL96 | 2327 | asdGsagdAadAuaacdCaGfcuauggususc | 2649 | GAACCAUAGCUGGUUAUUUCUCC | 1506 |
| 1659562 | | | | | | |
| AD- | cscsauagcuGfGfUfuauuucuccuL96 | 2328 | asdGsgadGadAauaadCcAfgcuauggsusu | 2650 | AACCAUAGCUGGUUAUUUCUCCC | 1507 |
| 1659563 | | | | | | |
| AD- | cscsuuguguUfAfGfuaauaaacguL96 | 2329 | asdCsgudTudAuuacdTaAfcacaaggsgsa | 2651 | UCCCUUGUGUUAGUAAUAAACGU | 1518 |
| 1659582 | | | | | | |
| AD- | csusuguguuAfGfUfaauaaacguuL96 | 2330 | asdAscgdTudTauuadCuAfacacaagsgsg | 2652 | CCCUUGUGUUAGUAAUAAACGUC | 1519 |
| 1659583 | | | | | | |
| AD- | ususguguuaGfUfAfauaaacgucuL96 | 2331 | asdGsacdGudTuauudAcUfaacacaasgsg | 2653 | CCUUGUGUUAGUAAUAAACGUCU | 1520 |
| 1659584 | | | | | | |
| AD- | usgsuguuagUfAfAfuaaacgucuuL96 | 2332 | asdAsgadCgdTuuaudTaCfuaacacasasg | 2654 | CUUGUGUUAGUAAUAAACGUCUU | 1521 |
| 1659585 | | | | | | |
| AD- | gsusguuaguAfAfUfaaacgucuuuL96 | 2333 | asdAsagdAcdGuuuadTuAfcuaacacsasa | 2655 | UUGUGUUAGUAAUAAACGUCUUG | 1522 |
| 1659586 | | | | | | |
| AD- | usgsuuaguaAfUfAfaacgucuuguL96 | 2334 | asdCsaadGadCguuudAuUfacuaacascsa | 2656 | UGUGUUAGUAAUAAACGUCUUGC | 1523 |
| 1659587 | | | | | | |
| AD- | gsusuaguaaUfAfAfacgucuugcuL96 | 2335 | asdGscadAgdAcguudTaUfuacuaacsasc | 2657 | GUGUUAGUAAUAAACGUCUUGCC | 1524 |
| 1659588 | | | | | | |
| AD- | uscsucccacCfUfUfuucuucuaauL96 | 2336 | asdTsuadGadAgaaadAgGfugggagascsu | 2658 | AGUCUCCCACCUUUUCUUCUAAU | 2866 |
| 1321384 | | | | | | |
| AD- | cscsucaacuGfGfAfugaagaaacuL96 | 2337 | asdGsuudTcdTucaudCcAfguugaggsgsa | 2659 | UCCCUCAACUGGAUGAAGAAACU | 2867 |
| 1321390 | | | | | | |

### Example 3. Additional Duplexes Targeting Angiotensinogen (AGT)

[0717] Additional agents targeting angiotensinogen gene were designed using custom R and Python scripts and synthesized as described above.

[0718] A detailed list of the unmodified AGT sense and antisense strand nucleotide sequences is shown in Table 6. A detailed list of the modified AGT sense and antisense strand nucleotide sequences is shown in Table 7.

[0719] For transfections, 7.5 μl of Opti-MEM plus 0.1 μl of Lipofectamine RNAiMax per well (Invitrogen, Carlsbad CA. cat #13778-150) was added to 2.5 μl of each siRNA duplex to an individual well in a 384-well plate. The mixture was then incubated at room temperature for 15 minutes. Forty μl of complete growth media without antibiotic containing ˜1.5×10⁴ Hep3B was then added to the siRNA mixture. Cells are incubated for 24 hours prior to RNA purification. Single dose experiments were performed at 10 nM, 1 nM, and 0.1 nM final duplex concentration.

[0720] Total RNA isolation was performed using DYNABEADS. Briefly, cells were lysed in 10 μl of Lysis/Binding Buffer containing 3 μL of beads per well were mixed for 10 minutes on an electrostatic shaker. The washing steps were automated on a Biotek EL406, using a magnetic plate support. Beads were washed (in 3 μL) once in Buffer A, once in Buffer B, and twice in Buffer E, with aspiration steps in between. Following a final aspiration, complete 12 μL RT mixture was added to each well, as described below.

[0721] For cDNA synthesis, a master mix of 1.5 μl 10× Buffer, 0.6 μl 10× dNTPs, 1.5 μl Random primers, 0.75 μl Reverse Transcriptase, 0.75 μl RNase inhibitor and 9.9 μl of H₂O per reaction was added per well. Plates were sealed, agitated for 10 minutes on an electrostatic shaker, and then incubated at 37 degrees C. for 2 hours. Following this, the plates were agitated at 80 degrees C. for 8 minutes.

[0722] RT-qPCR was performed as described above and relative fold change was calculated as described above. The results of the single dose screen of the agents in Tables 6 and 7 in Hep3b cells are shown in Table 8.

TABLE 6
Unmodified Sense and Antisense Strand Sequences of Angiotensinogen (AGT) dsRNA Agents

| | | SEQ ID | Range in | Antisense Strand | SEQ ID | Range in |
|---|---|---|---|---|---|---|
| Duplex Name | Sense Strand Sequence 5' to 3' | NO: | NM_000029.3 | Sequence 5' to 3' | NO: | NM_000029.3 |
| AD-1321384.2 | UCUCCCACCUUUUCUUCUAAU | 1736 | 1609-1629 | ATUAGAAGAAAAGGUGGGAGACU | 2014 | 1607-1629 |
| AD-1321390.2 | CCUCAACUGGAUGAAGAAACU | 1737 | 1135-1155 | AGUUTCTUCAUCCAGUUGAGGGA | 2015 | 1133-1155 |
| AD-1632799.1 | AGCCUGAGGGCCACCAUCCUU | 1530 | 86-106 | AAGGAUGGUGGCCCUCAGGCUCA | 1738 | 84-106 |
| AD-1632801.1 | CCUGAGGGCCACCAUCCUCUU | 1531 | 88-108 | AAGAGGAUGGUGGCCCUCAGGCU | 1739 | 86-108 |
| AD-1632805.1 | AGGGCCACCAUCCUCUGCCUU | 1532 | 92-112 | AAGGCAGAGGAUGGUGGCCCUCA | 2905 | 90-112 |
| AD-1632836.1 | GUCAUCCACAAUGAGAGUACU | 1544 | 170-190 | AGUACUCUCAUUGUGGAUGACGA | 2906 | 168-190 |
| AD-1632838.1 | GUGACCGGGUGUACAUACACU | 1533 | 138-158 | AGUGUAUGUACACCCGGUCACCU | 2907 | 136-158 |
| AD-1632840.1 | CUUCCACCUCGUCAUCCACAU | 1534 | 160-180 | AUGUGGAUGACGAGGUGGAAGGG | 2908 | 158-180 |
| AD-1632841.1 | UUCCACCUCGUCAUCCACAAU | 1535 | 161-181 | AUUGUGGAUGACGAGGUGGAAGG | 2909 | 159-181 |
| AD-1632842.1 | UCCACCUCGUCAUCCACAAUU | 1536 | 162-182 | AAUUGUGGAUGACGAGGUGGAAG | 1744 | 160-182 |
| AD-1632843.1 | CCACCUCGUCAUCCACAAUGU | 1537 | 163-183 | ACAUUGUGGAUGACGAGGUGGAA | 2910 | 161-183 |
| AD-1632844.1 | CACCUCGUCAUCCACAAUGAU | 1538 | 164-184 | AUCAUUGUGGAUGACGAGGUGGA | 2911 | 162-184 |
| AD-1632846.1 | CCUCGUCAUCCACAAUGAGAU | 1540 | 166-186 | AUCUCAUUGUGGAUGACGAGGUG | 2912 | 164-186 |
| AD-1632847.1 | CUCGUCAUCCACAAUGAGAGU | 1541 | 167-187 | ACUCUCAUUGUGGAUGACGAGGU | 2913 | 165-187 |
| AD-1632848.1 | UCGUCAUCCACAAUGAGAGUU | 1542 | 168-188 | AACUCUCAUUGUGGAUGACGAGG | 2914 | 166-188 |
| AD-1632849.1 | CGUCAUCCACAAUGAGAGUAU | 1543 | 169-189 | AUACUCUCAUUGUGGAUGACGAG | 2915 | 167-189 |
| AD-1632850.1 | UCAUCCACAAUGAGAGUACCU | 1545 | 171-191 | AGGUACUCUCAUUGUGGAUGACG | 2916 | 169-191 |
| AD-1632851.1 | CAUCCACAAUGAGAGUACCUU | 1546 | 172-192 | AAGGUACUCUCAUUGUGGAUGAC | 2917 | 170-192 |
| AD-1632852.1 | AUCCACAAUGAGAGUACCUGU | 32 | 173-193 | ACAGGUACUCUCAUUGUGGAUGA | 334 | 171-193 |
| AD-1632853.1 | UCCACAAUGAGAGUACCUGUU | 1547 | 174-194 | AACAGGUACUCUCAUUGUGGAUG | 2918 | 172-194 |
| AD-1632854.1 | CCACAAUGAGAGUACCUGUGU | 1548 | 175-195 | ACACAGGUACUCUCAUUGUGGAU | 1756 | 173-195 |
| AD-1632855.1 | CACAAUGAGAGUACCUGUGAU | 1549 | 176-196 | AUCACAGGUACUCUCAUUGUGGA | 2919 | 174-196 |
| AD-1632856.1 | ACAAUGAGAGUACCUGUGAGU | 33 | 177-197 | ACUCACAGGUACUCUCAUUGUGG | 335 | 175-197 |
| AD-1632857.1 | CAAUGAGAGUACCUGUGAGCU | 1550 | 178-198 | AGCUCACAGGUACUCUCAUUGUG | 1758 | 176-198 |
| AD-1632858.1 | AAUGAGAGUACCUGUGAGCAU | 1551 | 179-199 | AUGCUCACAGGUACUCUCAUUGU | 2920 | 177-199 |
| AD-1632859.1 | AUGAGAGUACCUGUGAGCAGU | 1552 | 180-200 | ACUGCUCACAGGUACUCUCAUUG | 1760 | 178-200 |
| AD-1632860.1 | UGAGAGUACCUGUGAGCAGCU | 1553 | 181-201 | AGCUGCUCACAGGUACUCUCAUU | 2921 | 179-201 |
| AD-1632861.1 | GAGAGUACCUGUGAGCAGCUU | 1554 | 182-202 | AAGCUGCUCACAGGUACUCUCAU | 2922 | 180-202 |
| AD-1632862.1 | AGAGUACCUGUGAGCAGCUGU | 1555 | 183-203 | ACAGCUGCUCACAGGUACUCUCA | 1763 | 181-203 |
| AD-1632863.1 | GAGUACCUGUGAGCAGCUGGU | 1556 | 184-204 | ACCAGCUGCUCACAGGUACUCUC | 2923 | 182-204 |
| AD-1632864.1 | AGUACCUGUGAGCAGCUGGCU | 1557 | 185-205 | AGCCAGCUGCUCACAGGUACUCU | 1765 | 183-205 |
| AD-1632865.1 | GUACCUGUGAGCAGCUGGCAU | 1558 | 186-206 | AUGCCAGCUGCUCACAGGUACUC | 2924 | 184-206 |
| AD-1632866.1 | UACCUGUGAGCAGCUGGCAAU | 1559 | 187-207 | AUUGCCAGCUGCUCACAGGUACU | 2925 | 185-207 |
| AD-1632991.1 | AAUGGUCGGGAUGCUGGCCAU | 1560 | 352-372 | AUGGCCAGCAUCCCGACCAUUGC | 2926 | 350-372 |
| AD-1632992.1 | AUGGUCGGGAUGCUGGCCAAU | 1561 | 353-373 | AUUGGCCAGCAUCCCGACCAUUG | 2927 | 351-373 |
| AD-1632993.1 | UGGUCGGGAUGCUGGCCAACU | 1562 | 354-374 | AGUUGGCCAGCAUCCCGACCAUU | 1770 | 352-374 |
| AD-1632994.1 | GGUCGGGAUGCUGGCCAACUU | 1563 | 355-375 | AAGUUGGCCAGCAUCCCGACCAU | 2928 | 353-375 |
| AD-1632995.1 | GUCGGGAUGCUGGCCAACUUU | 1564 | 356-376 | AAAGUUGGCCAGCAUCCCGACCA | 2929 | 354-376 |
| AD-1632996.1 | UCGGGAUGCUGGCCAACUUCU | 1565 | 357-377 | AGAAGUUGGCCAGCAUCCCGACC | 2930 | 355-377 |
| AD-1632997.1 | CGGGAUGCUGGCCAACUUCUU | 1566 | 358-378 | AAGAAGUUGGCCAGCAUCCCGAC | 2931 | 356-378 |
| AD-1632998.1 | GGGAUGCUGGCCAACUUCUUU | 49 | 359-379 | AAAGAAGUUGGCCAGCAUCCCGA | 351 | 357-379 |
| AD-1632999.1 | GGAUGCUGGCCAACUUCUUGU | 1567 | 360-380 | ACAAGAAGUUGGCCAGCAUCCCG | 1775 | 358-380 |
| AD-1633000.1 | GAUGCUGGCCAACUUCUUGGU | 1568 | 361-381 | ACCAAGAAGUUGGCCAGCAUCCC | 1776 | 359-381 |
| AD-1633003.1 | GCUGGCCAACUUCUUGGGCUU | 50 | 364-384 | AAGCCCAAGAAGUUGGCCAGCAU | 352 | 362-384 |
| AD-1633004.1 | CUGGCCAACUUCUUGGGCUUU | 1569 | 365-385 | AAAGCCCAAGAAGUUGGCCAGCA | 1777 | 363-385 |
| AD-1633007.1 | GCCAACUUCUUGGGCUUCCGU | 1570 | 368-388 | ACGGAAGCCCAAGAAGUUGGCCA | 1778 | 366-388 |
| AD-1633008.1 | CCAACUUCUUGGGCUUCCGUU | 1571 | 369-389 | AACGGAAGCCCAAGAAGUUGGCC | 1779 | 367-389 |
| AD-1633009.1 | CAACUUCUUGGGCUUCCGUAU | 51 | 370-390 | AUACGGAAGCCCAAGAAGUUGGC | 353 | 368-390 |
| AD-1633010.1 | AACUUCUUGGGCUUCCGUAUU | 52 | 371-391 | AAUACGGAAGCCCAAGAAGUUGG | 354 | 369-391 |
| AD-1633011.1 | ACUUCUUGGGCUUCCGUAUAU | 53 | 372-392 | AUAUACGGAAGCCCAAGAAGUUG | 355 | 370-392 |
| AD-1633012.1 | CUUCUUGGGCUUCCGUAUAUU | 1572 | 373-393 | AAUAUACGGAAGCCCAAGAAGUU | 2932 | 371-393 |
| AD-1633013.1 | UUCUUGGGCUUCCGUAUAUAU | 1573 | 374-394 | AUAUAUACGGAAGCCCAAGAAGU | 2933 | 372-394 |
| AD-1633014.1 | UCUUGGGCUUCCGUAUAUAUU | 54 | 375-395 | AAUAUAUACGGAAGCCCAAGAAG | 356 | 373-395 |
| AD-1633015.1 | CUUGGGCUUCCGUAUAUAUGU | 1574 | 376-396 | ACAUAUAUACGGAAGCCCAAGAA | 1785 | 374-396 |
| AD-1633016.1 | UUGGGCUUCCGUAUAUAUGGU | 55 | 377-397 | ACCAUAUAUACGGAAGCCCAAGA | 357 | 375-397 |
| AD-1633018.1 | GGGCUUCCGUAUAUAUGGCAU | 1576 | 379-399 | AUGCCAUAUAUACGGAAGCCCAA | 2934 | 377-399 |
| AD-1633019.1 | GGCUUCCGUAUAUAUGGCAUU | 1577 | 380-400 | AAUGCCAUAUAUACGGAAGCCCA | 2935 | 378-400 |
| AD-1633020.1 | GCUUCCGUAUAUAUGGCAUGU | 1578 | 381-401 | ACAUGCCAUAUAUACGGAAGCCC | 1790 | 379-401 |
| AD-1633027.1 | UAUAUAUGGCAUGCACAGUGU | 1579 | 388-408 | ACACUGUGCAUGCCAUAUAUACG | 2936 | 386-408 |
| AD-1633028.1 | AUAUAUGGCAUGCACAGUGAU | 1580 | 389-409 | AUCACUGUGCAUGCCAUAUAUAC | 2937 | 387-409 |
| AD-1633029.1 | UAUAUGGCAUGCACAGUGAGU | 56 | 390-410 | ACUCACUGUGCAUGCCAUAUAUA | 358 | 388-410 |
| AD-1633030.1 | AUAUGGCAUGCACAGUGAGCU | 1581 | 391-411 | AGCUCACUGUGCAUGCCAUAUAU | 1794 | 389-411 |
| AD-1633031.1 | UAUGGCAUGCACAGUGAGCUU | 1582 | 392-412 | AAGCUCACUGUGCAUGCCAUAUA | 2938 | 390-412 |
| AD-1633032.1 | UGGCAUGCACAGUGAGCUAUU | 1584 | 394-414 | AAUAGCUCACUGUGCAUGCCAUA | 2939 | 392-414 |
| AD-1633033.1 | GGCAUGCACAGUGAGCUAUGU | 1585 | 395-415 | ACAUAGCUCACUGUGCAUGCCAU | 2940 | 393-415 |
| AD-1633034.1 | GCAUGCACAGUGAGCUAUGGU | 57 | 396-416 | ACCAUAGCUCACUGUGCAUGCCA | 359 | 394-416 |
| AD-1633048.1 | UGGCACCCUGGCCUCUCUCUU | 1586 | 460-480 | AAGAGAGAGGCCAGGGUGCCAAA | 1800 | 458-480 |
| AD-1633049.1 | GGCACCCUGGCCUCUCUCUAU | 1587 | 461-481 | AUAGAGAGAGGCCAGGGUGCCAA | 2941 | 459-481 |
| AD-1633094.1 | GACAGGCUACAGGCAAUCCUU | 59 | 506-526 | AAGGAUUGCCUGUAGCCUGUCAG | 361 | 504-526 |
| AD-1633095.1 | ACAGGCUACAGGCAAUCCUGU | 60 | 507-527 | ACAGGAUUGCCUGUAGCCUGUCA | 362 | 505-527 |
| AD-1633119.1 | UUCCUUGGAAGGACAAGAACU | 1588 | 531-551 | AGUUCUUGUCCUUCCAAGGAACA | 2942 | 529-551 |
| AD-1633121.1 | CCUUGGAAGGACAAGAACUGU | 67 | 533-553 | ACAGUUCUUGUCCUUCCAAGGAA | 369 | 531-553 |
| AD-1633122.1 | CUUGGAAGGACAAGAACUGCU | 1589 | 534-554 | AGCAGUUCUUGUCCUUCCAAGGA | 2943 | 532-554 |
| AD-1633254.2 | CACCUGAAGCAGCCGUUUGUU | 68 | 692-712 | AACAAACGGCUGCUUCAGGUGCA | 370 | 690-712 |
| AD-1633257.2 | CUGAAGCAGCCGUUUGUGCAU | 1590 | 695-715 | AUGCACAAACGGCUGCUUCAGGU | 2944 | 693-715 |
| AD-1633269.2 | UUUGUGCAGGGCCUGGCUCUU | 1591 | 707-727 | AAGAGCCAGGCCCUGCACAAACG | 1808 | 705-727 |
| AD-1633270.2 | UUGUGCAGGGCCUGGCUCUCU | 1592 | 708-728 | AGAGAGCCAGGCCCUGCACAAAC | 1809 | 706-728 |
| AD-1633271.2 | UGUGCAGGGCCUGGCUCUCUU | 1593 | 709-729 | AAGAGAGCCAGGCCCUGCACAAA | 1810 | 707-729 |
| AD-1633272.2 | GUGCAGGGCCUGGCUCUCUAU | 1594 | 710-730 | AUAGAGAGCCAGGCCCUGCACAA | 2945 | 708-730 |
| AD-1633273.2 | UGCAGGGCCUGGCUCUCUAUU | 1595 | 711-731 | AAUAGAGAGCCAGGCCCUGCACA | 1812 | 709-731 |
| AD-1633290.2 | ACGCUCUCUGGACUUCACAGU | 1596 | 748-768 | ACUGUGAAGUCCAGAGAGCGUGG | 2946 | 746-768 |
| AD-1633291.2 | CGCUCUCUGGACUUCACAGAU | 1597 | 749-769 | AUCUGUGAAGUCCAGAGAGCGUG | 2947 | 747-769 |
| AD-1633324.2 | CUGAGAAGAUUGACAGGUUCU | 1598 | 783-803 | AGAACCUGUCAAUCUUCUCAGCA | 2948 | 781-803 |
| AD-1633325.2 | GAGAAGAUUGACAGGUUCAUU | 1600 | 785-805 | AAUGAACCUGUCAAUCUUCUCAG | 1817 | 783-805 |
| AD-1633326.2 | AGAAGAUUGACAGGUUCAUGU | 1601 | 786-806 | ACAUGAACCUGUCAAUCUUCUCA | 2949 | 784-806 |
| AD-1633327.2 | GAAGAUUGACAGGUUCAUGCU | 1602 | 787-807 | AGCAUGAACCUGUCAAUCUUCUC | 2950 | 785-807 |
| AD-1633328.2 | AAGAUUGACAGGUUCAUGCAU | 1603 | 788-808 | AUGCAUGAACCUGUCAAUCUUCU | 2951 | 786-808 |
| AD-1633329.2 | AGAUUGACAGGUUCAUGCAGU | 1604 | 789-809 | ACUGCAUGAACCUGUCAAUCUUC | 2952 | 787-809 |
| AD-1633330.2 | GAUUGACAGGUUCAUGCAGGU | 1605 | 790-810 | ACCUGCAUGAACCUGUCAAUCUU | 1822 | 788-810 |
| AD-1633331.2 | AUUGACAGGUUCAUGCAGGCU | 1606 | 791-811 | AGCCUGCAUGAACCUGUCAAUCU | 2953 | 789-811 |
| AD-1633332.2 | UUGACAGGUUCAUGCAGGCUU | 1607 | 792-812 | AAGCCUGCAUGAACCUGUCAAUC | 1824 | 790-812 |
| AD-1633333.2 | UGACAGGUUCAUGCAGGCUGU | 1608 | 793-813 | ACAGCCUGCAUGAACCUGUCAAU | 2954 | 791-813 |
| AD-1633334.2 | GACAGGUUCAUGCAGGCUGUU | 1609 | 794-814 | AACAGCCUGCAUGAACCUGUCAA | 2955 | 792-814 |
| AD-1633335.2 | ACAGGUUCAUGCAGGCUGUGU | 79 | 795-815 | ACACAGCCUGCAUGAACCUGUCA | 381 | 793-815 |
| AD-1633343.2 | AUGCAGGCUGUGACAGGAUGU | 80 | 803-823 | ACAUCCUGUCACAGCCUGCAUGA | 382 | 801-823 |
| AD-1633345.2 | GCAGGCUGUGACAGGAUGGAU | 81 | 805-825 | AUCCAUCCUGUCACAGCCUGCAU | 383 | 803-825 |
| AD-1633346.2 | CAGGCUGUGACAGGAUGGAAU | 1611 | 806-826 | AUUCCAUCCUGUCACAGCCUGCA | 2956 | 804-826 |
| AD-1633409.2 | GCUUUCAACACCUACGUCCAU | 84 | 869-889 | AUGGACGUAGGUGUUGAAAGCCA | 386 | 867-889 |
| AD-1633453.2 | GAGUUCUGGGUGGACAACAGU | 1612 | 935-955 | ACUGUUGUCCACCCAGAACUCCU | 2957 | 933-955 |
| AD-1633464.2 | GGACAACAGCACCUCAGUGUU | 91 | 946-966 | AACACUGAGGUGCUGUUGUCCAC | 393 | 944-966 |
| AD-1633465.2 | GACAACAGCACCUCAGUGUCU | 92 | 947-967 | AGACACUGAGGUGCUGUUGUCCA | 394 | 945-967 |
| AD-1633466.2 | ACAACAGCACCUCAGUGUCUU | 1613 | 948-968 | AAGACACUGAGGUGCUGUUGUCC | 1834 | 946-968 |
| AD-1633467.2 | CAACAGCACCUCAGUGUCUGU | 93 | 949-969 | ACAGACACUGAGGUGCUGUUGUC | 395 | 947-969 |
| AD-1633468.2 | AACAGCACCUCAGUGUCUGUU | 1614 | 950-970 | AACAGACACUGAGGUGCUGUUGU | 1835 | 948-970 |
| AD-1633604.2 | AUGCCUCUGACCUGGACAAGU | 1615 | 1086-1106 | ACUUGUCCAGGUCAGAGGCAUAG | 2958 | 1084-1106 |
| AD-1633621.2 | AAGGUGGAGGGUCUCACUUUU | 1617 | 1103-1123 | AAAAGUGAGACCCUCCACCUUGU | 1838 | 1101-1123 |
| AD-1633622.2 | AGGUGGAGGGUCUCACUUUCU | 1618 | 1104-1124 | AGAAAGUGAGACCCUCCACCUUG | 2959 | 1102-1124 |
| AD-1633623.2 | GGUGGAGGGUCUCACUUUCCU | 1619 | 1105-1125 | AGGAAAGUGAGACCCUCCACCUU | 1840 | 1103-1125 |
| AD-1633627.2 | GAGGGUCUCACUUUCCAGCAU | 1620 | 1109-1129 | AUGCUGGAAAGUGAGACCCUCCA | 2960 | 1107-1129 |
| AD-1633628.2 | AGGGUCUCACUUUCCAGCAAU | 1621 | 1110-1130 | AUUGCUGGAAAGUGAGACCCUCC | 2961 | 1108-1130 |
| AD-1633630.2 | GGUCUCACUUUCCAGCAAAAU | 1623 | 1112-1132 | AUUUUGCUGGAAAGUGAGACCCU | 2962 | 1110-1132 |
| AD-1633631.2 | GUCUCACUUUCCAGCAAAACU | 1624 | 1113-1133 | AGUUUUGCUGGAAAGUGAGACCC | 2963 | 1111-1133 |
| AD-1633632.2 | UCUCACUUUCCAGCAAAACUU | 1625 | 1114-1134 | AAGUUUUGCUGGAAAGUGAGACC | 2964 | 1112-1134 |
| AD-1633633.1 | CUCACUUUCCAGCAAAACUCU | 111 | 1115-1135 | AGAGUUUUGCUGGAAAGUGAGAC | 413 | 1113-1135 |
| AD-1633634.1 | UCACUUUCCAGCAAAACUCCU | 1626 | 1116-1136 | AGGAGUUUUGCUGGAAAGUGAGA | 2965 | 1114-1136 |
| AD-1633635.1 | CACUUUCCAGCAAAACUCCCU | 1627 | 1117-1137 | AGGGAGUUUUGCUGGAAAGUGAG | 2966 | 1115-1137 |
| AD-1633636.1 | ACUUUCCAGCAAAACUCCCUU | 1628 | 1118-1138 | AAGGGAGUUUUGCUGGAAAGUGA | 1851 | 1116-1138 |
| AD-1633637.1 | CUUUCCAGCAAAACUCCCUCU | 1629 | 1119-1139 | AGAGGGAGUUUUGCUGGAAAGUG | 2967 | 1117-1139 |
| AD-1633638.1 | UUUCCAGCAAAACUCCCUCAU | 1630 | 1120-1140 | AUGAGGGAGUUUUGCUGGAAAGU | 2968 | 1118-1140 |
| AD-1633639.1 | UUCCAGCAAAACUCCCUCAAU | 1631 | 1121-1141 | AUUGAGGGAGUUUUGCUGGAAAG | 2969 | 1119-1141 |
| AD-1633640.1 | UCCAGCAAAACUCCCUCAACU | 1632 | 1122-1142 | AGUUGAGGGAGUUUUGCUGGAAA | 2970 | 1120-1142 |
| AD-1633641.1 | CCAGCAAAACUCCCUCAACUU | 1633 | 1123-1143 | AAGUUGAGGGAGUUUUGCUGGAA | 2971 | 1121-1143 |
| AD-1633642.1 | CAGCAAAACUCCCUCAACUGU | 112 | 1124-1144 | ACAGUUGAGGGAGUUUUGCUGGA | 414 | 1122-1144 |
| AD-1633643.1 | AGCAAAACUCCCUCAACUGGU | 113 | 1125-1145 | ACCAGUUGAGGGAGUUUUGCUGG | 415 | 1123-1145 |
| AD-1633644.1 | GCAAAACUCCCUCAACUGGAU | 1634 | 1126-1146 | AUCCAGUUGAGGGAGUUUUGCUG | 2972 | 1124-1146 |
| AD-1633645.1 | CAAAACUCCCUCAACUGGAUU | 1635 | 1127-1147 | AAUCCAGUUGAGGGAGUUUUGCU | 1860 | 1125-1147 |
| AD-1633646.1 | AAAACUCCCUCAACUGGAUGU | 114 | 1128-1148 | ACAUCCAGUUGAGGGAGUUUUGC | 416 | 1126-1148 |
| AD-1633647.1 | AAACUCCCUCAACUGGAUGAU | 1636 | 1129-1149 | AUCAUCCAGUUGAGGGAGUUUUG | 2973 | 1127-1149 |
| AD-1633648.1 | AACUCCCUCAACUGGAUGAAU | 1637 | 1130-1150 | AUUCAUCCAGUUGAGGGAGUUUU | 2974 | 1128-1150 |
| AD-1633649.1 | ACUCCCUCAACUGGAUGAAGU | 115 | 1131-1151 | ACUUCAUCCAGUUGAGGGAGUUU | 417 | 1129-1151 |
| AD-1633650.1 | CUCCCUCAACUGGAUGAAGAU | 1638 | 1132-1152 | AUCUUCAUCCAGUUGAGGGAGUU | 2975 | 1130-1152 |
| AD-1633651.1 | UCCCUCAACUGGAUGAAGAAU | 1639 | 1133-1153 | AUUCUUCAUCCAGUUGAGGGAGU | 2976 | 1131-1153 |
| AD-1633652.1 | CCCUCAACUGGAUGAAGAAAU | 1640 | 1134-1154 | AUUUCUUCAUCCAGUUGAGGGAG | 2977 | 1132-1154 |
| AD-1633653.1 | CUCAACUGGAUGAAGAAACUU | 1641 | 1136-1156 | AAGUUUCUUCAUCCAGUUGAGGG | 2978 | 1134-1156 |
| AD-1633678.1 | AGGAUCUUAUGACCUGCAGGU | 1643 | 1201-1221 | ACCUGCAGGUCAUAAGAUCCUUG | 1869 | 1199-1221 |
| AD-1633683.1 | CUUAUGACCUGCAGGACCUGU | 121 | 1206-1226 | ACAGGUCCUGCAGGUCAUAAGAU | 423 | 1204-1226 |
| AD-1633732.1 | CGAGCUGAACCUGCAAAAAUU | 122 | 1261-1281 | AAUUUUUGCAGGUUCAGCUCGGU | 424 | 1259-1281 |
| AD-1633733.1 | GAGCUGAACCUGCAAAAAUUU | 123 | 1262-1282 | AAAUUUUUGCAGGUUCAGCUCGG | 425 | 1260-1282 |
| AD-1633734.1 | AGCUGAACCUGCAAAAAUUGU | 124 | 1263-1283 | ACAAUUUUUGCAGGUUCAGCUCG | 426 | 1261-1283 |
| AD-1633735.1 | GCUGAACCUGCAAAAAUUGAU | 125 | 1264-1284 | AUCAAUUUUUGCAGGUUCAGCUC | 427 | 1262-1284 |
| AD-1633736.1 | CUGAACCUGCAAAAAUUGAGU | 126 | 1265-1285 | ACUCAAUUUUUGCAGGUUCAGCU | 428 | 1263-1285 |
| AD-1633737.1 | UGAACCUGCAAAAAUUGAGCU | 127 | 1266-1286 | AGCUCAAUUUUUGCAGGUUCAGC | 429 | 1264-1286 |
| AD-1633738.1 | GAACCUGCAAAAAUUGAGCAU | 1644 | 1267-1287 | AUGCUCAAUUUUUGCAGGUUCAG | 2979 | 1265-1287 |
| AD-1633739.1 | AACCUGCAAAAAUUGAGCAAU | 2868 | 1268-1288 | AUUGCUCAAUUUUUGCAGGUUCA | 2980 | 1266-1288 |
| AD-1633740.1 | ACCUGCAAAAAUUGAGCAAUU | 2869 | 1269-1289 | AAUUGCUCAAUUUUUGCAGGUUC | 2981 | 1267-1289 |
| AD-1633741.1 | CCUGCAAAAAUUGAGCAAUGU | 2870 | 1270-1290 | ACAUUGCUCAAUUUUUGCAGGUU | 2982 | 1268-1290 |
| AD-1633742.1 | CUGCAAAAAUUGAGCAAUGAU | 2871 | 1271-1291 | AUCAUUGCUCAAUUUUUGCAGGU | 2983 | 1269-1291 |
| AD-1633743.1 | UGCAAAAAUUGAGCAAUGACU | 128 | 1272-1292 | AGUCAUUGCUCAAUUUUUGCAGG | 430 | 1270-1292 |
| AD-1633759.1 | GAGGUGCUGAACAGCAUUUUU | 133 | 1307-1327 | AAAAAUGCUGUUCAGCACCUCCC | 435 | 1305-1327 |
| AD-1633777.1 | UGAGAGAGAGCCCACAGAGUU | 1651 | 1345-1365 | AACUCUGUGGGCUCUCUCUCAUC | 1885 | 1343-1365 |
| AD-1633779.1 | AGAGAGAGCCCACAGAGUCUU | 1652 | 1347-1367 | AAGACUCUGUGGGCUCUCUCUCA | 1886 | 1345-1367 |
| AD-1633780.1 | GAGAGAGCCCACAGAGUCUAU | 1653 | 1348-1368 | AUAGACUCUGUGGGCUCUCUCUC | 2984 | 1346-1368 |
| AD-1633840.1 | GAACCGCCCAUUCCUGUUUGU | 1654 | 1408-1428 | ACAAACAGGAAUGGGCGGUUCAG | 2985 | 1406-1428 |
| AD-1633841.1 | AACCGCCCAUUCCUGUUUGCU | 146 | 1409-1429 | AGCAAACAGGAAUGGGCGGUUCA | 448 | 1407-1429 |
| AD-1633842.1 | ACCGCCCAUUCCUGUUUGCUU | 147 | 1410-1430 | AAGCAAACAGGAAUGGGCGGUUC | 449 | 1408-1430 |
| AD-1633843.1 | CCGCCCAUUCCUGUUUGCUGU | 148 | 1411-1431 | ACAGCAAACAGGAAUGGGCGGUU | 450 | 1409-1431 |
| AD-1633844.1 | CGCCCAUUCCUGUUUGCUGUU | 149 | 1412-1432 | AACAGCAAACAGGAAUGGGCGGU | 451 | 1410-1432 |
| AD-1633845.1 | GCCCAUUCCUGUUUGCUGUGU | 1655 | 1413-1433 | ACACAGCAAACAGGAAUGGGCGG | 1889 | 1411-1433 |
| AD-1633846.1 | CCCAUUCCUGUUUGCUGUGUU | 1656 | 1414-1434 | AACACAGCAAACAGGAAUGGGCG | 1890 | 1412-1434 |
| AD-1633847.1 | CAUUCCUGUUUGCUGUGUAUU | 1658 | 1416-1436 | AAUACACAGCAAACAGGAAUGGG | 1892 | 1414-1436 |
| AD-1633848.1 | AUUCCUGUUUGCUGUGUAUGU | 150 | 1417-1437 | ACAUACACAGCAAACAGGAAUGG | 452 | 1415-1437 |
| AD-1633849.1 | UUCCUGUUUGCUGUGUAUGAU | 1659 | 1418-1438 | AUCAUACACAGCAAACAGGAAUG | 2986 | 1416-1438 |
| AD-1633850.1 | UCCUGUUUGCUGUGUAUGAUU | 151 | 1419-1439 | AAUCAUACACAGCAAACAGGAAU | 453 | 1417-1439 |
| AD-1633851.1 | CCUGUUUGCUGUGUAUGAUCU | 1660 | 1420-1440 | AGAUCAUACACAGCAAACAGGAA | 2987 | 1418-1440 |
| AD-1633852.1 | CUGUUUGCUGUGUAUGAUCAU | 1661 | 1421-1441 | AUGAUCAUACACAGCAAACAGGA | 2988 | 1419-1441 |
| AD-1633853.1 | UGUUUGCUGUGUAUGAUCAAU | 1662 | 1422-1442 | AUUGAUCAUACACAGCAAACAGG | 2989 | 1420-1442 |
| AD-1633854.1 | GUUUGCUGUGUAUGAUCAAAU | 1663 | 1423-1443 | AUUUGAUCAUACACAGCAAACAG | 2990 | 1421-1443 |
| AD-1633855.1 | UUUGCUGUGUAUGAUCAAAGU | 1664 | 1424-1444 | ACUUUGAUCAUACACAGCAAACA | 2991 | 1422-1444 |
| AD-1633946.1 | GUCUCCCACCUUUUCUUCUAU | 1666 | 1608-1628 | AUAGAAGAAAAGGUGGGAGACUG | 2992 | 1606-1628 |
| AD-1633947.1 | CUCCCACCUUUUCUUCUAAUU | 158 | 1610-1630 | AAUUAGAAGAAAAGGUGGGAGAC | 460 | 1608-1630 |
| AD-1633948.1 | UCCCACCUUUUCUUCUAAUGU | 159 | 1611-1631 | ACAUUAGAAGAAAAGGUGGGAGA | 461 | 1609-1631 |
| AD-1633949.1 | CCCACCUUUUCUUCUAAUGAU | 160 | 1612-1632 | AUCAUUAGAAGAAAAGGUGGGAG | 462 | 1610-1632 |
| AD-1633950.1 | CACCUUUUCUUCUAAUGAGUU | 1668 | 1614-1634 | AACUCAUUAGAAGAAAAGGUGGG | 2993 | 1612-1634 |
| AD-1633951.1 | ACCUUUUCUUCUAAUGAGUCU | 1669 | 1615-1635 | AGACUCAUUAGAAGAAAAGGUGG | 2994 | 1613-1635 |
| AD-1633991.1 | CCGUUUCUCCUUGGUCUAAGU | 1670 | 1655-1675 | ACUUAGACCAAGGAGAAACGGCU | 1906 | 1653-1675 |
| AD-1633992.1 | CGUUUCUCCUUGGUCUAAGUU | 179 | 1656-1676 | AACUUAGACCAAGGAGAAACGGC | 481 | 1654-1676 |
| AD-1633993.1 | GUUUCUCCUUGGUCUAAGUGU | 180 | 1657-1677 | ACACUUAGACCAAGGAGAAACGG | 482 | 1655-1677 |
| AD-1634065.1 | GUUUGCUGGGUUUAUUUUAGU | 199 | 1729-1749 | ACUAAAAUAAACCCAGCAAACUG | 501 | 1727-1749 |
| AD-1634066.1 | UUUGCUGGGUUUAUUUUAGAU | 200 | 1730-1750 | AUCUAAAAUAAACCCAGCAAACU | 502 | 1728-1750 |
| AD-1634067.1 | UUGCUGGGUUUAUUUUAGAGU | 201 | 1731-1751 | ACUCUAAAAUAAACCCAGCAAAC | 503 | 1729-1751 |
| AD-1634068.1 | UGCUGGGUUUAUUUUAGAGAU | 202 | 1732-1752 | AUCUCUAAAAUAAACCCAGCAAA | 504 | 1730-1752 |
| AD-1634069.1 | CUGGGUUUAUUUUAGAGAAUU | 1672 | 1734-1754 | AAUUCUCUAAAAUAAACCCAGCA | 1913 | 1732-1754 |
| AD-1634070.1 | UGGGUUUAUUUUAGAGAAUGU | 1673 | 1735-1755 | ACAUUCUCUAAAAUAAACCCAGC | 2995 | 1733-1755 |
| AD-1634071.1 | GGGUUUAUUUUAGAGAAUGGU | 203 | 1736-1756 | ACCAUUCUCUAAAAUAAACCCAG | 505 | 1734-1756 |
| AD-1634072.1 | GGGAGGCAAGAACCAGUGUUU | 204 | 1761-1781 | AAACACUGGUUCUUGCCUCCCCA | 506 | 1759-1781 |
| AD-1634073.1 | GGAGGCAAGAACCAGUGUUUU | 205 | 1762-1782 | AAAACACUGGUUCUUGCCUCCCC | 507 | 1760-1782 |
| AD-1634074.1 | GAGGCAAGAACCAGUGUUUAU | 1674 | 1763-1783 | AUAAACACUGGUUCUUGCCUCCC | 2996 | 1761-1783 |
| AD-1634075.1 | AGGCAAGAACCAGUGUUUAGU | 206 | 1764-1784 | ACUAAACACUGGUUCUUGCCUCC | 508 | 1762-1784 |
| AD-1634076.1 | GGCAAGAACCAGUGUUUAGCU | 207 | 1765-1785 | AGCUAAACACUGGUUCUUGCCUC | 509 | 1763-1785 |
| AD-1634077.1 | GCAAGAACCAGUGUUUAGCGU | 1675 | 1766-1786 | ACGCUAAACACUGGUUCUUGCCU | 2997 | 1764-1786 |
| AD-1634078.1 | CAAGAACCAGUGUUUAGCGCU | 1676 | 1767-1787 | AGCGCUAAACACUGGUUCUUGCC | 1918 | 1765-1787 |
| AD-1634079.1 | AAGAACCAGUGUUUAGCGCGU | 1677 | 1768-1788 | ACGCGCUAAACACUGGUUCUUGC | 2998 | 1766-1788 |
| AD-1634080.1 | AGAACCAGUGUUUAGCGCGGU | 1678 | 1769-1789 | ACCGCGCUAAACACUGGUUCUUG | 1920 | 1767-1789 |
| AD-1634081.1 | GAACCAGUGUUUAGCGCGGGU | 1679 | 1770-1790 | ACCCGCGCUAAACACUGGUUCUU | 1921 | 1768-1790 |
| AD-1634082.1 | AACCAGUGUUUAGCGCGGGAU | 1680 | 1771-1791 | AUCCCGCGCUAAACACUGGUUCU | 2999 | 1769-1791 |
| AD-1634105.1 | CUGUUCCAAAAAGAAUUCCAU | 211 | 1794-1814 | AUGGAAUUCUUUUUGGAACAGUA | 513 | 1792-1814 |
| AD-1634107.1 | GUUCCAAAAAGAAUUCCAACU | 1682 | 1796-1816 | AGUUGGAAUUCUUUUUGGAACAG | 3000 | 1794-1816 |
| AD-1634109.1 | UCCAAAAAGAAUUCCAACCGU | 1683 | 1798-1818 | ACGGUUGGAAUUCUUUUUGGAAC | 3001 | 1796-1818 |
| AD-1634110.1 | CCAAAAAGAAUUCCAACCGAU | 1684 | 1799-1819 | AUCGGUUGGAAUUCUUUUUGGAA | 3002 | 1797-1819 |
| AD-1634111.1 | CAAAAAGAAUUCCAACCGACU | 212 | 1800-1820 | AGUCGGUUGGAAUUCUUUUUGGA | 514 | 1798-1820 |
| AD-1634112.1 | AAAAAGAAUUCCAACCGACCU | 1685 | 1801-1821 | AGGUCGGUUGGAAUUCUUUUUGG | 1929 | 1799-1821 |
| AD-1634113.1 | AAAAGAAUUCCAACCGACCAU | 1686 | 1802-1822 | AUGGUCGGUUGGAAUUCUUUUUG | 3003 | 1800-1822 |
| AD-1634114.1 | AAAGAAUUCCAACCGACCAGU | 1687 | 1803-1823 | ACUGGUCGGUUGGAAUUCUUUUU | 1931 | 1801-1823 |
| AD-1634115.1 | AAGAAUUCCAACCGACCAGCU | 1688 | 1804-1824 | AGCUGGUCGGUUGGAAUUCUUUU | 3004 | 1802-1824 |
| AD-1634116.1 | GAAUUCCAACCGACCAGCUUU | 1690 | 1806-1826 | AAAGCUGGUCGGUUGGAAUUCUU | 1934 | 1804-1826 |
| AD-1634117.1 | AAUUCCAACCGACCAGCUUGU | 1691 | 1807-1827 | ACAAGCUGGUCGGUUGGAAUUCU | 3005 | 1805-1827 |
| AD-1634118.1 | AUUCCAACCGACCAGCUUGUU | 1692 | 1808-1828 | AACAAGCUGGUCGGUUGGAAUUC | 1936 | 1806-1828 |
| AD-1634119.1 | UCCAACCGACCAGCUUGUUUU | 1694 | 1810-1830 | AAAACAAGCUGGUCGGUUGGAAU | 1938 | 1808-1830 |
| AD-1634120.1 | CCAACCGACCAGCUUGUUUGU | 1695 | 1811-1831 | ACAAACAAGCUGGUCGGUUGGAA | 1939 | 1809-1831 |
| AD-1634121.1 | CAACCGACCAGCUUGUUUGUU | 1696 | 1812-1832 | AACAAACAAGCUGGUCGGUUGGA | 3006 | 1810-1832 |
| AD-1634122.1 | AACCGACCAGCUUGUUUGUGU | 1697 | 1813-1833 | ACACAAACAAGCUGGUCGGUUGG | 1941 | 1811-1833 |
| AD-1634123.1 | ACCGACCAGCUUGUUUGUGAU | 213 | 1814-1834 | AUCACAAACAAGCUGGUCGGUUG | 515 | 1812-1834 |
| AD-1634124.1 | CCGACCAGCUUGUUUGUGAAU | 1698 | 1815-1835 | AUUCACAAACAAGCUGGUCGGUU | 3007 | 1813-1835 |
| AD-1634125.1 | CGACCAGCUUGUUUGUGAAAU | 1699 | 1816-1836 | AUUUCACAAACAAGCUGGUCGGU | 3008 | 1814-1836 |
| AD-1634126.1 | GACCAGCUUGUUUGUGAAACU | 1700 | 1817-1837 | AGUUUCACAAACAAGCUGGUCGG | 3009 | 1815-1837 |
| AD-1634127.1 | ACCAGCUUGUUUGUGAAACAU | 1701 | 1818-1838 | AUGUUUCACAAACAAGCUGGUCG | 3010 | 1816-1838 |
| AD-1634128.1 | CCAGCUUGUUUGUGAAACAAU | 1702 | 1819-1839 | AUUGUUUCACAAACAAGCUGGUC | 3011 | 1817-1839 |
| AD-1634129.1 | CAGCUUGUUUGUGAAACAAAU | 1703 | 1820-1840 | AUUUGUUUCACAAACAAGCUGGU | 3012 | 1818-1840 |
| AD-1634130.1 | AGCUUGUUUGUGAAACAAAAU | 1704 | 1821-1841 | AUUUUGUUUCACAAACAAGCUGG | 3013 | 1819-1841 |
| AD-1634135.1 | UGUUCCCUUUUCAAGUUGAGU | 217 | 1844-1864 | ACUCAACUUGAAAAGGGAACACU | 519 | 1842-1864 |
| AD-1634136.1 | GUUCCCUUUUCAAGUUGAGAU | 218 | 1845-1865 | AUCUCAACUUGAAAAGGGAACAC | 520 | 1843-1865 |
| AD-1634137.1 | UUCCCUUUUCAAGUUGAGAAU | 1707 | 1846-1866 | AUUCUCAACUUGAAAAGGGAACA | 3014 | 1844-1866 |
| AD-1634146.1 | CAAGUUGAGAACAAAAAUUGU | 219 | 1855-1875 | ACAAUUUUUGUUCUCAACUUGAA | 521 | 1853-1875 |
| AD-1634147.1 | AAGUUGAGAACAAAAAUUGGU | 220 | 1856-1876 | ACCAAUUUUUGUUCUCAACUUGA | 522 | 1854-1876 |
| AD-1634148.1 | GUUGAGAACAAAAAUUGGGUU | 221 | 1858-1878 | AACCCAAUUUUUGUUCUCAACUU | 523 | 1856-1878 |
| AD-1634149.1 | UUGAGAACAAAAAUUGGGUUU | 222 | 1859-1879 | AAACCCAAUUUUUGUUCUCAACU | 524 | 1857-1879 |
| AD-1634150.1 | UGAGAACAAAAAUUGGGUUUU | 223 | 1860-1880 | AAAACCCAAUUUUUGUUCUCAAC | 525 | 1858-1880 |
| AD-1634151.1 | GAGAACAAAAAUUGGGUUUUU | 224 | 1861-1881 | AAAAACCCAAUUUUUGUUCUCAA | 526 | 1859-1881 |
| AD-1634152.1 | AGAACAAAAAUUGGGUUUUAU | 225 | 1862-1882 | AUAAAACCCAAUUUUUGUUCUCA | 527 | 1860-1882 |
| AD-1634153.1 | GAACAAAAAUUGGGUUUUAAU | 226 | 1863-1883 | AUUAAAACCCAAUUUUUGUUCUC | 528 | 1861-1883 |
| AD-1634162.1 | AGUAUACAUUUUUGCAUUGCU | 1709 | 1889-1909 | AGCAAUGCAAAAAUGUAUACUUU | 1964 | 1887-1909 |
| AD-1634163.1 | GUAUACAUUUUUGCAUUGCCU | 227 | 1890-1910 | AGGCAAUGCAAAAAUGUAUACUU | 529 | 1888-1910 |
| AD-1634164.1 | UAUACAUUUUUGCAUUGCCUU | 1710 | 1891-1911 | AAGGCAAUGCAAAAAUGUAUACU | 1966 | 1889-1911 |
| AD-1634165.1 | AUACAUUUUUGCAUUGCCUUU | 228 | 1892-1912 | AAAGGCAAUGCAAAAAUGUAUAC | 530 | 1890-1912 |
| AD-1634169.1 | AUUUUUGCAUUGCCUUCGGUU | 230 | 1896-1916 | AACCGAAGGCAAUGCAAAAAUGU | 532 | 1894-1916 |
| AD-1634170.1 | UUUUUGCAUUGCCUUCGGUUU | 231 | 1897-1917 | AAACCGAAGGCAAUGCAAAAAUG | 533 | 1895-1917 |
| AD-1634171.1 | UUUUGCAUUGCCUUCGGUUUU | 232 | 1898-1918 | AAAACCGAAGGCAAUGCAAAAAU | 534 | 1896-1918 |
| AD-1634172.1 | UUUGCAUUGCCUUCGGUUUGU | 233 | 1899-1919 | ACAAACCGAAGGCAAUGCAAAAA | 535 | 1897-1919 |
| AD-1634173.1 | UUGCAUUGCCUUCGGUUUGUU | 234 | 1900-1920 | AACAAACCGAAGGCAAUGCAAAA | 536 | 1898-1920 |
| AD-1634174.1 | UGCAUUGCCUUCGGUUUGUAU | 235 | 1901-1921 | AUACAAACCGAAGGCAAUGCAAA | 537 | 1899-1921 |
| AD-1634175.1 | GCAUUGCCUUCGGUUUGUAUU | 236 | 1902-1922 | AAUACAAACCGAAGGCAAUGCAA | 538 | 1900-1922 |
| AD-1634176.1 | CAUUGCCUUCGGUUUGUAUUU | 237 | 1903-1923 | AAAUACAAACCGAAGGCAAUGCA | 539 | 1901-1923 |
| AD-1634177.1 | AUUGCCUUCGGUUUGUAUUUU | 238 | 1904-1924 | AAAAUACAAACCGAAGGCAAUGC | 540 | 1902-1924 |
| AD-1634178.1 | UUGCCUUCGGUUUGUAUUUAU | 239 | 1905-1925 | AUAAAUACAAACCGAAGGCAAUG | 541 | 1903-1925 |
| AD-1634179.1 | UGCCUUCGGUUUGUAUUUAGU | 240 | 1906-1926 | ACUAAAUACAAACCGAAGGCAAU | 542 | 1904-1926 |
| AD-1634180.1 | GCCUUCGGUUUGUAUUUAGUU | 241 | 1907-1927 | AACUAAAUACAAACCGAAGGCAA | 543 | 1905-1927 |
| AD-1634181.1 | CCUUCGGUUUGUAUUUAGUGU | 242 | 1908-1928 | ACACUAAAUACAAACCGAAGGCA | 544 | 1906-1928 |
| AD-1634182.1 | CUUCGGUUUGUAUUUAGUGUU | 243 | 1909-1929 | AACACUAAAUACAAACCGAAGGC | 545 | 1907-1929 |
| AD-1634183.1 | UUCGGUUUGUAUUUAGUGUCU | 1711 | 1910-1930 | AGACACUAAAUACAAACCGAAGG | 3015 | 1908-1930 |
| AD-1634184.1 | UCGGUUUGUAUUUAGUGUCUU | 1712 | 1911-1931 | AAGACACUAAAUACAAACCGAAG | 3016 | 1909-1931 |
| AD-1634185.1 | CGGUUUGUAUUUAGUGUCUUU | 1713 | 1912-1932 | AAAGACACUAAAUACAAACCGAA | 1975 | 1910-1932 |
| AD-1634186.1 | GGUUUGUAUUUAGUGUCUUGU | 244 | 1913-1933 | ACAAGACACUAAAUACAAACCGA | 546 | 1911-1933 |
| AD-1634187.1 | GUUUGUAUUUAGUGUCUUGAU | 1714 | 1914-1934 | AUCAAGACACUAAAUACAAACCG | 3017 | 1912-1934 |
| AD-1634188.1 | UUUGUAUUUAGUGUCUUGAAU | 1715 | 1915-1935 | AUUCAAGACACUAAAUACAAACC | 3018 | 1913-1935 |
| AD-1634189.1 | UUGUAUUUAGUGUCUUGAAUU | 1716 | 1916-1936 | AAUUCAAGACACUAAAUACAAAC | 1978 | 1914-1936 |
| AD-1634190.1 | UGUAUUUAGUGUCUUGAAUGU | 245 | 1917-1937 | ACAUUCAAGACACUAAAUACAAA | 547 | 1915-1937 |
| AD-1634191.1 | GUAUUUAGUGUCUUGAAUGUU | 1717 | 1918-1938 | AACAUUCAAGACACUAAAUACAA | 3019 | 1916-1938 |
| AD-1634192.1 | UAUUUAGUGUCUUGAAUGUAU | 246 | 1919-1939 | AUACAUUCAAGACACUAAAUACA | 548 | 1917-1939 |
| AD-1634193.1 | AUUUAGUGUCUUGAAUGUAAU | 1718 | 1920-1940 | AUUACAUUCAAGACACUAAAUAC | 3020 | 1918-1940 |
| AD-1634194.1 | UUUAGUGUCUUGAAUGUAAGU | 247 | 1921-1941 | ACUUACAUUCAAGACACUAAAUA | 549 | 1919-1941 |
| AD-1634195.1 | UUAGUGUCUUGAAUGUAAGAU | 1719 | 1922-1942 | AUCUUACAUUCAAGACACUAAAU | 3021 | 1920-1942 |
| AD-1634196.1 | UAGUGUCUUGAAUGUAAGAAU | 1720 | 1923-1943 | AUUCUUACAUUCAAGACACUAAA | 3022 | 1921-1943 |
| AD-1634197.1 | AGUGUCUUGAAUGUAAGAACU | 1721 | 1924-1944 | AGUUCUUACAUUCAAGACACUAA | 3023 | 1922-1944 |
| AD-1634199.1 | UGUCUUGAAUGUAAGAACAUU | 1722 | 1926-1946 | AAUGUUCUUACAUUCAAGACACU | 3024 | 1924-1946 |
| AD-1634200.1 | GUCUUGAAUGUAAGAACAUGU | 248 | 1927-1947 | ACAUGUUCUUACAUUCAAGACAC | 550 | 1925-1947 |
| AD-1634203.1 | UUGAAUGUAAGAACAUGACCU | 1723 | 1930-1950 | AGGUCAUGUUCUUACAUUCAAGA | 3025 | 1928-1950 |
| AD-1634209.1 | GUAAGAACAUGACCUCCGUGU | 249 | 1936-1956 | ACACGGAGGUCAUGUUCUUACAU | 551 | 1934-1956 |
| AD-1634210.1 | UAAGAACAUGACCUCCGUGUU | 250 | 1937-1957 | AACACGGAGGUCAUGUUCUUACA | 552 | 1935-1957 |
| AD-1634211.1 | AAGAACAUGACCUCCGUGUAU | 251 | 1938-1958 | AUACACGGAGGUCAUGUUCUUAC | 553 | 1936-1958 |
| AD-1634212.1 | AGAACAUGACCUCCGUGUAGU | 252 | 1939-1959 | ACUACACGGAGGUCAUGUUCUUA | 554 | 1937-1959 |
| AD-1634213.1 | GAACAUGACCUCCGUGUAGUU | 253 | 1940-1960 | AACUACACGGAGGUCAUGUUCUU | 555 | 1938-1960 |
| AD-1634214.1 | AACAUGACCUCCGUGUAGUGU | 254 | 1941-1961 | ACACUACACGGAGGUCAUGUUCU | 556 | 1939-1961 |
| AD-1634215.1 | ACAUGACCUCCGUGUAGUGUU | 255 | 1942-1962 | AACACUACACGGAGGUCAUGUUC | 557 | 1940-1962 |
| AD-1634216.1 | CAUGACCUCCGUGUAGUGUCU | 1724 | 1943-1963 | AGACACUACACGGAGGUCAUGUU | 3026 | 1941-1963 |
| AD-1634217.1 | AUGACCUCCGUGUAGUGUCUU | 1725 | 1944-1964 | AAGACACUACACGGAGGUCAUGU | 1992 | 1942-1964 |
| AD-1634234.1 | UUUCCACAGAUGCUUGUGAUU | 265 | 1979-1999 | AAUCACAAGCAUCUGUGGAAAAA | 567 | 1977-1999 |
| AD-1634235.1 | UUCCACAGAUGCUUGUGAUUU | 1733 | 1980-2000 | AAAUCACAAGCAUCUGUGGAAAA | 2001 | 1978-2000 |
| AD-1634236.1 | UCCACAGAUGCUUGUGAUUUU | 1734 | 1981-2001 | AAAAUCACAAGCAUCUGUGGAAA | 3027 | 1979-2001 |
| AD-1634237.1 | CCACAGAUGCUUGUGAUUUUU | 1735 | 1982-2002 | AAAAAUCACAAGCAUCUGUGGAA | 2003 | 1980-2002 |
| AD-1634238.1 | CACAGAUGCUUGUGAUUUUUU | 266 | 1983-2003 | AAAAAAUCACAAGCAUCUGUGGA | 568 | 1981-2003 |
| AD-1634282.1 | ACCUGAAUUUCUGUUUGAAUU | 286 | 2027-2047 | AAUUCAAACAGAAAUUCAGGUGC | 588 | 2025-2047 |
| AD-1634283.1 | CCUGAAUUUCUGUUUGAAUGU | 287 | 2028-2048 | ACAUUCAAACAGAAAUUCAGGUG | 589 | 2026-2048 |
| AD-1634304.1 | GGAACCAUAGCUGGUUAUUUU | 295 | 2049-2069 | AAAAUAACCAGCUAUGGUUCCGC | 597 | 2047-2069 |
| AD-1634305.1 | GAACCAUAGCUGGUUAUUUCU | 296 | 2050-2070 | AGAAAUAACCAGCUAUGGUUCCG | 598 | 2048-2070 |
| AD-1634306.1 | AACCAUAGCUGGUUAUUUCUU | 297 | 2051-2071 | AAGAAAUAACCAGCUAUGGUUCC | 599 | 2049-2071 |
| AD-1634307.1 | ACCAUAGCUGGUUAUUUCUCU | 298 | 2052-2072 | AGAGAAAUAACCAGCUAUGGUUC | 600 | 2050-2072 |
| AD-1634308.1 | CCAUAGCUGGUUAUUUCUCCU | 299 | 2053-2073 | AGGAGAAAUAACCAGCUAUGGUU | 601 | 2051-2073 |
| AD-1634327.1 | CCUUGUGUUAGUAAUAAACGU | 310 | 2072-2092 | ACGUUUAUUACUAACACAAGGGA | 612 | 2070-2092 |
| AD-1634328.1 | CUUGUGUUAGUAAUAAACGUU | 311 | 2073-2093 | AACGUUUAUUACUAACACAAGGG | 613 | 2071-2093 |
| AD-1634329.1 | UUGUGUUAGUAAUAAACGUCU | 312 | 2074-2094 | AGACGUUUAUUACUAACACAAGG | 614 | 2072-2094 |
| AD-1634330.1 | UGUGUUAGUAAUAAACGUCUU | 313 | 2075-2095 | AAGACGUUUAUUACUAACACAAG | 615 | 2073-2095 |
| AD-1634331.1 | GUGUUAGUAAUAAACGUCUUU | 314 | 2076-2096 | AAAGACGUUUAUUACUAACACAA | 616 | 2074-2096 |
| AD-1634332.1 | UGUUAGUAAUAAACGUCUUGU | 315 | 2077-2097 | ACAAGACGUUUAUUACUAACACA | 617 | 2075-2097 |
| AD-1634333.1 | GUUAGUAAUAAACGUCUUGCU | 316 | 2078-2098 | AGCAAGACGUUUAUUACUAACAC | 618 | 2076-2098 |
| AD-1657992.1 | AGCCUGAGGGCCACCAUCCUU | 1530 | 86-106 | AAGGAUGGUGGCCCUCAGGCUCA | 1738 | 84-106 |
| AD-1657994.1 | CCUGAGGGCCACCAUCCUCUU | 1531 | 88-108 | AAGAGGAUGGUGGCCCUCAGGCU | 1739 | 86-108 |
| AD-1657998.1 | AGGGCCACCAUCCUCUGCCUU | 1532 | 92-112 | AAGGCAGAGGATGGUGGCCCUCA | 1740 | 90-112 |
| AD-1658030.1 | GUGACCGGGUGUACAUACACU | 1533 | 138-158 | AGUGTATGUACACCCGGUCACCU | 1741 | 136-158 |
| AD-1658032.1 | CUUCCACCUCGUCAUCCACAU | 1534 | 160-180 | ATGUGGAUGACGAGGUGGAAGGG | 1742 | 158-180 |
| AD-1658033.1 | UUCCACCUCGUCAUCCACAAU | 1535 | 161-181 | ATUGTGGAUGACGAGGUGGAAGG | 1743 | 159-181 |
| AD-1658034.1 | UCCACCUCGUCAUCCACAAUU | 1536 | 162-182 | AAUUGUGGAUGACGAGGUGGAAG | 1744 | 160-182 |
| AD-1658035.1 | CCACCUCGUCAUCCACAAUGU | 1537 | 163-183 | ACAUTGTGGAUGACGAGGUGGAA | 1745 | 161-183 |
| AD-1658036.1 | CACCUCGUCAUCCACAAUGAU | 1538 | 164-184 | ATCATUGUGGATGACGAGGUGGA | 1746 | 162-184 |
| AD-1658038.1 | CCUCGUCAUCCACAAUGAGAU | 1540 | 166-186 | ATCUCATUGUGGAUGACGAGGUG | 1748 | 164-186 |
| AD-1658039.1 | CUCGUCAUCCACAAUGAGAGU | 1541 | 167-187 | ACUCTCAUUGUGGAUGACGAGGU | 1749 | 165-187 |
| AD-1658040.1 | UCGUCAUCCACAAUGAGAGUU | 1542 | 168-188 | AACUCUCAUUGTGGAUGACGAGG | 1750 | 166-188 |
| AD-1658041.1 | CGUCAUCCACAAUGAGAGUAU | 1543 | 169-189 | ATACTCTCAUUGUGGAUGACGAG | 1751 | 167-189 |
| AD-1658042.1 | GUCAUCCACAAUGAGAGUACU | 1544 | 170-190 | AGUACUCUCAUTGUGGAUGACGA | 1752 | 168-190 |
| AD-1658043.1 | UCAUCCACAAUGAGAGUACCU | 1545 | 171-191 | AGGUACTCUCATUGUGGAUGACG | 1753 | 169-191 |
| AD-1658044.1 | CAUCCACAAUGAGAGUACCUU | 1546 | 172-192 | AAGGTACUCUCAUUGUGGAUGAC | 1754 | 170-192 |
| AD-1658045.1 | AUCCACAAUGAGAGUACCUGU | 32 | 173-193 | ACAGGUACUCUCAUUGUGGAUGA | 334 | 171-193 |
| AD-1658046.1 | UCCACAAUGAGAGUACCUGUU | 1547 | 174-194 | AACAGGTACUCTCAUUGUGGAUG | 1755 | 172-194 |
| AD-1658047.1 | CCACAAUGAGAGUACCUGUGU | 1548 | 175-195 | ACACAGGUACUCUCAUUGUGGAU | 1756 | 173-195 |
| AD-1658048.1 | CACAAUGAGAGUACCUGUGAU | 1549 | 176-196 | ATCACAGGUACTCUCAUUGUGGA | 1757 | 174-196 |
| AD-1658049.1 | ACAAUGAGAGUACCUGUGAGU | 33 | 177-197 | ACUCACAGGUACUCUCAUUGUGG | 335 | 175-197 |
| AD-1658050.1 | CAAUGAGAGUACCUGUGAGCU | 1550 | 178-198 | AGCUCACAGGUACUCUCAUUGUG | 1758 | 176-198 |
| AD-1658051.1 | AAUGAGAGUACCUGUGAGCAU | 1551 | 179-199 | ATGCTCACAGGTACUCUCAUUGU | 1759 | 177-199 |
| AD-1658052.1 | AUGAGAGUACCUGUGAGCAGU | 1552 | 180-200 | ACUGCUCACAGGUACUCUCAUUG | 1760 | 178-200 |
| AD-1658053.1 | UGAGAGUACCUGUGAGCAGCU | 1553 | 181-201 | AGCUGCTCACAGGUACUCUCAUU | 1761 | 179-201 |
| AD-1658054.1 | GAGAGUACCUGUGAGCAGCUU | 1554 | 182-202 | AAGCTGCUCACAGGUACUCUCAU | 1762 | 180-202 |
| AD-1658055.1 | AGAGUACCUGUGAGCAGCUGU | 1555 | 183-203 | ACAGCUGCUCACAGGUACUCUCA | 1763 | 181-203 |
| AD-1658056.1 | GAGUACCUGUGAGCAGCUGGU | 1556 | 184-204 | ACCAGCTGCUCACAGGUACUCUC | 1764 | 182-204 |
| AD-1658057.1 | AGUACCUGUGAGCAGCUGGCU | 1557 | 185-205 | AGCCAGCUGCUCACAGGUACUCU | 1765 | 183-205 |
| AD-1658058.1 | GUACCUGUGAGCAGCUGGCAU | 1558 | 186-206 | ATGCCAGCUGCTCACAGGUACUC | 1766 | 184-206 |
| AD-1658059.1 | UACCUGUGAGCAGCUGGCAAU | 1559 | 187-207 | ATUGCCAGCUGCUCACAGGUACU | 1767 | 185-207 |
| AD-1658184.1 | AAUGGUCGGGAUGCUGGCCAU | 1560 | 352-372 | ATGGCCAGCAUCCCGACCAUUGC | 1768 | 350-372 |
| AD-1658185.1 | AUGGUCGGGAUGCUGGCCAAU | 1561 | 353-373 | ATUGGCCAGCATCCCGACCAUUG | 1769 | 351-373 |
| AD-1658186.1 | UGGUCGGGAUGCUGGCCAACU | 1562 | 354-374 | AGUUGGCCAGCAUCCCGACCAUU | 1770 | 352-374 |
| AD-1658187.1 | GGUCGGGAUGCUGGCCAACUU | 1563 | 355-375 | AAGUTGGCCAGCAUCCCGACCAU | 1771 | 353-375 |
| AD-1658188.1 | GUCGGGAUGCUGGCCAACUUU | 1564 | 356-376 | AAAGTUGGCCAGCAUCCCGACCA | 1772 | 354-376 |
| AD-1658189.1 | UCGGGAUGCUGGCCAACUUCU | 1565 | 357-377 | AGAAGUTGGCCAGCAUCCCGACC | 1773 | 355-377 |
| AD-1658190.1 | CGGGAUGCUGGCCAACUUCUU | 1566 | 358-378 | AAGAAGTUGGCCAGCAUCCCGAC | 1774 | 356-378 |
| AD-1658191.1 | GGGAUGCUGGCCAACUUCUUU | 49 | 359-379 | AAAGAAGUUGGCCAGCAUCCCGA | 351 | 357-379 |
| AD-1658192.1 | GGAUGCUGGCCAACUUCUUGU | 1567 | 360-380 | ACAAGAAGUUGGCCAGCAUCCCG | 1775 | 358-380 |
| AD-1658193.1 | GAUGCUGGCCAACUUCUUGGU | 1568 | 361-381 | ACCAAGAAGUUGGCCAGCAUCCC | 1776 | 359-381 |
| AD-1658196.1 | GCUGGCCAACUUCUUGGGCUU | 50 | 364-384 | AAGCCCAAGAAGUUGGCCAGCAU | 352 | 362-384 |
| AD-1658197.1 | CUGGCCAACUUCUUGGGCUUU | 1569 | 365-385 | AAAGCCCAAGAAGUUGGCCAGCA | 1777 | 363-385 |
| AD-1658200.1 | GCCAACUUCUUGGGCUUCCGU | 1570 | 368-388 | ACGGAAGCCCAAGAAGUUGGCCA | 1778 | 366-388 |
| AD-1658201.1 | CCAACUUCUUGGGCUUCCGUU | 1571 | 369-389 | AACGGAAGCCCAAGAAGUUGGCC | 1779 | 367-389 |
| AD-1658202.1 | CAACUUCUUGGGCUUCCGUAU | 51 | 370-390 | ATACGGAAGCCCAAGAAGUUGGC | 1780 | 368-390 |
| AD-1658203.1 | AACUUCUUGGGCUUCCGUAUU | 52 | 371-391 | AAUACGGAAGCCCAAGAAGUUGG | 354 | 369-391 |
| AD-1658204.1 | ACUUCUUGGGCUUCCGUAUAU | 53 | 372-392 | ATAUACGGAAGCCCAAGAAGUUG | 1781 | 370-392 |
| AD-1658205.1 | CUUCUUGGGCUUCCGUAUAUU | 1572 | 373-393 | AAUATACGGAAGCCCAAGAAGUU | 1782 | 371-393 |
| AD-1658206.1 | UUCUUGGGCUUCCGUAUAUAU | 1573 | 374-394 | ATAUAUACGGAAGCCCAAGAAGU | 1783 | 372-394 |
| AD-1658207.1 | UCUUGGGCUUCCGUAUAUAUU | 54 | 375-395 | AAUATATACGGAAGCCCAAGAAG | 1784 | 373-395 |
| AD-1658208.1 | CUUGGGCUUCCGUAUAUAUGU | 1574 | 376-396 | ACAUAUAUACGGAAGCCCAAGAA | 1785 | 374-396 |
| AD-1658209.1 | UUGGGCUUCCGUAUAUAUGGU | 55 | 377-397 | ACCATATAUACGGAAGCCCAAGA | 1786 | 375-397 |
| AD-1658211.1 | GGGCUUCCGUAUAUAUGGCAU | 1576 | 379-399 | ATGCCATAUAUACGGAAGCCCAA | 1788 | 377-399 |
| AD-1658212.1 | GGCUUCCGUAUAUAUGGCAUU | 1577 | 380-400 | AAUGCCAUAUATACGGAAGCCCA | 1789 | 378-400 |
| AD-1658213.1 | GCUUCCGUAUAUAUGGCAUGU | 1578 | 381-401 | ACAUGCCAUAUAUACGGAAGCCC | 1790 | 379-401 |
| AD-1658220.1 | UAUAUAUGGCAUGCACAGUGU | 1579 | 388-408 | ACACTGTGCAUGCCAUAUAUACG | 1791 | 386-408 |
| AD-1658221.1 | AUAUAUGGCAUGCACAGUGAU | 1580 | 389-409 | ATCACUGUGCATGCCAUAUAUAC | 1792 | 387-409 |
| AD-1658222.1 | UAUAUGGCAUGCACAGUGAGU | 56 | 390-410 | ACUCACTGUGCAUGCCAUAUAUA | 1793 | 388-410 |
| AD-1658223.1 | AUAUGGCAUGCACAGUGAGCU | 1581 | 391-411 | AGCUCACUGUGCAUGCCAUAUAU | 1794 | 389-411 |
| AD-1658224.1 | UAUGGCAUGCACAGUGAGCUU | 1582 | 392-412 | AAGCTCACUGUGCAUGCCAUAUA | 1795 | 390-412 |
| AD-1658225.1 | AUGGCAUGCACAGUGAGCUAU | 1583 | 393-413 | ATAGCUCACUGTGCAUGCCAUAU | 1796 | 391-413 |
| AD-1658226.1 | UGGCAUGCACAGUGAGCUAUU | 1584 | 394-414 | AAUAGCTCACUGUGCAUGCCAUA | 1797 | 392-414 |
| AD-1658227.1 | GGCAUGCACAGUGAGCUAUGU | 1585 | 395-415 | ACAUAGCUCACTGUGCAUGCCAU | 1798 | 393-415 |
| AD-1658228.1 | GCAUGCACAGUGAGCUAUGGU | 57 | 396-416 | ACCATAGCUCACUGUGCAUGCCA | 1799 | 394-416 |
| AD-1658242.1 | UGGCACCCUGGCCUCUCUCUU | 1586 | 460-480 | AAGAGAGAGGCCAGGGUGCCAAA | 1800 | 458-480 |
| AD-1658243.1 | GGCACCCUGGCCUCUCUCUAU | 1587 | 461-481 | ATAGAGAGAGGCCAGGGUGCCAA | 1801 | 459-481 |
| AD-1658288.1 | GACAGGCUACAGGCAAUCCUU | 59 | 506-526 | AAGGAUTGCCUGUAGCCUGUCAG | 1802 | 504-526 |
| AD-1658289.1 | ACAGGCUACAGGCAAUCCUGU | 60 | 507-527 | ACAGGATUGCCTGUAGCCUGUCA | 1803 | 505-527 |
| AD-1658313.1 | UUCCUUGGAAGGACAAGAACU | 1588 | 531-551 | AGUUCUTGUCCTUCCAAGGAACA | 1804 | 529-551 |
| AD-1658315.1 | CCUUGGAAGGACAAGAACUGU | 67 | 533-553 | ACAGTUCUUGUCCUUCCAAGGAA | 1805 | 531-553 |
| AD-1658316.1 | CUUGGAAGGACAAGAACUGCU | 1589 | 534-554 | AGCAGUTCUUGTCCUUCCAAGGA | 1806 | 532-554 |
| AD-1658448.2 | CACCUGAAGCAGCCGUUUGUU | 68 | 692-712 | AACAAACGGCUGCUUCAGGUGCA | 370 | 690-712 |
| AD-1658451.2 | CUGAAGCAGCCGUUUGUGCAU | 1590 | 695-715 | ATGCACAAACGGCUGCUUCAGGU | 1807 | 693-715 |
| AD-1658463.2 | UUUGUGCAGGGCCUGGCUCUU | 1591 | 707-727 | AAGAGCCAGGCCCUGCACAAACG | 1808 | 705-727 |
| AD-1658464.2 | UUGUGCAGGGCCUGGCUCUCU | 1592 | 708-728 | AGAGAGCCAGGCCCUGCACAAAC | 1809 | 706-728 |
| AD-1658465.2 | UGUGCAGGGCCUGGCUCUCUU | 1593 | 709-729 | AAGAGAGCCAGGCCCUGCACAAA | 1810 | 707-729 |
| AD-1658466.2 | GUGCAGGGCCUGGCUCUCUAU | 1594 | 710-730 | ATAGAGAGCCAGGCCCUGCACAA | 1811 | 708-730 |
| AD-1658467.2 | UGCAGGGCCUGGCUCUCUAUU | 1595 | 711-731 | AAUAGAGAGCCAGGCCCUGCACA | 1812 | 709-731 |
| AD-1658484.2 | ACGCUCUCUGGACUUCACAGU | 1596 | 748-768 | ACUGTGAAGUCCAGAGAGCGUGG | 1813 | 746-768 |
| AD-1658485.2 | CGCUCUCUGGACUUCACAGAU | 1597 | 749-769 | ATCUGUGAAGUCCAGAGAGCGUG | 1814 | 747-769 |
| AD-1658519.2 | CUGAGAAGAUUGACAGGUUCU | 1598 | 783-803 | AGAACCTGUCAAUCUUCUCAGCA | 1815 | 781-803 |
| AD-1658520.2 | UGAGAAGAUUGACAGGUUCAU | 1599 | 784-804 | ATGAACCUGUCAAUCUUCUCAGC | 1816 | 782-804 |
| AD-1658521.2 | GAGAAGAUUGACAGGUUCAUU | 1600 | 785-805 | AAUGAACCUGUCAAUCUUCUCAG | 1817 | 783-805 |
| AD-1658522.2 | AGAAGAUUGACAGGUUCAUGU | 1601 | 786-806 | ACAUGAACCUGTCAAUCUUCUCA | 1818 | 784-806 |
| AD-1658523.2 | GAAGAUUGACAGGUUCAUGCU | 1602 | 787-807 | AGCATGAACCUGUCAAUCUUCUC | 1819 | 785-807 |
| AD-1658524.2 | AAGAUUGACAGGUUCAUGCAU | 1603 | 788-808 | ATGCAUGAACCTGUCAAUCUUCU | 1820 | 786-808 |
| AD-1658525.2 | AGAUUGACAGGUUCAUGCAGU | 1604 | 789-809 | ACUGCATGAACCUGUCAAUCUUC | 1821 | 787-809 |
| AD-1658526.2 | GAUUGACAGGUUCAUGCAGGU | 1605 | 790-810 | ACCUGCAUGAACCUGUCAAUCUU | 1822 | 788-810 |
| AD-1658527.2 | AUUGACAGGUUCAUGCAGGCU | 1606 | 791-811 | AGCCTGCAUGAACCUGUCAAUCU | 1823 | 789-811 |
| AD-1658528.2 | UUGACAGGUUCAUGCAGGCUU | 1607 | 792-812 | AAGCCUGCAUGAACCUGUCAAUC | 1824 | 790-812 |
| AD-1658529.2 | UGACAGGUUCAUGCAGGCUGU | 1608 | 793-813 | ACAGCCTGCAUGAACCUGUCAAU | 1825 | 791-813 |
| AD-1658530.2 | GACAGGUUCAUGCAGGCUGUU | 1609 | 794-814 | AACAGCCUGCATGAACCUGUCAA | 1826 | 792-814 |
| AD-1658531.2 | ACAGGUUCAUGCAGGCUGUGU | 79 | 795-815 | ACACAGCCUGCAUGAACCUGUCA | 381 | 793-815 |
| AD-1658539.2 | AUGCAGGCUGUGACAGGAUGU | 80 | 803-823 | ACAUCCTGUCACAGCCUGCAUGA | 1828 | 801-823 |
| AD-1658541.2 | GCAGGCUGUGACAGGAUGGAU | 81 | 805-825 | ATCCAUCCUGUCACAGCCUGCAU | 1829 | 803-825 |
| AD-1658542.2 | CAGGCUGUGACAGGAUGGAAU | 1611 | 806-826 | ATUCCATCCUGTCACAGCCUGCA | 1830 | 804-826 |
| AD-1658605.2 | GCUUUCAACACCUACGUCCAU | 84 | 869-889 | ATGGACGUAGGTGUUGAAAGCCA | 1831 | 867-889 |
| AD-1658650.2 | GAGUUCUGGGUGGACAACAGU | 1612 | 935-955 | ACUGTUGUCCACCCAGAACUCCU | 1832 | 933-955 |
| AD-1658661.2 | GGACAACAGCACCUCAGUGUU | 91 | 946-966 | AACACUGAGGUGCUGUUGUCCAC | 393 | 944-966 |
| AD-1658662.2 | GACAACAGCACCUCAGUGUCU | 92 | 947-967 | AGACACTGAGGTGCUGUUGUCCA | 1833 | 945-967 |
| AD-1658663.2 | ACAACAGCACCUCAGUGUCUU | 1613 | 948-968 | AAGACACUGAGGUGCUGUUGUCC | 1834 | 946-968 |
| AD-1658664.2 | CAACAGCACCUCAGUGUCUGU | 93 | 949-969 | ACAGACACUGAGGUGCUGUUGUC | 395 | 947-969 |
| AD-1658665.2 | AACAGCACCUCAGUGUCUGUU | 1614 | 950-970 | AACAGACACUGAGGUGCUGUUGU | 1835 | 948-970 |
| AD-1658801.2 | AUGCCUCUGACCUGGACAAGU | 1615 | 1086-1106 | ACUUGUCCAGGTCAGAGGCAUAG | 1836 | 1084-1106 |
| AD-1658818.2 | AAGGUGGAGGGUCUCACUUUU | 1617 | 1103-1123 | AAAAGUGAGACCCUCCACCUUGU | 1838 | 1101-1123 |
| AD-1658819.2 | AGGUGGAGGGUCUCACUUUCU | 1618 | 1104-1124 | AGAAAGTGAGACCCUCCACCUUG | 1839 | 1102-1124 |
| AD-1658820.2 | GGUGGAGGGUCUCACUUUCCU | 1619 | 1105-1125 | AGGAAAGUGAGACCCUCCACCUU | 1840 | 1103-1125 |
| AD-1658824.2 | GAGGGUCUCACUUUCCAGCAU | 1620 | 1109-1129 | ATGCTGGAAAGTGAGACCCUCCA | 1842 | 1107-1129 |
| AD-1658825.2 | AGGGUCUCACUUUCCAGCAAU | 1621 | 1110-1130 | ATUGCUGGAAAGUGAGACCCUCC | 1843 | 1108-1130 |
| AD-1658827.2 | GGUCUCACUUUCCAGCAAAAU | 1623 | 1112-1132 | ATUUTGCUGGAAAGUGAGACCCU | 1845 | 1110-1132 |
| AD-1658828.2 | GUCUCACUUUCCAGCAAAACU | 1624 | 1113-1133 | AGUUTUGCUGGAAAGUGAGACCC | 1846 | 1111-1133 |
| AD-1658829.2 | UCUCACUUUCCAGCAAAACUU | 1625 | 1114-1134 | AAGUTUTGCUGGAAAGUGAGACC | 1847 | 1112-1134 |
| AD-1658830.1 | CUCACUUUCCAGCAAAACUCU | 111 | 1115-1135 | AGAGTUTUGCUGGAAAGUGAGAC | 1848 | 1113-1135 |
| AD-1658831.1 | UCACUUUCCAGCAAAACUCCU | 1626 | 1116-1136 | AGGAGUTUUGCTGGAAAGUGAGA | 1849 | 1114-1136 |
| AD-1658832.1 | CACUUUCCAGCAAAACUCCCU | 1627 | 1117-1137 | AGGGAGTUUUGCUGGAAAGUGAG | 1850 | 1115-1137 |
| AD-1658833.1 | ACUUUCCAGCAAAACUCCCUU | 1628 | 1118-1138 | AAGGGAGUUUUGCUGGAAAGUGA | 1851 | 1116-1138 |
| AD-1658834.1 | CUUUCCAGCAAAACUCCCUCU | 1629 | 1119-1139 | AGAGGGAGUUUTGCUGGAAAGUG | 1852 | 1117-1139 |
| AD-1658835.1 | UUUCCAGCAAAACUCCCUCAU | 1630 | 1120-1140 | ATGAGGGAGUUTUGCUGGAAAGU | 1853 | 1118-1140 |
| AD-1658836.1 | UUCCAGCAAAACUCCCUCAAU | 1631 | 1121-1141 | ATUGAGGGAGUTUUGCUGGAAAG | 1854 | 1119-1141 |
| AD-1658837.1 | UCCAGCAAAACUCCCUCAACU | 1632 | 1122-1142 | AGUUGAGGGAGTUUUGCUGGAAA | 1855 | 1120-1142 |
| AD-1658838.1 | CCAGCAAAACUCCCUCAACUU | 1633 | 1123-1143 | AAGUTGAGGGAGUUUUGCUGGAA | 1856 | 1121-1143 |
| AD-1658839.1 | CAGCAAAACUCCCUCAACUGU | 112 | 1124-1144 | ACAGTUGAGGGAGUUUUGCUGGA | 1857 | 1122-1144 |
| AD-1658840.1 | AGCAAAACUCCCUCAACUGGU | 113 | 1125-1145 | ACCAGUTGAGGGAGUUUUGCUGG | 1858 | 1123-1145 |
| AD-1658841.1 | GCAAAACUCCCUCAACUGGAU | 1634 | 1126-1146 | ATCCAGTUGAGGGAGUUUUGCUG | 1859 | 1124-1146 |
| AD-1658842.1 | CAAAACUCCCUCAACUGGAUU | 1635 | 1127-1147 | AAUCCAGUUGAGGGAGUUUUGCU | 1860 | 1125-1147 |
| AD-1658843.1 | AAAACUCCCUCAACUGGAUGU | 114 | 1128-1148 | ACAUCCAGUUGAGGGAGUUUUGC | 416 | 1126-1148 |
| AD-1658844.1 | AAACUCCCUCAACUGGAUGAU | 1636 | 1129-1149 | ATCATCCAGUUGAGGGAGUUUUG | 1861 | 1127-1149 |
| AD-1658845.1 | AACUCCCUCAACUGGAUGAAU | 1637 | 1130-1150 | ATUCAUCCAGUTGAGGGAGUUUU | 1862 | 1128-1150 |
| AD-1658846.1 | ACUCCCUCAACUGGAUGAAGU | 115 | 1131-1151 | ACUUCATCCAGTUGAGGGAGUUU | 1863 | 1129-1151 |
| AD-1658847.1 | CUCCCUCAACUGGAUGAAGAU | 1638 | 1132-1152 | ATCUTCAUCCAGUUGAGGGAGUU | 1864 | 1130-1152 |
| AD-1658848.1 | UCCCUCAACUGGAUGAAGAAU | 1639 | 1133-1153 | ATUCTUCAUCCAGUUGAGGGAGU | 1865 | 1131-1153 |
| AD-1658849.1 | CCCUCAACUGGAUGAAGAAAU | 1640 | 1134-1154 | ATUUCUTCAUCCAGUUGAGGGAG | 1866 | 1132-1154 |
| AD-1658850.1 | CUCAACUGGAUGAAGAAACUU | 1641 | 1136-1156 | AAGUTUCUUCATCCAGUUGAGGG | 1867 | 1134-1156 |
| AD-1658875.1 | AGGAUCUUAUGACCUGCAGGU | 1643 | 1201-1221 | ACCUGCAGGUCAUAAGAUCCUUG | 1869 | 1199-1221 |
| AD-1658880.1 | CUUAUGACCUGCAGGACCUGU | 121 | 1206-1226 | ACAGGUCCUGCAGGUCAUAAGAU | 423 | 1204-1226 |
| AD-1658929.1 | CGAGCUGAACCUGCAAAAAUU | 122 | 1261-1281 | AAUUTUTGCAGGUUCAGCUCGGU | 1870 | 1259-1281 |
| AD-1658930.1 | GAGCUGAACCUGCAAAAAUUU | 123 | 1262-1282 | AAAUTUTUGCAGGUUCAGCUCGG | 1871 | 1260-1282 |
| AD-1658931.1 | AGCUGAACCUGCAAAAAUUGU | 124 | 1263-1283 | ACAATUTUUGCAGGUUCAGCUCG | 1872 | 1261-1283 |
| AD-1658932.1 | GCUGAACCUGCAAAAAUUGAU | 125 | 1264-1284 | ATCAAUTUUUGCAGGUUCAGCUC | 1873 | 1262-1284 |
| AD-1658933.1 | CUGAACCUGCAAAAAUUGAGU | 126 | 1265-1285 | ACUCAATUUUUGCAGGUUCAGCU | 1874 | 1263-1285 |
| AD-1658934.1 | UGAACCUGCAAAAAUUGAGCU | 127 | 1266-1286 | AGCUCAAUUUUTGCAGGUUCAGC | 1875 | 1264-1286 |
| AD-1658935.1 | GAACCUGCAAAAAUUGAGCAU | 1644 | 1267-1287 | ATGCTCAAUUUTUGCAGGUUCAG | 1876 | 1265-1287 |
| AD-1658936.1 | AACCUGCAAAAAUUGAGCAAU | 2868 | 1268-1288 | ATUGCUCAAUUTUUGCAGGUUCA | 3028 | 1266-1288 |
| AD-1658937.1 | ACCUGCAAAAAUUGAGCAAUU | 2869 | 1269-1289 | AAUUGCTCAAUTUUUGCAGGUUC | 3029 | 1267-1289 |
| AD-1658938.1 | CCUGCAAAAAUUGAGCAAUGU | 2870 | 1270-1290 | ACAUTGCUCAATUUUUGCAGGUU | 3030 | 1268-1290 |
| AD-1658939.1 | CUGCAAAAAUUGAGCAAUGAU | 2871 | 1271-1291 | ATCATUGCUCAAUUUUUGCAGGU | 3031 | 1269-1291 |
| AD-1658940.1 | UGCAAAAAUUGAGCAAUGACU | 128 | 1272-1292 | AGUCAUTGCUCAAUUUUUGCAGG | 1877 | 1270-1292 |
| AD-1658954.1 | GAGGUGCUGAACAGCAUUUUU | 133 | 1307-1327 | AAAAAUGCUGUTCAGCACCUCCC | 1878 | 1305-1327 |
| AD-1658955.1 | AGGUGCUGAACAGCAUUUUUU | 1645 | 1308-1328 | AAAAAATGCUGTUCAGCACCUCC | 1879 | 1306-1328 |
| AD-1658956.1 | GGUGCUGAACAGCAUUUUUUU | 1646 | 1309-1329 | AAAAAAAUGCUGUUCAGCACCUC | 1880 | 1307-1329 |
| AD-1658957.1 | GUGCUGAACAGCAUUUUUUUU | 1647 | 1310-1330 | AAAAAAAAUGCTGUUCAGCACCU | 1881 | 1308-1330 |
| AD-1658958.1 | UGCUGAACAGCAUUUUUUUUU | 1648 | 1311-1331 | AAAAAAAAAUGCUGUUCAGCACC | 1882 | 1309-1331 |
| AD-1658959.1 | GCUGAACAGCAUUUUUUUUGU | 1649 | 1312-1332 | ACAAAAAAAAUGCUGUUCAGCAC | 1883 | 1310-1332 |
| AD-1658960.1 | CUGAACAGCAUUUUUUUUGAU | 1650 | 1313-1333 | ATCAAAAAAAATGCUGUUCAGCA | 1884 | 1311-1333 |
| AD-1658992.1 | UGAGAGAGAGCCCACAGAGUU | 1651 | 1345-1365 | AACUCUGUGGGCUCUCUCUCAUC | 1885 | 1343-1365 |
| AD-1658994.1 | AGAGAGAGCCCACAGAGUCUU | 1652 | 1347-1367 | AAGACUCUGUGGGCUCUCUCUCA | 1886 | 1345-1367 |
| AD-1658995.1 | GAGAGAGCCCACAGAGUCUAU | 1653 | 1348-1368 | ATAGACTCUGUGGGCUCUCUCUC | 1887 | 1346-1368 |
| AD-1659055.1 | GAACCGCCCAUUCCUGUUUGU | 1654 | 1408-1428 | ACAAACAGGAATGGGCGGUUCAG | 1888 | 1406-1428 |
| AD-1659056.1 | AACCGCCCAUUCCUGUUUGCU | 146 | 1409-1429 | AGCAAACAGGAAUGGGCGGUUCA | 448 | 1407-1429 |
| AD-1659057.1 | ACCGCCCAUUCCUGUUUGCUU | 147 | 1410-1430 | AAGCAAACAGGAAUGGGCGGUUC | 449 | 1408-1430 |
| AD-1659058.1 | CCGCCCAUUCCUGUUUGCUGU | 148 | 1411-1431 | ACAGCAAACAGGAAUGGGCGGUU | 450 | 1409-1431 |
| AD-1659059.1 | CGCCCAUUCCUGUUUGCUGUU | 149 | 1412-1432 | AACAGCAAACAGGAAUGGGCGGU | 451 | 1410-1432 |
| AD-1659060.1 | GCCCAUUCCUGUUUGCUGUGU | 1655 | 1413-1433 | ACACAGCAAACAGGAAUGGGCGG | 1889 | 1411-1433 |
| AD-1659061.1 | CCCAUUCCUGUUUGCUGUGUU | 1656 | 1414-1434 | AACACAGCAAACAGGAAUGGGCG | 1890 | 1412-1434 |
| AD-1659062.1 | CCAUUCCUGUUUGCUGUGUAU | 1657 | 1415-1435 | ATACACAGCAAACAGGAAUGGGC | 189 | 1413-1435 |
| AD-1659063.1 | CAUUCCUGUUUGCUGUGUAUU | 1658 | 1416-1436 | AAUACACAGCAAACAGGAAUGGG | 1892 | 1414-1436 |
| AD-1659064.1 | AUUCCUGUUUGCUGUGUAUGU | 150 | 1417-1437 | ACAUACACAGCAAACAGGAAUGG | 452 | 1415-1437 |
| AD-1659065.1 | UUCCUGUUUGCUGUGUAUGAU | 1659 | 1418-1438 | ATCATACACAGCAAACAGGAAUG | 1893 | 1416-1438 |
| AD-1659066.1 | UCCUGUUUGCUGUGUAUGAUU | 151 | 1419-1439 | AAUCAUACACAGCAAACAGGAAU | 453 | 1417-1439 |
| AD-1659067.1 | CCUGUUUGCUGUGUAUGAUCU | 1660 | 1420-1440 | AGAUCATACACAGCAAACAGGAA | 1894 | 1418-1440 |
| AD-1659068.1 | CUGUUUGCUGUGUAUGAUCAU | 1661 | 1421-1441 | ATGATCAUACACAGCAAACAGGA | 1895 | 1419-1441 |
| AD-1659069.1 | UGUUUGCUGUGUAUGAUCAAU | 1662 | 1422-1442 | ATUGAUCAUACACAGCAAACAGG | 1896 | 1420-1442 |
| AD-1659070.1 | GUUUGCUGUGUAUGAUCAAAU | 1663 | 1423-1443 | ATUUGATCAUACACAGCAAACAG | 1897 | 1421-1443 |
| AD-1659071.1 | UUUGCUGUGUAUGAUCAAAGU | 1664 | 1424-1444 | ACUUTGAUCAUACACAGCAAACA | 1898 | 1422-1444 |
| AD-1659162.1 | GUCUCCCACCUUUUCUUCUAU | 1666 | 1608-1628 | ATAGAAGAAAAGGUGGGAGACUG | 1900 | 1606-1628 |
| AD-1659163.1 | CUCCCACCUUUUCUUCUAAUU | 158 | 1610-1630 | AAUUAGAAGAAAAGGUGGGAGAC | 460 | 1608-1630 |
| AD-1659164.1 | UCCCACCUUUUCUUCUAAUGU | 159 | 1611-1631 | ACAUTAGAAGAAAAGGUGGGAGA | 1901 | 1609-1631 |
| AD-1659165.1 | CCCACCUUUUCUUCUAAUGAU | 160 | 1612-1632 | ATCATUAGAAGAAAAGGUGGGAG | 1902 | 1610-1632 |
| AD-1659166.1 | CCACCUUUUCUUCUAAUGAGU | 1667 | 1613-1633 | ACUCAUTAGAAGAAAAGGUGGGA | 1903 | 1611-1633 |
| AD-1659167.1 | CACCUUUUCUUCUAAUGAGUU | 1668 | 1614-1634 | AACUCATUAGAAGAAAAGGUGGG | 1904 | 1612-1634 |
| AD-1659168.1 | ACCUUUUCUUCUAAUGAGUCU | 1669 | 1615-1635 | AGACTCAUUAGAAGAAAAGGUGG | 1905 | 1613-1635 |
| AD-1659208.1 | CCGUUUCUCCUUGGUCUAAGU | 1670 | 1655-1675 | ACUUAGACCAAGGAGAAACGGCU | 1906 | 1653-1675 |
| AD-1659209.1 | CGUUUCUCCUUGGUCUAAGUU | 179 | 1656-1676 | AACUTAGACCAAGGAGAAACGGC | 1907 | 1654-1676 |
| AD-1659210.1 | GUUUCUCCUUGGUCUAAGUGU | 180 | 1657-1677 | ACACTUAGACCAAGGAGAAACGG | 1908 | 1655-1677 |
| AD-1659282.1 | GUUUGCUGGGUUUAUUUUAGU | 199 | 1729-1749 | ACUAAAAUAAACCCAGCAAACUG | 501 | 1727-1749 |
| AD-1659283.1 | UUUGCUGGGUUUAUUUUAGAU | 200 | 1730-1750 | ATCUAAAAUAAACCCAGCAAACU | 1909 | 1728-1750 |
| AD-1659284.1 | UUGCUGGGUUUAUUUUAGAGU | 201 | 1731-1751 | ACUCTAAAAUAAACCCAGCAAAC | 1910 | 1729-1751 |
| AD-1659285.1 | UGCUGGGUUUAUUUUAGAGAU | 202 | 1732-1752 | ATCUCUAAAAUAAACCCAGCAAA | 1911 | 1730-1752 |
| AD-1659286.1 | GCUGGGUUUAUUUUAGAGAAU | 1671 | 1733-1753 | ATUCTCTAAAATAAACCCAGCAA | 1912 | 1731-1753 |
| AD-1659287.1 | CUGGGUUUAUUUUAGAGAAUU | 1672 | 1734-1754 | AAUUCUCUAAAAUAAACCCAGCA | 1913 | 1732-1754 |
| AD-1659288.1 | UGGGUUUAUUUUAGAGAAUGU | 1673 | 1735-1755 | ACAUTCTCUAAAAUAAACCCAGC | 1914 | 1733-1755 |
| AD-1659289.1 | GGGUUUAUUUUAGAGAAUGGU | 203 | 1736-1756 | ACCATUCUCUAAAAUAAACCCAG | 1915 | 1734-1756 |
| AD-1659290.1 | GAGGCAAGAACCAGUGUUUAU | 1674 | 1763-1783 | ATAAACACUGGTUCUUGCCUCCC | 1916 | 1761-1783 |
| AD-1659291.1 | AGGCAAGAACCAGUGUUUAGU | 206 | 1764-1784 | ACUAAACACUGGUUCUUGCCUCC | 508 | 1762-1784 |
| AD-1659292.1 | GGCAAGAACCAGUGUUUAGCU | 207 | 1765-1785 | AGCUAAACACUGGUUCUUGCCUC | 509 | 1763-1785 |
| AD-1659293.1 | GCAAGAACCAGUGUUUAGCGU | 1675 | 1766-1786 | ACGCTAAACACTGGUUCUUGCCU | 1917 | 1764-1786 |
| AD-1659294.1 | CAAGAACCAGUGUUUAGCGCU | 1676 | 1767-1787 | AGCGCUAAACACUGGUUCUUGCC | 1918 | 1765-1787 |
| AD-1659295.1 | AAGAACCAGUGUUUAGCGCGU | 1677 | 1768-1788 | ACGCGCTAAACACUGGUUCUUGC | 1919 | 1766-1788 |
| AD-1659296.1 | AGAACCAGUGUUUAGCGCGGU | 1678 | 1769-1789 | ACCGCGCUAAACACUGGUUCUUG | 1920 | 1767-1789 |
| AD-1659297.1 | GAACCAGUGUUUAGCGCGGGU | 1679 | 1770-1790 | ACCCGCGCUAAACACUGGUUCUU | 1921 | 1768-1790 |
| AD-1659298.1 | AACCAGUGUUUAGCGCGGGAU | 1680 | 1771-1791 | ATCCCGCGCUAAACACUGGUUCU | 1922 | 1769-1791 |
| AD-1659321.1 | CUGUUCCAAAAAGAAUUCCAU | 211 | 1794-1814 | ATGGAATUCUUTUUGGAACAGUA | 1923 | 1792-1814 |
| AD-1659323.1 | GUUCCAAAAAGAAUUCCAACU | 1682 | 1796-1816 | AGUUGGAAUUCTUUUUGGAACAG | 1925 | 1794-1816 |
| AD-1659325.1 | UCCAAAAAGAAUUCCAACCGU | 1683 | 1798-1818 | ACGGTUGGAAUTCUUUUUGGAAC | 1926 | 1796-1818 |
| AD-1659326.1 | CCAAAAAGAAUUCCAACCGAU | 1684 | 1799-1819 | ATCGGUTGGAATUCUUUUUGGAA | 1927 | 1797-1819 |
| AD-1659327.1 | CAAAAAGAAUUCCAACCGACU | 212 | 1800-1820 | AGUCGGTUGGAAUUCUUUUUGGA | 1928 | 1798-1820 |
| AD-1659328.1 | AAAAAGAAUUCCAACCGACCU | 1685 | 1801-1821 | AGGUCGGUUGGAAUUCUUUUUGG | 1929 | 1799-1821 |
| AD-1659329.1 | AAAAGAAUUCCAACCGACCAU | 1686 | 1802-1822 | ATGGTCGGUUGGAAUUCUUUUUG | 1930 | 1800-1822 |
| AD-1659330.1 | AAAGAAUUCCAACCGACCAGU | 1687 | 1803-1823 | ACUGGUCGGUUGGAAUUCUUUUU | 1931 | 1801-1823 |
| AD-1659331.1 | AAGAAUUCCAACCGACCAGCU | 1688 | 1804-1824 | AGCUGGTCGGUTGGAAUUCUUUU | 1932 | 1802-1824 |
| AD-1659332.1 | AGAAUUCCAACCGACCAGCUU | 1689 | 1805-1825 | AAGCTGGUCGGTUGGAAUUCUUU | 1933 | 1803-1825 |
| AD-1659333.1 | GAAUUCCAACCGACCAGCUUU | 1690 | 1806-1826 | AAAGCUGGUCGGUUGGAAUUCUU | 1934 | 1804-1826 |
| AD-1659334.1 | AAUUCCAACCGACCAGCUUGU | 1691 | 1807-1827 | ACAAGCTGGUCGGUUGGAAUUCU | 1935 | 1805-1827 |
| AD-1659335.1 | AUUCCAACCGACCAGCUUGUU | 1692 | 1808-1828 | AACAAGCUGGUCGGUUGGAAUUC | 1936 | 1806-1828 |
| AD-1659336.1 | UUCCAACCGACCAGCUUGUUU | 1693 | 1809-1829 | AAACAAGCUGGTCGGUUGGAAUU | 1937 | 1807-1829 |
| AD-1659337.1 | UCCAACCGACCAGCUUGUUUU | 1694 | 1810-1830 | AAAACAAGCUGGUCGGUUGGAAU | 1938 | 1808-1830 |
| AD-1659338.1 | CCAACCGACCAGCUUGUUUGU | 1695 | 1811-1831 | ACAAACAAGCUGGUCGGUUGGAA | 1939 | 1809-1831 |
| AD-1659339.1 | CAACCGACCAGCUUGUUUGUU | 1696 | 1812-1832 | AACAAACAAGCTGGUCGGUUGGA | 1940 | 1810-1832 |
| AD-1659340.1 | AACCGACCAGCUUGUUUGUGU | 1697 | 1813-1833 | ACACAAACAAGCUGGUCGGUUGG | 1941 | 1811-1833 |
| AD-1659341.1 | ACCGACCAGCUUGUUUGUGAU | 213 | 1814-1834 | ATCACAAACAAGCUGGUCGGUUG | 1942 | 1812-1834 |
| AD-1659342.1 | CCGACCAGCUUGUUUGUGAAU | 1698 | 1815-1835 | ATUCACAAACAAGCUGGUCGGUU | 1943 | 1813-1835 |
| AD-1659343.1 | CGACCAGCUUGUUUGUGAAAU | 1699 | 1816-1836 | ATUUCACAAACAAGCUGGUCGGU | 1944 | 1814-1836 |
| AD-1659344.1 | GACCAGCUUGUUUGUGAAACU | 1700 | 1817-1837 | AGUUTCACAAACAAGCUGGUCGG | 1945 | 1815-1837 |
| AD-1659345.1 | ACCAGCUUGUUUGUGAAACAU | 1701 | 1818-1838 | ATGUTUCACAAACAAGCUGGUCG | 1946 | 1816-1838 |
| AD-1659346.1 | CCAGCUUGUUUGUGAAACAAU | 1702 | 1819-1839 | ATUGTUTCACAAACAAGCUGGUC | 1947 | 1817-1839 |
| AD-1659347.1 | CAGCUUGUUUGUGAAACAAAU | 1703 | 1820-1840 | ATUUGUTUCACAAACAAGCUGGU | 1948 | 1818-1840 |
| AD-1659348.1 | AGCUUGUUUGUGAAACAAAAU | 1704 | 1821-1841 | ATUUTGTUUCACAAACAAGCUGG | 1949 | 1819-1841 |
| AD-1659349.1 | GCUUGUUUGUGAAACAAAAAU | 2872 | 1822-1842 | ATUUTUGUUUCACAAACAAGCUG | 3032 | 1820-1842 |
| AD-1659350.1 | CUUGUUUGUGAAACAAAAAAU | 1705 | 1823-1843 | ATUUTUTGUUUCACAAACAAGCU | 1950 | 1821-1843 |
| AD-1659351.1 | UUGUUUGUGAAACAAAAAAGU | 1706 | 1824-1844 | ACUUTUTUGUUTCACAAACAAGC | 1951 | 1822-1844 |
| AD-1659371.1 | UGUUCCCUUUUCAAGUUGAGU | 217 | 1844-1864 | ACUCAACUUGAAAAGGGAACACU | 519 | 1842-1864 |
| AD-1659372.1 | GUUCCCUUUUCAAGUUGAGAU | 218 | 1845-1865 | ATCUCAACUUGAAAAGGGAACAC | 1952 | 1843-1865 |
| AD-1659373.1 | UUCCCUUUUCAAGUUGAGAAU | 1707 | 1846-1866 | ATUCTCAACUUGAAAAGGGAACA | 1953 | 1844-1866 |
| AD-1659382.1 | CAAGUUGAGAACAAAAAUUGU | 219 | 1855-1875 | ACAATUTUUGUTCUCAACUUGAA | 1954 | 1853-1875 |
| AD-1659383.1 | AAGUUGAGAACAAAAAUUGGU | 220 | 1856-1876 | ACCAAUTUUUGTUCUCAACUUGA | 1955 | 1854-1876 |
| AD-1659384.1 | AGUUGAGAACAAAAAUUGGGU | 321 | 1857-1877 | ACCCAATUUUUGUUCUCAACUUG | 1956 | 1855-1877 |
| AD-1659385.1 | GUUGAGAACAAAAAUUGGGUU | 221 | 1858-1878 | AACCCAAUUUUTGUUCUCAACUU | 1957 | 1856-1878 |
| AD-1659386.1 | UUGAGAACAAAAAUUGGGUUU | 222 | 1859-1879 | AAACCCAAUUUTUGUUCUCAACU | 1958 | 1857-1879 |
| AD-1659387.1 | UGAGAACAAAAAUUGGGUUUU | 223 | 1860-1880 | AAAACCCAAUUTUUGUUCUCAAC | 1959 | 1858-1880 |
| AD-1659388.1 | GAGAACAAAAAUUGGGUUUUU | 224 | 1861-1881 | AAAAACCCAAUTUUUGUUCUCAA | 1960 | 1859-1881 |
| AD-1659389.1 | AGAACAAAAAUUGGGUUUUAU | 225 | 1862-1882 | ATAAAACCCAATUUUUGUUCUCA | 1961 | 1860-1882 |
| AD-1659390.1 | GAACAAAAAUUGGGUUUUAAU | 226 | 1863-1883 | ATUAAAACCCAAUUUUUGUUCUC | 1962 | 1861-1883 |
| AD-1659399.1 | AGUAUACAUUUUUGCAUUGCU | 1709 | 1889-1909 | AGCAAUGCAAAAAUGUAUACUUU | 1964 | 1887-1909 |
| AD-1659400.1 | GUAUACAUUUUUGCAUUGCCU | 227 | 1890-1910 | AGGCAATGCAAAAAUGUAUACUU | 1965 | 1888-1910 |
| AD-1659401.1 | UAUACAUUUUUGCAUUGCCUU | 1710 | 1891-1911 | AAGGCAAUGCAAAAAUGUAUACU | 1966 | 1889-1911 |
| AD-1659402.1 | AUACAUUUUUGCAUUGCCUUU | 228 | 1892-1912 | AAAGGCAAUGCAAAAAUGUAUAC | 530 | 1890-1912 |
| AD-1659406.1 | AUUUUUGCAUUGCCUUCGGUU | 230 | 1896-1916 | AACCGAAGGCAAUGCAAAAAUGU | 532 | 1894-1916 |
| AD-1659407.1 | UUUUUGCAUUGCCUUCGGUUU | 231 | 1897-1917 | AAACCGAAGGCAAUGCAAAAAUG | 533 | 1895-1917 |
| AD-1659408.1 | UUUUGCAUUGCCUUCGGUUUU | 232 | 1898-1918 | AAAACCGAAGGCAAUGCAAAAAU | 534 | 1896-1918 |
| AD-1659409.1 | UUUGCAUUGCCUUCGGUUUGU | 233 | 1899-1919 | ACAAACCGAAGGCAAUGCAAAAA | 535 | 1897-1919 |
| AD-1659410.1 | UUGCAUUGCCUUCGGUUUGUU | 234 | 1900-1920 | AACAAACCGAAGGCAAUGCAAAA | 536 | 1898-1920 |
| AD-1659411.1 | UGCAUUGCCUUCGGUUUGUAU | 235 | 1901-1921 | ATACAAACCGAAGGCAAUGCAAA | 1968 | 1899-1921 |
| AD-1659412.1 | GCAUUGCCUUCGGUUUGUAUU | 236 | 1902-1922 | AAUACAAACCGAAGGCAAUGCAA | 538 | 1900-1922 |
| AD-1659413.1 | CAUUGCCUUCGGUUUGUAUUU | 237 | 1903-1923 | AAAUACAAACCGAAGGCAAUGCA | 539 | 1901-1923 |
| AD-1659414.1 | AUUGCCUUCGGUUUGUAUUUU | 238 | 1904-1924 | AAAATACAAACCGAAGGCAAUGC | 1969 | 1902-1924 |
| AD-1659415.1 | UUGCCUUCGGUUUGUAUUUAU | 239 | 1905-1925 | ATAAAUACAAACCGAAGGCAAUG | 1970 | 1903-1925 |
| AD-1659416.1 | UGCCUUCGGUUUGUAUUUAGU | 240 | 1906-1926 | ACUAAATACAAACCGAAGGCAAU | 1971 | 1904-1926 |
| AD-1659417.1 | GCCUUCGGUUUGUAUUUAGUU | 241 | 1907-1927 | AACUAAAUACAAACCGAAGGCAA | 543 | 1905-1927 |
| AD-1659418.1 | CCUUCGGUUUGUAUUUAGUGU | 242 | 1908-1928 | ACACTAAAUACAAACCGAAGGCA | 1972 | 1906-1928 |
| AD-1659419.1 | CUUCGGUUUGUAUUUAGUGUU | 243 | 1909-1929 | AACACUAAAUACAAACCGAAGGC | 545 | 1907-1929 |
| AD-1659420.1 | UUCGGUUUGUAUUUAGUGUCU | 1711 | 1910-1930 | AGACACTAAAUACAAACCGAAGG | 1973 | 1908-1930 |
| AD-1659421.1 | UCGGUUUGUAUUUAGUGUCUU | 1712 | 1911-1931 | AAGACACUAAATACAAACCGAAG | 1974 | 1909-1931 |
| AD-1659422.1 | CGGUUUGUAUUUAGUGUCUUU | 1713 | 1912-1932 | AAAGACACUAAAUACAAACCGAA | 1975 | 1910-1932 |
| AD-1659423.1 | GGUUUGUAUUUAGUGUCUUGU | 244 | 1913-1933 | ACAAGACACUAAAUACAAACCGA | 546 | 1911-1933 |
| AD-1659424.1 | GUUUGUAUUUAGUGUCUUGAU | 1714 | 1914-1934 | ATCAAGACACUAAAUACAAACCG | 1976 | 1912-1934 |
| AD-1659425.1 | UUUGUAUUUAGUGUCUUGAAU | 1715 | 1915-1935 | ATUCAAGACACTAAAUACAAACC | 1977 | 1913-1935 |
| AD-1659426.1 | UUGUAUUUAGUGUCUUGAAUU | 1716 | 1916-1936 | AAUUCAAGACACUAAAUACAAAC | 1978 | 1914-1936 |
| AD-1659427.1 | UGUAUUUAGUGUCUUGAAUGU | 245 | 1917-1937 | ACAUTCAAGACACUAAAUACAAA | 1979 | 1915-1937 |
| AD-1659428.1 | GUAUUUAGUGUCUUGAAUGUU | 1717 | 1918-1938 | AACATUCAAGACACUAAAUACAA | 1980 | 1916-1938 |
| AD-1659429.1 | UAUUUAGUGUCUUGAAUGUAU | 246 | 1919-1939 | ATACAUTCAAGACACUAAAUACA | 1981 | 1917-1939 |
| AD-1659430.1 | AUUUAGUGUCUUGAAUGUAAU | 1718 | 1920-1940 | ATUACATUCAAGACACUAAAUAC | 1982 | 1918-1940 |
| AD-1659431.1 | UUUAGUGUCUUGAAUGUAAGU | 247 | 1921-1941 | ACUUACAUUCAAGACACUAAAUA | 549 | 1919-1941 |
| AD-1659432.1 | UUAGUGUCUUGAAUGUAAGAU | 1719 | 1922-1942 | ATCUTACAUUCAAGACACUAAAU | 1983 | 1920-1942 |
| AD-1659433.1 | UAGUGUCUUGAAUGUAAGAAU | 1720 | 1923-1943 | ATUCTUACAUUCAAGACACUAAA | 1984 | 1921-1943 |
| AD-1659434.1 | AGUGUCUUGAAUGUAAGAACU | 1721 | 1924-1944 | AGUUCUTACAUTCAAGACACUAA | 1985 | 1922-1944 |
| AD-1659436.1 | UGUCUUGAAUGUAAGAACAUU | 1722 | 1926-1946 | AAUGTUCUUACAUUCAAGACACU | 1986 | 1924-1946 |
| AD-1659437.1 | GUCUUGAAUGUAAGAACAUGU | 248 | 1927-1947 | ACAUGUTCUUACAUUCAAGACAC | 1987 | 1925-1947 |
| AD-1659440.1 | UUGAAUGUAAGAACAUGACCU | 1723 | 1930-1950 | AGGUCATGUUCTUACAUUCAAGA | 1988 | 1928-1950 |
| AD-1659446.1 | GUAAGAACAUGACCUCCGUGU | 249 | 1936-1956 | ACACGGAGGUCAUGUUCUUACAU | 551 | 1934-1956 |
| AD-1659447.1 | UAAGAACAUGACCUCCGUGUU | 250 | 1937-1957 | AACACGGAGGUCAUGUUCUUACA | 552 | 1935-1957 |
| AD-1659448.1 | AAGAACAUGACCUCCGUGUAU | 251 | 1938-1958 | ATACACGGAGGTCAUGUUCUUAC | 1989 | 1936-1958 |
| AD-1659449.1 | AGAACAUGACCUCCGUGUAGU | 252 | 1939-1959 | ACUACACGGAGGUCAUGUUCUUA | 554 | 1937-1959 |
| AD-1659450.1 | GAACAUGACCUCCGUGUAGUU | 253 | 1940-1960 | AACUACACGGAGGUCAUGUUCUU | 555 | 1938-1960 |
| AD-1659451.1 | AACAUGACCUCCGUGUAGUGU | 254 | 1941-1961 | ACACTACACGGAGGUCAUGUUCU | 1990 | 1939-1961 |
| AD-1659452.1 | ACAUGACCUCCGUGUAGUGUU | 255 | 1942-1962 | AACACUACACGGAGGUCAUGUUC | 557 | 1940-1962 |
| AD-1659453.1 | CAUGACCUCCGUGUAGUGUCU | 1724 | 1943-1963 | AGACACTACACGGAGGUCAUGUU | 1991 | 1941-1963 |
| AD-1659454.1 | AUGACCUCCGUGUAGUGUCUU | 1725 | 1944-1964 | AAGACACUACACGGAGGUCAUGU | 1992 | 1942-1964 |
| AD-1659481.1 | CUUAGUUUUUUCCACAGAUGU | 1726 | 1971-1991 | ACAUCUGUGGAAAAAACUAAGGU | 1993 | 1969-1991 |
| AD-1659482.1 | UUAGUUUUUUCCACAGAUGCU | 1727 | 1972-1992 | AGCATCTGUGGAAAAAACUAAGG | 1994 | 1970-1992 |
| AD-1659483.1 | UAGUUUUUUCCACAGAUGCUU | 1728 | 1973-1993 | AAGCAUCUGUGGAAAAAACUAAG | 1995 | 1971-1993 |
| AD-1659485.1 | GUUUUUUCCACAGAUGCUUGU | 1730 | 1975-1995 | ACAAGCAUCUGTGGAAAAAACUA | 1997 | 1973-1995 |
| AD-1659487.1 | UUUUUCCACAGAUGCUUGUGU | 1731 | 1977-1997 | ACACAAGCAUCTGUGGAAAAAAC | 1998 | 1975-1997 |
| AD-1659488.1 | UUUUCCACAGAUGCUUGUGAU | 1732 | 1978-1998 | ATCACAAGCAUCUGUGGAAAAAA | 1999 | 1976-1998 |
| AD-1659489.1 | UUUCCACAGAUGCUUGUGAUU | 265 | 1979-1999 | AAUCACAAGCATCUGUGGAAAAA | 2000 | 1977-1999 |
| AD-1659490.1 | UUCCACAGAUGCUUGUGAUUU | 1733 | 1980-2000 | AAAUCACAAGCAUCUGUGGAAAA | 2001 | 1978-2000 |
| AD-1659491.1 | UCCACAGAUGCUUGUGAUUUU | 1734 | 1981-2001 | AAAATCACAAGCAUCUGUGGAAA | 2002 | 1979-2001 |
| AD-1659492.1 | CCACAGAUGCUUGUGAUUUUU | 1735 | 1982-2002 | AAAAAUCACAAGCAUCUGUGGAA | 2003 | 1980-2002 |
| AD-1659493.1 | CACAGAUGCUUGUGAUUUUUU | 266 | 1983-2003 | AAAAAATCACAAGCAUCUGUGGA | 2004 | 1981-2003 |
| AD-1659537.1 | ACCUGAAUUUCUGUUUGAAUU | 286 | 2027-2047 | AAUUCAAACAGAAAUUCAGGUGC | 588 | 2025-2047 |
| AD-1659538.1 | CCUGAAUUUCUGUUUGAAUGU | 287 | 2028-2048 | ACAUTCAAACAGAAAUUCAGGUG | 2005 | 2026-2048 |
| AD-1659559.1 | GGAACCAUAGCUGGUUAUUUU | 295 | 2049-2069 | AAAATAACCAGCUAUGGUUCCGC | 2006 | 2047-2069 |
| AD-1659560.1 | GAACCAUAGCUGGUUAUUUCU | 296 | 2050-2070 | AGAAAUAACCAGCUAUGGUUCCG | 598 | 2048-2070 |
| AD-1659561.1 | AACCAUAGCUGGUUAUUUCUU | 297 | 2051-2071 | AAGAAATAACCAGCUAUGGUUCC | 2007 | 2049-2071 |
| AD-1659562.1 | ACCAUAGCUGGUUAUUUCUCU | 298 | 2052-2072 | AGAGAAAUAACCAGCUAUGGUUC | 600 | 2050-2072 |
| AD-1659563.1 | CCAUAGCUGGUUAUUUCUCCU | 299 | 2053-2073 | AGGAGAAAUAACCAGCUAUGGUU | 601 | 2051-2073 |
| AD-1659582.1 | CCUUGUGUUAGUAAUAAACGU | 310 | 2072-2092 | ACGUTUAUUACTAACACAAGGGA | 2008 | 2070-2092 |
| AD-1659583.1 | CUUGUGUUAGUAAUAAACGUU | 311 | 2073-2093 | AACGTUTAUUACUAACACAAGGG | 2009 | 2071-2093 |
| AD-1659584.1 | UUGUGUUAGUAAUAAACGUCU | 312 | 2074-2094 | AGACGUTUAUUACUAACACAAGG | 2010 | 2072-2094 |
| AD-1659585.1 | UGUGUUAGUAAUAAACGUCUU | 313 | 2075-2095 | AAGACGTUUAUTACUAACACAAG | 2011 | 2073-2095 |
| AD-1659586.1 | GUGUUAGUAAUAAACGUCUUU | 314 | 2076-2096 | AAAGACGUUUATUACUAACACAA | 2012 | 2074-2096 |
| AD-1659587.1 | UGUUAGUAAUAAACGUCUUGU | 315 | 2077-2097 | ACAAGACGUUUAUUACUAACACA | 617 | 2075-2097 |
| AD-1659588.1 | GUUAGUAAUAAACGUCUUGCU | 316 | 2078-2098 | AGCAAGACGUUTAUUACUAACAC | 2013 | 2076-2098 |
| AD-1684490.1 | CCGGGUGUACAUACACCCCUU | 2873 | 142-162 | AAGGGGUGUAUGUACACCCGGUC | 3033 | 140-162 |
| AD-1684491.1 | CCGGGUGUACAUACACCCCUU | 2873 | 142-162 | AAGGGGTGUAUGUACACCCGGUC | 3034 | 140-162 |
| AD-1684492.1 | CGGGUGUACAUACACCCCUUU | 2874 | 143-163 | AAAGGGGUGUAUGUACACCCGGU | 3035 | 141-163 |
| AD-1684493.1 | CGGGUGUACAUACACCCCUUU | 2874 | 143-163 | AAAGGGGUGUATGUACACCCGGU | 3036 | 141-163 |
| AD-1684494.1 | GGGUGUACAUACACCCCUUCU | 2875 | 144-164 | AGAAGGGGUGUAUGUACACCCGG | 3037 | 142-164 |
| AD-1684495.1 | GGGUGUACAUACACCCCUUCU | 2875 | 144-164 | AGAAGGGGUGUAUGUACACCCGG | 3037 | 142-164 |
| AD-1684496.1 | GGUGUACAUACACCCCUUCCU | 2876 | 145-165 | AGGAAGGGGUGUAUGUACACCCG | 3038 | 143-165 |
| AD-1684497.1 | GGUGUACAUACACCCCUUCCU | 2876 | 145-165 | AGGAAGGGGUGTAUGUACACCCG | 3039 | 143-165 |
| AD-1684498.1 | GUGUACAUACACCCCUUCCAU | 2877 | 146-166 | AUGGAAGGGGUGUAUGUACACCC | 3040 | 144-166 |
| AD-1684499.1 | GUGUACAUACACCCCUUCCAU | 2877 | 146-166 | ATGGAAGGGGUGUAUGUACACCC | 3041 | 144-166 |
| AD-1684500.1 | UGUACAUACACCCCUUCCACU | 2878 | 147-167 | AGUGGAAGGGGUGUAUGUACACC | 3042 | 145-167 |
| AD-1684501.1 | UGUACAUACACCCCUUCCACU | 2878 | 147-167 | AGUGGAAGGGGTGUAUGUACACC | 3043 | 145-167 |
| AD-1684502.1 | GUACAUACACCCCUUCCACCU | 2879 | 148-168 | AGGUGGAAGGGGUGUAUGUACAC | 3044 | 146-168 |
| AD-1684503.1 | GUACAUACACCCCUUCCACCU | 2879 | 148-168 | AGGUGGAAGGGGUGUAUGUACAC | 3044 | 146-168 |
| AD-1684504.1 | UACAUACACCCCUUCCACCUU | 2880 | 149-169 | AAGGUGGAAGGGGUGUAUGUACA | 3045 | 147-169 |
| AD-1684505.1 | UACAUACACCCCUUCCACCUU | 2880 | 149-169 | AAGGTGGAAGGGGUGUAUGUACA | 3046 | 147-169 |
| AD-1684506.1 | ACAUACACCCCUUCCACCUCU | 2881 | 150-170 | AGAGGUGGAAGGGGUGUAUGUAC | 3047 | 148-170 |
| AD-1684507.1 | ACAUACACCCCUUCCACCUCU | 2881 | 150-170 | AGAGGUGGAAGGGGUGUAUGUAC | 3047 | 148-170 |
| AD-1684508.1 | CAUACACCCCUUCCACCUCGU | 2882 | 151-171 | ACGAGGUGGAAGGGGUGUAUGUA | 3048 | 149-171 |
| AD-1684509.1 | CAUACACCCCUUCCACCUCGU | 2882 | 151-171 | ACGAGGTGGAAGGGGUGUAUGUA | 3049 | 149-171 |
| AD-1684510.1 | AUACACCCCUUCCACCUCGUU | 2883 | 152-172 | AACGAGGUGGAAGGGGUGUAUGU | 3050 | 150-172 |
| AD-1684511.1 | AUACACCCCUUCCACCUCGUU | 2883 | 152-172 | AACGAGGUGGAAGGGGUGUAUGU | 3050 | 150-172 |
| AD-1684512.1 | CCCUUCCACCUCGUCAUCCAU | 2884 | 158-178 | AUGGAUGACGAGGUGGAAGGGGU | 3051 | 156-178 |
| AD-1684513.1 | CCCUUCCACCUCGUCAUCCAU | 2884 | 158-178 | ATGGAUGACGAGGUGGAAGGGGU | 3052 | 156-178 |
| AD-1684514.1 | CCUUCCACCUCGUCAUCCACU | 2885 | 159-179 | AGUGGAUGACGAGGUGGAAGGGG | 3053 | 157-179 |
| AD-1684515.1 | CCUUCCACCUCGUCAUCCACU | 2885 | 159-179 | AGUGGATGACGAGGUGGAAGGGG | 3054 | 157-179 |
| AD-1684516.1 | CAUGCACAGUGAGCUAUGGGU | 2886 | 397-417 | ACCCAUAGCUCACUGUGCAUGCC | 3055 | 395-417 |
| AD-1684517.1 | CAUGCACAGUGAGCUAUGGGU | 2886 | 397-417 | ACCCAUAGCUCACUGUGCAUGCC | 3055 | 395-417 |
| AD-1684518.1 | AUGCACAGUGAGCUAUGGGGU | 2887 | 398-418 | ACCCCAUAGCUCACUGUGCAUGC | 3056 | 396-418 |
| AD-1684519.1 | AUGCACAGUGAGCUAUGGGGU | 2887 | 398-418 | ACCCCATAGCUCACUGUGCAUGC | 3057 | 396-418 |
| AD-1684520.1 | CCUCUCCCCAACGGCUGUCUU | 2888 | 439-459 | AAGACAGCCGUUGGGGAGAGGAC | 3058 | 437-459 |
| AD-1684521.1 | CCUCUCCCCAACGGCUGUCUU | 2888 | 439-459 | AAGACAGCCGUTGGGGAGAGGAC | 3059 | 437-459 |
| AD-1684522.1 | AGGUGCUGAACAGCAUUUUUU | 1645 | 1308-1328 | AAAAAAUGCUGUUCAGCACCUCC | 3060 | 1306-1328 |
| AD-1684523.1 | GGUGCUGAACAGCAUUUUUUU | 1646 | 1309-1329 | AAAAAAAUGCUGUUCAGCACCUC | 1880 | 1307-1329 |
| AD-1684524.1 | GUGCUGAACAGCAUUUUUUUU | 1647 | 1310-1330 | AAAAAAAAUGCUGUUCAGCACCU | 3061 | 1308-1330 |
| AD-1684525.1 | UGCUGAACAGCAUUUUUUUUU | 1648 | 1311-1331 | AAAAAAAAAUGCUGUUCAGCACC | 1882 | 1309-1331 |
| AD-1684526.1 | GCUGAACAGCAUUUUUUUUGU | 1649 | 1312-1332 | ACAAAAAAAAUGCUGUUCAGCAC | 1883 | 1310-1332 |
| AD-1684527.1 | CUGAACAGCAUUUUUUUUGAU | 1650 | 1313-1333 | AUCAAAAAAAAUGCUGUUCAGCA | 3062 | 1311-1333 |
| AD-1684528.1 | CCCCAGUCUCCCACCUUUUCU | 2889 | 1603-1623 | AGAAAAGGUGGGAGACUGGGGGU | 3063 | 1601-1623 |
| AD-1684529.1 | CCCCAGUCUCCCACCUUUUCU | 2889 | 1603-1623 | AGAAAAGGUGGGAGACUGGGGGU | 3063 | 1601-1623 |
| AD-1684530.1 | CCCAGUCUCCCACCUUUUCUU | 2890 | 1604-1624 | AAGAAAAGGUGGGAGACUGGGGG | 3064 | 1602-1624 |
| AD-1684531.1 | CCCAGUCUCCCACCUUUUCUU | 2890 | 1604-1624 | AAGAAAAGGUGGGAGACUGGGGG | 3064 | 1602-1624 |
| AD-1684532.1 | CCAGUCUCCCACCUUUUCUUU | 2891 | 1605-1625 | AAAGAAAAGGUGGGAGACUGGGG | 3065 | 1603-1625 |
| AD-1684533.1 | CCAGUCUCCCACCUUUUCUUU | 2891 | 1605-1625 | AAAGAAAAGGUGGGAGACUGGGG | 3065 | 1603-1625 |
| AD-1684534.1 | AGUCUCCCACCUUUUCUUCUU | 2892 | 1607-1627 | AAGAAGAAAAGGUGGGAGACUGG | 3066 | 1605-1627 |
| AD-1684535.1 | AGUCUCCCACCUUUUCUUCUU | 2892 | 1607-1627 | AAGAAGAAAAGGUGGGAGACUGG | 3066 | 1605-1627 |
| AD-1684536.1 | GGUUUAUUUUAGAGAAUGGGU | 2893 | 1737-1757 | ACCCAUUCUCUAAAAUAAACCCA | 3067 | 1735-1757 |
| AD-1684537.1 | GGUUUAUUUUAGAGAAUGGGU | 2893 | 1737-1757 | ACCCAUTCUCUAAAAUAAACCCA | 3068 | 1735-1757 |
| AD-1684538.1 | GUUUAUUUUAGAGAAUGGGGU | 2894 | 1738-1758 | ACCCCAUUCUCUAAAAUAAACCC | 3069 | 1736-1758 |
| AD-1684539.1 | GUUUAUUUUAGAGAAUGGGGU | 2894 | 1738-1758 | ACCCCATUCUCTAAAAUAAACCC | 3070 | 1736-1758 |
| AD-1684540.1 | UUUAUUUUAGAGAAUGGGGGU | 2895 | 1739-1759 | ACCCCCAUUCUCUAAAAUAAACC | 3071 | 1737-1759 |
| AD-1684541.1 | UUUAUUUUAGAGAAUGGGGGU | 2895 | 1739-1759 | ACCCCCAUUCUCUAAAAUAAACC | 3071 | 1737-1759 |
| AD-1684542.1 | AGAAUGGGGGUGGGGAGGCAU | 2896 | 1749-1769 | AUGCCUCCCCACCCCCAUUCUCU | 3072 | 1747-1769 |
| AD-1684543.1 | AGAAUGGGGGUGGGGAGGCAU | 2896 | 1749-1769 | ATGCCUCCCCACCCCCAUUCUCU | 3073 | 1747-1769 |
| AD-1684544.1 | GAAUGGGGGUGGGGAGGCAAU | 2897 | 1750-1770 | AUUGCCUCCCCACCCCCAUUCUC | 3074 | 1748-1770 |
| AD-1684545.1 | GAAUGGGGGUGGGGAGGCAAU | 2897 | 1750-1770 | ATUGCCTCCCCACCCCCAUUCUC | 3075 | 1748-1770 |
| AD-1684546.1 | AAUGGGGGUGGGGAGGCAAGU | 2898 | 1751-1771 | ACUUGCCUCCCCACCCCCAUUCU | 3076 | 1749-1771 |
| AD-1684547.1 | AAUGGGGGUGGGGAGGCAAGU | 2898 | 1751-1771 | ACUUGCCUCCCCACCCCCAUUCU | 3076 | 1749-1771 |
| AD-1684548.1 | AUGGGGGUGGGGAGGCAAGAU | 2899 | 1752-1772 | AUCUUGCCUCCCCACCCCCAUUC | 3077 | 1750-1772 |
| AD-1684549.1 | AUGGGGGUGGGGAGGCAAGAU | 2899 | 1752-1772 | ATCUTGCCUCCCCACCCCCAUUC | 3078 | 1750-1772 |
| AD-1684550.1 | UGGGGGUGGGGAGGCAAGAAU | 2900 | 1753-1773 | AUUCUUGCCUCCCCACCCCCAUU | 3079 | 1751-1773 |
| AD-1684551.1 | UGGGGGUGGGGAGGCAAGAAU | 2900 | 1753-1773 | ATUCTUGCCUCCCCACCCCCAUU | 3080 | 1751-1773 |
| AD-1684552.1 | GGGGGUGGGGAGGCAAGAACU | 2901 | 1754-1774 | AGUUCUUGCCUCCCCACCCCCAU | 3081 | 1752-1774 |
| AD-1684553.1 | GGGGGUGGGGAGGCAAGAACU | 2901 | 1754-1774 | AGUUCUTGCCUCCCCACCCCCAU | 3082 | 1752-1774 |
| AD-1684554.1 | GUGGGGAGGCAAGAACCAGUU | 2902 | 1758-1778 | AACUGGUUCUUGCCUCCCCACCC | 3083 | 1756-1778 |
| AD-1684555.1 | GUGGGGAGGCAAGAACCAGUU | 2902 | 1758-1778 | AACUGGTUCUUGCCUCCCCACCC | 3084 | 1756-1778 |
| AD-1684556.1 | UGGGGAGGCAAGAACCAGUGU | 2903 | 1759-1779 | ACACUGGUUCUUGCCUCCCCACC | 3085 | 1757-1779 |
| AD-1684557.1 | UGGGGAGGCAAGAACCAGUGU | 2903 | 1759-1779 | ACACTGGUUCUTGCCUCCCCACC | 3086 | 1757-1779 |
| AD-1684558.1 | GGGGAGGCAAGAACCAGUGUU | 2904 | 1760-1780 | AACACUGGUUCUUGCCUCCCCAC | 3087 | 1758-1780 |
| AD-1684559.1 | GGGGAGGCAAGAACCAGUGUU | 2904 | 1760-1780 | AACACUGGUUCTUGCCUCCCCAC | 3088 | 1758-1780 |
| AD-1684560.1 | GGGAGGCAAGAACCAGUGUUU | 204 | 1761-1781 | AAACACTGGUUCUUGCCUCCCCA | 3089 | 1759-1781 |
| AD-1684561.1 | GGAGGCAAGAACCAGUGUUUU | 205 | 1762-1782 | AAAACACUGGUTCUUGCCUCCCC | 3090 | 1760-1782 |
| AD-1684562.1 | GCUUGUUUGUGAAACAAAAAU | 2872 | 1822-1842 | AUUUUUGUUUCACAAACAAGCUG | 3091 | 1820-1842 |
| AD-1684563.1 | CUUGUUUGUGAAACAAAAAAU | 1705 | 1823-1843 | AUUUUUUGUUUCACAAACAAGCU | 3092 | 1821-1843 |
| AD-1684564.1 | UUGUUUGUGAAACAAAAAAGU | 1706 | 1824-1844 | ACUUUUUUGUUUCACAAACAAGC | 3093 | 1822-1844 |
| AD-1684565.1 | CUUAGUUUUUUCCACAGAUGU | 1726 | 1971-1991 | ACAUCUGUGGAAAAAACUAAGGU | 1993 | 1969-1991 |
| AD-1684566.1 | UUAGUUUUUUCCACAGAUGCU | 1727 | 1972-1992 | AGCAUCUGUGGAAAAAACUAAGG | 3094 | 1970-1992 |
| AD-1684567.1 | UAGUUUUUUCCACAGAUGCUU | 1728 | 1973-1993 | AAGCAUCUGUGGAAAAAACUAAG | 1995 | 1971-1993 |
| AD-1684568.1 | GUUUUUUCCACAGAUGCUUGU | 1730 | 1975-1995 | ACAAGCAUCUGUGGAAAAAACUA | 3095 | 1973-1995 |
| AD-1684569.1 | UUUUUCCACAGAUGCUUGUGU | 1731 | 1977-1997 | ACACAAGCAUCUGUGGAAAAAAC | 3096 | 1975-1997 |
| AD-1684570.1 | UUUUCCACAGAUGCUUGUGAU | 1732 | 1978-1998 | AUCACAAGCAUCUGUGGAAAAAA | 3097 | 1976-1998 |
| AD-67328.2 | UCUCCCACCUUUUCUUCUAAU | 1736 | 1609-1629 | AUUAGAAGAAAAGGUGGGAGACU | 3098 | 1607-1629 |
| AD-68579.2 | UUCCAACCGACCAGCUUGUUU | 1693 | 1809-1829 | AAACAAGCUGGUCGGUUGGAAUU | 3099 | 1807-1829 |
| AD-68585.2 | AGUUGAGAACAAAAAUUGGGU | 321 | 1857-1877 | ACCCAAUUUUUGUUCUCAACUUG | 623 | 1855-1877 |
| AD-84700.2 | CCACCUUUUCUUCUAAUGAGU | 1667 | 1613-1633 | ACUCAUUAGAAGAAAAGGUGGGA | 3100 | 1611-1633 |
| AD-84707.2 | CCUCAACUGGAUGAAGAAACU | 1737 | 1135-1155 | AGUUUCUUCAUCCAGUUGAGGGA | 3101 | 1133-1155 |
| AD-84712.2 | CCAUUCCUGUUUGCUGUGUAU | 1657 | 1415-1435 | AUACACAGCAAACAGGAAUGGGC | 3102 | 1413-1435 |
| AD-84724.2 | AGAAUUCCAACCGACCAGCUU | 1689 | 1805-1825 | AAGCUGGUCGGUUGGAAUUCUUU | 3103 | 1803-1825 |
| AD-84730.2 | GCUGGGUUUAUUUUAGAGAAU | 1671 | 1733-1753 | AUUCUCUAAAAUAAACCCAGCAA | 3104 | 1731-1753 |
| AD-84731.2 | AUGGCAUGCACAGUGAGCUAU | 1583 | 393-413 | AUAGCUCACUGUGCAUGCCAUAU | 3105 | 391-413 |
| AD-84739.5 | UGAGAAGAUUGACAGGUUCAU | 1599 | 784-804 | AUGAACCUGUCAAUCUUCUCAGC | 3106 | 782-804 |

TABLE 7
Modified Sense and Antisense Strand Sequences of Angiotensinogen (AGT) dsRNA Agents

| | Sense Strand | SEQ ID | Antisense Strand | SEQ ID | mRNA target | SEQ ID |
|---|---|---|---|---|---|---|
| Duplex Name | Sequence 5′ to 3′ | NO: | Sequence 5′ to 3′ | NO: | sequence 5′ to 3′ | NO: |
| AD-1321384.2 | uscsucccacCfUfUfuucuucuaauL96 | 2336 | asdTsuadGadAgaaadAgGfugggagascsu | 2658 | AGUCUCCCACCUUUUCUUCUAAU | 2866 |
| AD-1321390.2 | cscsucaacuGfGfAfugaagaaacuL96 | 2337 | asdGsuudTcdTucaudCcAfguugaggsgsa | 2659 | UCCCUCAACUGGAUGAAGAAACU | 2867 |
| AD-1632799.1 | asgsccugAfgGfGfCfcaccauccuuL96 | 3107 | asAfsggaUfgGfUfggccCfuCfaggcuscsa | 3381 | UGAGCCUGAGGGCCACCAUCCUC | 2660 |
| AD-1632801.1 | cscsugagGfgCfCfAfccauccucuuL96 | 3108 | asAfsgagGfaUfGfguggCfcCfucaggscsu | 3382 | AGCCUGAGGGCCACCAUCCUCUG | 2661 |
| AD-1632805.1 | asgsggccAfcCfAfUfccucugccuuL96 | 3109 | asAfsggcAfgAfGfgaugGfuGfgcccuscsa | 3383 | UGAGGGCCACCAUCCUCUGCCUC | 2662 |
| AD-1632836.1 | gsuscaucCfaCfAfAfugagaguacuL96 | 3110 | asGfsuacUfcUfCfauugUfgGfaugacsgsa | 3384 | UCGUCAUCCACAAUGAGAGUACC | 2674 |
| AD-1632838.1 | gsusgaccGfgGfUfGfuacauacacuL96 | 3111 | asGfsuguAfuGfUfacacCfcGfgucacscsu | 3385 | AGGUGACCGGGUGUACAUACACC | 2663 |
| AD-1632840.1 | csusuccaCfcUfCfGfucauccacauL96 | 3112 | asUfsgugGfaUfGfacgaGfgUfggaagsgsg | 3386 | CCCUUCCACCUCGUCAUCCACAA | 2664 |
| AD-1632841.1 | ususccacCfuCfGfUfcauccacaauL96 | 3113 | asUfsuguGfgAfUfgacgAfgGfuggaasgsg | 3387 | CCUUCCACCUCGUCAUCCACAAU | 2665 |
| AD-1632842.1 | uscscaccUfcGfUfCfauccacaauuL96 | 3114 | asAfsuugUfgGfAfugacGfaGfguggasasg | 3388 | CUUCCACCUCGUCAUCCACAAUG | 2666 |
| AD-1632843.1 | cscsaccuCfgUfCfAfuccacaauguL96 | 3115 | asCfsauuGfuGfGfaugaCfgAfgguggsasa | 3389 | UUCCACCUCGUCAUCCACAAUGA | 2667 |
| AD-1632844.1 | csasccucGfuCfAfUfccacaaugauL96 | 3116 | asUfscauUfgUfGfgaugAfcGfaggugsgsa | 3390 | UCCACCUCGUCAUCCACAAUGAG | 2668 |
| AD-1632846.1 | cscsucguCfaUfCfCfacaaugagauL96 | 3117 | asUfscucAfuUfGfuggaUfgAfcgaggsusg | 3391 | CACCUCGUCAUCCACAAUGAGAG | 2670 |
| AD-1632847.1 | csuscgucAfuCfCfAfcaaugagaguL96 | 3118 | asCfsucuCfaUfUfguggAfuGfacgagsgsu | 3392 | ACCUCGUCAUCCACAAUGAGAGU | 2671 |
| AD-1632848.1 | uscsgucaUfcCfAfCfaaugagaguuL96 | 3119 | asAfscucUfcAfUfugugGfaUfgacgasgsg | 3393 | CCUCGUCAUCCACAAUGAGAGUA | 2672 |
| AD-1632849.1 | csgsucauCfcAfCfAfaugagaguauL96 | 3120 | asUfsacuCfuCfAfuuguGfgAfugacgsasg | 3394 | CUCGUCAUCCACAAUGAGAGUAC | 2673 |
| AD-1632850.1 | uscsauccAfcAfAfUfgagaguaccuL96 | 3121 | asGfsguaCfuCfUfcauuGfuGfgaugascsg | 3395 | CGUCAUCCACAAUGAGAGUACCU | 2675 |
| AD-1632851.1 | csasuccaCfaAfUfGfagaguaccuuL96 | 3122 | asAfsgguAfcUfCfucauUfgUfggaugsasc | 3396 | GUCAUCCACAAUGAGAGUACCUG | 2676 |
| AD-1632852.1 | asusccacAfaUfGfAfgaguaccuguL96 | 636 | asCfsaggUfaCfUfcucaUfuGfuggausgsa | 938 | UCAUCCACAAUGAGAGUACCUGU | 1240 |
| AD-1632853.1 | uscscacaAfuGfAfGfaguaccuguuL96 | 3123 | asAfscagGfuAfCfucucAfuUfguggasusg | 3397 | CAUCCACAAUGAGAGUACCUGUG | 2677 |
| AD-1632854.1 | cscsacaaUfgAfGfAfguaccuguguL96 | 3124 | asCfsacaGfgUfAfcucuCfaUfuguggsasu | 3398 | AUCCACAAUGAGAGUACCUGUGA | 2678 |
| AD-1632855.1 | csascaauGfaGfAfGfuaccugugauL96 | 3125 | asUfscacAfgGfUfacucUfcAfuugugsgsa | 3399 | UCCACAAUGAGAGUACCUGUGAG | 2679 |
| AD-1632856.1 | ascsaaugAfgAfGfUfaccugugaguL96 | 637 | asCfsucaCfaGfGfuacuCfuCfauugusgsg | 939 | CCACAAUGAGAGUACCUGUGAGC | 1241 |
| AD-1632857.1 | csasaugaGfaGfUfAfccugugagcuL96 | 3126 | asGfscucAfcAfGfguacUfcUfcauugsusg | 3400 | CACAAUGAGAGUACCUGUGAGCA | 2680 |
| AD-1632858.1 | asasugagAfgUfAfCfcugugagcauL96 | 3127 | asUfsgcuCfaCfAfgguaCfuCfucauusgsu | 3401 | ACAAUGAGAGUACCUGUGAGCAG | 2681 |
| AD-1632859.1 | asusgagaGfuAfCfCfugugagcaguL96 | 3128 | asCfsugcUfcAfCfagguAfcUfcucaususg | 3402 | CAAUGAGAGUACCUGUGAGCAGC | 2682 |
| AD-1632860.1 | usgsagagUfaCfCfUfgugagcagcuL96 | 3129 | asGfscugCfuCfAfcaggUfaCfucucasusu | 3403 | AAUGAGAGUACCUGUGAGCAGCU | 2683 |
| AD-1632861.1 | gsasgaguAfcCfUfGfugagcagcuuL96 | 3130 | asAfsgcuGfcUfCfacagGfuAfcucucsasu | 3404 | AUGAGAGUACCUGUGAGCAGCUG | 2684 |
| AD-1632862.1 | asgsaguaCfcUfGfUfgagcagcuguL96 | 3131 | asCfsagcUfgCfUfcacaGfgUfacucuscsa | 3405 | UGAGAGUACCUGUGAGCAGCUGG | 2685 |
| AD-1632863.1 | gsasguacCfuGfUfGfagcagcugguL96 | 3132 | asCfscagCfuGfCfucacAfgGfuacucsusc | 3406 | GAGAGUACCUGUGAGCAGCUGGC | 2686 |
| AD-1632864.1 | asgsuaccUfgUfGfAfgcagcuggcuL96 | 3133 | asGfsccaGfcUfGfcucaCfaGfguacuscsu | 3407 | AGAGUACCUGUGAGCAGCUGGCA | 2687 |
| AD-1632865.1 | gsusaccuGfuGfAfGfcagcuggcauL96 | 3134 | asUfsgccAfgCfUfgcucAfcAfgguacsusc | 3408 | GAGUACCUGUGAGCAGCUGGCAA | 2688 |
| AD-1632866.1 | usasccugUfgAfGfCfagcuggcaauL96 | 3135 | asUfsugcCfaGfCfugcuCfaCfagguascsu | 3409 | AGUACCUGUGAGCAGCUGGCAAA | 2689 |
| AD-1632991.1 | asasugguCfgGfGfAfugcuggccauL96 | 3136 | asUfsggcCfaGfCfauccCfgAfccauusgsc | 3410 | GCAAUGGUCGGGAUGCUGGCCAA | 2690 |
| AD-1632992.1 | asusggucGfgGfAfUfgcuggccaauL96 | 3137 | asUfsuggCfcAfGfcaucCfcGfaccaususg | 3411 | CAAUGGUCGGGAUGCUGGCCAAC | 2691 |
| AD-1632993.1 | usgsgucgGfgAfUfGfcuggccaacuL96 | 3138 | asGfsuugGfcCfAfgcauCfcCfgaccasusu | 3412 | AAUGGUCGGGAUGCUGGCCAACU | 2692 |
| AD-1632994.1 | gsgsucggGfaUfGfCfuggccaacuuL96 | 3139 | asAfsguuGfgCfCfagcaUfcCfcgaccsasu | 3413 | AUGGUCGGGAUGCUGGCCAACUU | 2693 |
| AD-1632995.1 | gsuscgggAfuGfCfUfggccaacuuuL96 | 3140 | asAfsaguUfgGfCfcagcAfuCfccgacscsa | 3414 | UGGUCGGGAUGCUGGCCAACUUC | 2694 |
| AD-1632996.1 | uscsgggaUfgCfUfGfgccaacuucuL96 | 3141 | asGfsaagUfuGfGfccagCfaUfcccgascsc | 3415 | GGUCGGGAUGCUGGCCAACUUCU | 2695 |
| AD-1632997.1 | csgsggauGfcUfGfGfccaacuucuuL96 | 3142 | asAfsgaaGfuUfGfgccaGfcAfucccgsasc | 3416 | GUCGGGAUGCUGGCCAACUUCUU | 2696 |
| AD-1632998.1 | gsgsgaugCfuGfGfCfcaacuucuuuL96 | 653 | asAfsagaAfgUfUfggccAfgCfaucccsgsa | 955 | UCGGGAUGCUGGCCAACUUCUUG | 1257 |
| AD-1632999.1 | gsgsaugcUfgGfCfCfaacuucuuguL96 | 3143 | asCfsaagAfaGfUfuggcCfaGfcauccscsg | 3417 | CGGGAUGCUGGCCAACUUCUUGG | 2697 |
| AD-1633000.1 | gsasugcuGfgCfCfAfacuucuugguL96 | 3144 | asCfscaaGfaAfGfuuggCfcAfgcaucscsc | 3418 | GGGAUGCUGGCCAACUUCUUGGG | 2698 |
| AD-1633003.1 | gscsuggcCfaAfCfUfucuugggcuuL96 | 654 | asAfsgccCfaAfGfaaguUfgGfccagcsasu | 956 | AUGCUGGCCAACUUCUUGGGCUU | 1258 |
| AD-1633004.1 | csusggccAfaCfUfUfcuugggcuuuL96 | 3145 | asAfsagcCfcAfAfgaagUfuGfgccagscsa | 3419 | UGCUGGCCAACUUCUUGGGCUUC | 2699 |
| AD-1633007.1 | gscscaacUfuCfUfUfgggcuuccguL96 | 3146 | asCfsggaAfgCfCfcaagAfaGfuuggcscsa | 3420 | UGGCCAACUUCUUGGGCUUCCGU | 2700 |
| AD-1633008.1 | cscsaacuUfcUfUfGfggcuuccguuL96 | 3147 | asAfscggAfaGfCfccaaGfaAfguuggscsc | 3421 | GGCCAACUUCUUGGGCUUCCGUA | 2701 |
| AD-1633009.1 | csasacuuCfuUfGfGfgcuuccguauL96 | 655 | asUfsacgGfaAfGfcccaAfgAfaguugsgsc | 957 | GCCAACUUCUUGGGCUUCCGUAU | 1259 |
| AD-1633010.1 | asascuucUfuGfGfGfcuuccguauuL96 | 656 | asAfsuacGfgAfAfgcccAfaGfaaguusgsg | 958 | CCAACUUCUUGGGCUUCCGUAUA | 1260 |
| AD-1633011.1 | ascsuucuUfgGfGfCfuuccguauauL96 | 657 | asUfsauaCfgGfAfagccCfaAfgaagususg | 959 | CAACUUCUUGGGCUUCCGUAUAU | 1261 |
| AD-1633012.1 | csusucuuGfgGfCfUfuccguauauuL96 | 3148 | asAfsuauAfcGfGfaagcCfcAfagaagsusu | 3422 | AACUUCUUGGGCUUCCGUAUAUA | 2702 |
| AD-1633013.1 | ususcuugGfgCfUfUfccguauauauL96 | 3149 | asUfsauaUfaCfGfgaagCfcCfaagaasgsu | 3423 | ACUUCUUGGGCUUCCGUAUAUAU | 2703 |
| AD-1633014.1 | uscsuuggGfcUfUfCfcguauauauuL96 | 658 | asAfsuauAfuAfCfggaaGfcCfcaagasasg | 960 | CUUCUUGGGCUUCCGUAUAUAUG | 1262 |
| AD-1633015.1 | csusugggCfuUfCfCfguauauauguL96 | 3150 | asCfsauaUfaUfAfcggaAfgCfccaagsasa | 3424 | UUCUUGGGCUUCCGUAUAUAUGG | 2704 |
| AD-1633016.1 | ususgggcUfuCfCfGfuauauaugguL96 | 659 | asCfscauAfuAfUfacggAfaGfcccaasgsa | 961 | UCUUGGGCUUCCGUAUAUAUGGC | 1263 |
| AD-1633018.1 | gsgsgcuuCfcGfUfAfuauauggcauL96 | 3151 | asUfsgccAfuAfUfauacGfgAfagcccsasa | 3425 | UUGGGCUUCCGUAUAUAUGGCAU | 2706 |
| AD-1633019.1 | gsgscuucCfgUfAfUfauauggcauuL96 | 3152 | asAfsugcCfaUfAfuauaCfgGfaagccscsa | 3426 | UGGGCUUCCGUAUAUAUGGCAUG | 2707 |
| AD-1633020.1 | gscsuuccGfuAfUfAfuauggcauguL96 | 3153 | asCfsaugCfcAfUfauauAfcGfgaagcscsc | 3427 | GGGCUUCCGUAUAUAUGGCAUGC | 2708 |
| AD-1633027.1 | usasuauaUfgGfCfAfugcacaguguL96 | 3154 | asCfsacuGfuGfCfaugcCfaUfauauascsg | 3428 | CGUAUAUAUGGCAUGCACAGUGA | 2709 |
| AD-1633028.1 | asusauauGfgCfAfUfgcacagugauL96 | 3155 | asUfscacUfgUfGfcaugCfcAfuauausasc | 3429 | GUAUAUAUGGCAUGCACAGUGAG | 2710 |
| AD-1633029.1 | usasuaugGfcAfUfGfcacagugaguL96 | 660 | asCfsucaCfuGfUfgcauGfcCfauauasusa | 962 | UAUAUAUGGCAUGCACAGUGAGC | 1264 |
| AD-1633030.1 | asusauggCfaUfGfCfacagugagcuL96 | 3156 | asGfscucAfcUfGfugcaUfgCfcauausasu | 3430 | AUAUAUGGCAUGCACAGUGAGCU | 2711 |
| AD-1633031.1 | usasuggcAfuGfCfAfcagugagcuuL96 | 3157 | asAfsgcuCfaCfUfgugcAfuGfccauasusa | 3431 | UAUAUGGCAUGCACAGUGAGCUA | 2712 |
| AD-1633032.1 | usgsgcauGfcAfCfAfgugagcuauuL96 | 3158 | asAfsuagCfuCfAfcuguGfcAfugccasusa | 3432 | UAUGGCAUGCACAGUGAGCUAUG | 2714 |
| AD-1633033.1 | gsgscaugCfaCfAfGfugagcuauguL96 | 3159 | asCfsauaGfcUfCfacugUfgCfaugccsasu | 3433 | AUGGCAUGCACAGUGAGCUAUGG | 2715 |
| AD-1633034.1 | gscsaugcAfcAfGfUfgagcuaugguL96 | 661 | asCfscauAfgCfUfcacuGfuGfcaugcscsa | 963 | UGGCAUGCACAGUGAGCUAUGGG | 1265 |
| AD-1633048.1 | usgsgcacCfcUfGfGfccucucucuuL96 | 3160 | asAfsgagAfgAfGfgccaGfgGfugccasasa | 3434 | UUUGGCACCCUGGCCUCUCUCUA | 2716 |
| AD-1633049.1 | gsgscaccCfuGfGfCfcucucucuauL96 | 3161 | asUfsagaGfaGfAfggccAfgGfgugccsasa | 3435 | UUGGCACCCUGGCCUCUCUCUAU | 2717 |
| AD-1633094.1 | gsascaggCfuAfCfAfggcaauccuuL96 | 663 | asAfsggaUfuGfCfcuguAfgCfcugucsasg | 965 | CUGACAGGCUACAGGCAAUCCUG | 1267 |
| AD-1633095.1 | ascsaggcUfaCfAfGfgcaauccuguL96 | 664 | asCfsaggAfuUfGfccugUfaGfccuguscsa | 966 | UGACAGGCUACAGGCAAUCCUGG | 1268 |
| AD-1633119.1 | ususccuuGfgAfAfGfgacaagaacuL96 | 3162 | asGfsuucUfuGfUfccuuCfcAfaggaascsa | 3436 | UGUUCCUUGGAAGGACAAGAACU | 2718 |
| AD-1633121.1 | cscsuuggAfaGfGfAfcaagaacuguL96 | 671 | asCfsaguUfcUfUfguccUfuCfcaaggsasa | 973 | UUCCUUGGAAGGACAAGAACUGC | 1275 |
| AD-1633122.1 | csusuggaAfgGfAfCfaagaacugcuL96 | 3163 | asGfscagUfuCfUfugucCfuUfccaagsgsa | 3437 | UCCUUGGAAGGACAAGAACUGCA | 2719 |
| AD-1633254.2 | csasccugAfaGfCfAfgccguuuguuL96 | 672 | asAfscaaAfcGfGfcugcUfuCfaggugscsa | 974 | UGCACCUGAAGCAGCCGUUUGUG | 1276 |
| AD-1633257.2 | csusgaagCfaGfCfCfguuugugcauL96 | 3164 | asUfsgcaCfaAfAfcggcUfgCfuucagsgsu | 3438 | ACCUGAAGCAGCCGUUUGUGCAG | 2720 |
| AD-1633269.2 | ususugugCfaGfGfGfccuggcucuuL96 | 3165 | asAfsgagCfcAfGfgcccUfgCfacaaascsg | 3439 | CGUUUGUGCAGGGCCUGGCUCUC | 2721 |
| AD-1633270.2 | ususgugcAfgGfGfCfcuggcucucuL96 | 3166 | asGfsagaGfcCfAfggccCfuGfcacaasasc | 3440 | GUUUGUGCAGGGCCUGGCUCUCU | 2722 |
| AD-1633271.2 | usgsugcaGfgGfCfCfuggcucucuuL96 | 3167 | asAfsgagAfgCfCfaggcCfcUfgcacasasa | 3441 | UUUGUGCAGGGCCUGGCUCUCUA | 2723 |
| AD-1633272.2 | gsusgcagGfgCfCfUfggcucucuauL96 | 3168 | asUfsagaGfaGfCfcaggCfcCfugcacsasa | 3442 | UUGUGCAGGGCCUGGCUCUCUAU | 2724 |
| AD-1633273.2 | usgscaggGfcCfUfGfgcucucuauuL96 | 3169 | asAfsuagAfgAfGfccagGfcCfcugcascsa | 3443 | UGUGCAGGGCCUGGCUCUCUAUA | 2725 |
| AD-1633290.2 | ascsgcucUfcUfGfGfacuucacaguL96 | 3170 | asCfsuguGfaAfGfuccaGfaGfagcgusgsg | 3444 | CCACGCUCUCUGGACUUCACAGA | 2726 |
| AD-1633291.2 | csgscucuCfuGfGfAfcuucacagauL96 | 3171 | asUfscugUfgAfAfguccAfgAfgagcgsusg | 3445 | CACGCUCUCUGGACUUCACAGAA | 2727 |
| AD-1633324.2 | csusgagaAfgAfUfUfgacagguucuL96 | 3172 | asGfsaacCfuGfUfcaauCfuUfcucagscsa | 3446 | UGCUGAGAAGAUUGACAGGUUCA | 2728 |
| AD-1633325.2 | gsasgaagAfuUfGfAfcagguucauuL96 | 3173 | asAfsugaAfcCfUfgucaAfuCfuucucsasg | 3447 | CUGAGAAGAUUGACAGGUUCAUG | 2730 |
| AD-1633326.2 | asgsaagaUfuGfAfCfagguucauguL96 | 3174 | asCfsaugAfaCfCfugucAfaUfcuucuscsa | 3448 | UGAGAAGAUUGACAGGUUCAUGC | 2731 |
| AD-1633327.2 | gsasagauUfgAfCfAfgguucaugcuL96 | 3175 | asGfscauGfaAfCfcuguCfaAfucuucsusc | 3449 | GAGAAGAUUGACAGGUUCAUGCA | 2732 |
| AD-1633328.2 | asasgauuGfaCfAfGfguucaugcauL96 | 3176 | asUfsgcaUfgAfAfccugUfcAfaucuuscsu | 3450 | AGAAGAUUGACAGGUUCAUGCAG | 2733 |
| AD-1633329.2 | asgsauugAfcAfGfGfuucaugcaguL96 | 3177 | asCfsugcAfuGfAfaccuGfuCfaaucususc | 3451 | GAAGAUUGACAGGUUCAUGCAGG | 2734 |
| AD-1633330.2 | gsasuugaCfaGfGfUfucaugcagguL96 | 3178 | asCfscugCfaUfGfaaccUfgUfcaaucsusu | 3452 | AAGAUUGACAGGUUCAUGCAGGC | 2735 |
| AD-1633331.2 | asusugacAfgGfUfUfcaugcaggcuL96 | 3179 | asGfsccuGfcAfUfgaacCfuGfucaauscsu | 3453 | AGAUUGACAGGUUCAUGCAGGCU | 2736 |
| AD-1633332.2 | ususgacaGfgUfUfCfaugcaggcuuL96 | 3180 | asAfsgccUfgCfAfugaaCfcUfgucaasusc | 3454 | GAUUGACAGGUUCAUGCAGGCUG | 2737 |
| AD-1633333.2 | usgsacagGfuUfCfAfugcaggcuguL96 | 3181 | asCfsagcCfuGfCfaugaAfcCfugucasasu | 3455 | AUUGACAGGUUCAUGCAGGCUGU | 2738 |
| AD-1633334.2 | gsascaggUfuCfAfUfgcaggcuguuL96 | 3182 | asAfscagCfcUfGfcaugAfaCfcugucsasa | 3456 | UUGACAGGUUCAUGCAGGCUGUG | 2739 |
| AD-1633335.2 | ascsagguUfcAfUfGfcaggcuguguL96 | 683 | asCfsacaGfcCfUfgcauGfaAfccuguscsa | 985 | UGACAGGUUCAUGCAGGCUGUGA | 1287 |
| AD-1633343.2 | asusgcagGfcUfGfUfgacaggauguL96 | 684 | asCfsaucCfuGfUfcacaGfcCfugcausgsa | 986 | UCAUGCAGGCUGUGACAGGAUGG | 1288 |
| AD-1633345.2 | gscsaggcUfgUfGfAfcaggauggauL96 | 685 | asUfsccaUfcCfUfgucaCfaGfccugcsasu | 987 | AUGCAGGCUGUGACAGGAUGGAA | 1289 |
| AD-1633346.2 | csasggcuGfuGfAfCfaggauggaauL96 | 3183 | asUfsuccAfuCfCfugucAfcAfgccugscsa | 3457 | UGCAGGCUGUGACAGGAUGGAAG | 2741 |
| AD-1633409.2 | gscsuuucAfaCfAfCfcuacguccauL96 | 688 | asUfsggaCfgUfAfggugUfuGfaaagcscsa | 990 | UGGCUUUCAACACCUACGUCCAC | 1292 |
| AD-1633453.2 | gsasguucUfgGfGfUfggacaacaguL96 | 3184 | asCfsuguUfgUfCfcaccCfaGfaacucscsu | 3458 | AGGAGUUCUGGGUGGACAACAGC | 2742 |
| AD-1633464.2 | gsgsacaaCfaGfCfAfccucaguguuL96 | 695 | asAfscacUfgAfGfgugcUfgUfuguccsasc | 997 | GUGGACAACAGCACCUCAGUGUC | 1299 |
| AD-1633465.2 | gsascaacAfgCfAfCfcucagugucuL96 | 696 | asGfsacaCfuGfAfggugCfuGfuugucscsa | 998 | UGGACAACAGCACCUCAGUGUCU | 1300 |
| AD-1633466.2 | ascsaacaGfcAfCfCfucagugucuuL96 | 3185 | asAfsgacAfcUfGfagguGfcUfguuguscsc | 3459 | GGACAACAGCACCUCAGUGUCUG | 2743 |
| AD-1633467.2 | csasacagCfaCfCfUfcagugucuguL96 | 697 | asCfsagaCfaCfUfgaggUfgCfuguugsusc | 999 | GACAACAGCACCUCAGUGUCUGU | 1301 |
| AD-1633468.2 | asascagcAfcCfUfCfagugucuguuL96 | 3186 | asAfscagAfcAfCfugagGfuGfcuguusgsu | 3460 | ACAACAGCACCUCAGUGUCUGUU | 2744 |
| AD-1633604.2 | asusgccuCfuGfAfCfcuggacaaguL96 | 3187 | asCfsuugUfcCfAfggucAfgAfggcausasg | 3461 | CUAUGCCUCUGACCUGGACAAGG | 2745 |
| AD-1633621.2 | asasggugGfaGfGfGfucucacuuuuL96 | 3188 | asAfsaagUfgAfGfacccUfcCfaccuusgsu | 3462 | ACAAGGUGGAGGGUCUCACUUUC | 2747 |
| AD-1633622.2 | asgsguggAfgGfGfUfcucacuuucuL96 | 3189 | asGfsaaaGfuGfAfgaccCfuCfcaccususg | 3463 | CAAGGUGGAGGGUCUCACUUUCC | 2748 |
| AD-1633623.2 | gsgsuggaGfgGfUfCfucacuuuccuL96 | 3190 | asGfsgaaAfgUfGfagacCfcUfccaccsusu | 3464 | AAGGUGGAGGGUCUCACUUUCCA | 2749 |
| AD-1633627.2 | gsasggguCfuCfAfCfuuuccagcauL96 | 3191 | asUfsgcuGfgAfAfagugAfgAfcccucscsa | 3465 | UGGAGGGUCUCACUUUCCAGCAA | 2750 |
| AD-1633628.2 | asgsggucUfcAfCfUfuuccagcaauL96 | 3192 | asUfsugcUfgGfAfaaguGfaGfacccuscsc | 3466 | GGAGGGUCUCACUUUCCAGCAAA | 2751 |
| AD-1633630.2 | gsgsucucAfcUfUfUfccagcaaaauL96 | 3193 | asUfsuuuGfcUfGfgaaaGfuGfagaccscsu | 3467 | AGGGUCUCACUUUCCAGCAAAAC | 2753 |
| AD-1633631.2 | gsuscucaCfuUfUfCfcagcaaaacuL96 | 3194 | asGfsuuuUfgCfUfggaaAfgUfgagacscsc | 3468 | GGGUCUCACUUUCCAGCAAAACU | 2754 |
| AD-1633632.2 | uscsucacUfuUfCfCfagcaaaacuuL96 | 3195 | asAfsguuUfuGfCfuggaAfaGfugagascsc | 3469 | GGUCUCACUUUCCAGCAAAACUC | 2755 |
| AD-1633633.1 | csuscacuUfuCfCfAfgcaaaacucuL96 | 715 | asGfsaguUfuUfGfcuggAfaAfgugagsasc | 1017 | GUCUCACUUUCCAGCAAAACUCC | 1319 |
| AD-1633634.1 | uscsacuuUfcCfAfGfcaaaacuccuL96 | 3196 | asGfsgagUfuUfUfgcugGfaAfagugasgsa | 3470 | UCUCACUUUCCAGCAAAACUCCC | 2756 |
| AD-1633635.1 | csascuuuCfcAfGfCfaaaacucccuL96 | 3197 | asGfsggaGfuUfUfugcuGfgAfaagugsasg | 3471 | CUCACUUUCCAGCAAAACUCCCU | 2757 |
| AD-1633636.1 | ascsuuucCfaGfCfAfaaacucccuuL96 | 3198 | asAfsgggAfgUfUfuugcUfgGfaaagusgsa | 3472 | UCACUUUCCAGCAAAACUCCCUC | 2758 |
| AD-1633637.1 | csusuuccAfgCfAfAfaacucccucuL96 | 3199 | asGfsaggGfaGfUfuuugCfuGfgaaagsusg | 3473 | CACUUUCCAGCAAAACUCCCUCA | 2759 |
| AD-1633638.1 | ususuccaGfcAfAfAfacucccucauL96 | 3200 | asUfsgagGfgAfGfuuuuGfcUfggaaasgsu | 3474 | ACUUUCCAGCAAAACUCCCUCAA | 2760 |
| AD-1633639.1 | ususccagCfaAfAfAfcucccucaauL96 | 3201 | asUfsugaGfgGfAfguuuUfgCfuggaasasg | 3475 | CUUUCCAGCAAAACUCCCUCAAC | 2761 |
| AD-1633640.1 | uscscagcAfaAfAfCfucccucaacuL96 | 3202 | asGfsuugAfgGfGfaguuUfuGfcuggasasa | 3476 | UUUCCAGCAAAACUCCCUCAACU | 2762 |
| AD-1633641.1 | cscsagcaAfaAfCfUfcccucaacuuL96 | 3203 | asAfsguuGfaGfGfgaguUfuUfgcuggsasa | 3477 | UUCCAGCAAAACUCCCUCAACUG | 2763 |
| AD-1633642.1 | csasgcaaAfaCfUfCfccucaacuguL96 | 716 | asCfsaguUfgAfGfggagUfuUfugcugsgsa | 1018 | UCCAGCAAAACUCCCUCAACUGG | 1320 |
| AD-1633643.1 | asgscaaaAfcUfCfCfcucaacugguL96 | 717 | asCfscagUfuGfAfgggaGfuUfuugcusgsg | 1019 | CCAGCAAAACUCCCUCAACUGGA | 1321 |
| AD-1633644.1 | gscsaaaaCfuCfCfCfucaacuggauL96 | 3204 | asUfsccaGfuUfGfagggAfgUfuuugcsusg | 3478 | CAGCAAAACUCCCUCAACUGGAU | 2764 |
| AD-1633645.1 | csasaaacUfcCfCfUfcaacuggauuL96 | 3205 | asAfsuccAfgUfUfgaggGfaGfuuuugscsu | 3479 | AGCAAAACUCCCUCAACUGGAUG | 2765 |
| AD-1633646.1 | asasaacuCfcCfUfCfaacuggauguL96 | 718 | asCfsaucCfaGfUfugagGfgAfguuuusgsc | 1020 | GCAAAACUCCCUCAACUGGAUGA | 1322 |
| AD-1633647.1 | asasacucCfcUfCfAfacuggaugauL96 | 3206 | asUfscauCfcAfGfuugaGfgGfaguuususg | 3480 | CAAAACUCCCUCAACUGGAUGAA | 2766 |
| AD-1633648.1 | asascuccCfuCfAfAfcuggaugaauL96 | 3207 | asUfsucaUfcCfAfguugAfgGfgaguususu | 3481 | AAAACUCCCUCAACUGGAUGAAG | 2767 |
| AD-1633649.1 | ascsucccUfcAfAfCfuggaugaaguL96 | 719 | asCfsuucAfuCfCfaguuGfaGfggagususu | 1021 | AAACUCCCUCAACUGGAUGAAGA | 1323 |
| AD-1633650.1 | csuscccuCfaAfCfUfggaugaagauL96 | 3208 | asUfscuuCfaUfCfcaguUfgAfgggagsusu | 3482 | AACUCCCUCAACUGGAUGAAGAA | 2768 |
| AD-1633651.1 | uscsccucAfaCfUfGfgaugaagaauL96 | 3209 | asUfsucuUfcAfUfccagUfuGfagggasgsu | 3483 | ACUCCCUCAACUGGAUGAAGAAA | 2769 |
| AD-1633652.1 | cscscucaAfcUfGfGfaugaagaaauL96 | 3210 | asUfsuucUfuCfAfuccaGfuUfgagggsasg | 3484 | CUCCCUCAACUGGAUGAAGAAAC | 2770 |
| AD-1633653.1 | csuscaacUfgGfAfUfgaagaaacuuL96 | 3211 | asAfsguuUfcUfUfcaucCfaGfuugagsgsg | 3485 | CCCUCAACUGGAUGAAGAAACUA | 2771 |
| AD-1633678.1 | asgsgaucUfuAfUfGfaccugcagguL96 | 3212 | asCfscugCfaGfGfucauAfaGfauccususg | 3486 | CAAGGAUCUUAUGACCUGCAGGA | 2773 |
| AD-1633683.1 | csusuaugAfcCfUfGfcaggaccuguL96 | 725 | asCfsaggUfcCfUfgcagGfuCfauaagsasu | 1027 | AUCUUAUGACCUGCAGGACCUGC | 1329 |
| AD-1633732.1 | csgsagcuGfaAfCfCfugcaaaaauuL96 | 726 | asAfsuuuUfuGfCfagguUfcAfgcucgsgsu | 1028 | ACCGAGCUGAACCUGCAAAAAUU | 1330 |
| AD-1633733.1 | gsasgcugAfaCfCfUfgcaaaaauuuL96 | 727 | asAfsauuUfuUfGfcaggUfuCfagcucsgsg | 1029 | CCGAGCUGAACCUGCAAAAAUUG | 1331 |
| AD-1633734.1 | asgscugaAfcCfUfGfcaaaaauuguL96 | 728 | asCfsaauUfuUfUfgcagGfuUfcagcuscsg | 1030 | CGAGCUGAACCUGCAAAAAUUGA | 1332 |
| AD-1633735.1 | gscsugaaCfcUfGfCfaaaaauugauL96 | 729 | asUfscaaUfuUfUfugcaGfgUfucagcsusc | 1031 | GAGCUGAACCUGCAAAAAUUGAG | 1333 |
| AD-1633736.1 | csusgaacCfuGfCfAfaaaauugaguL96 | 730 | asCfsucaAfuUfUfuugcAfgGfuucagscsu | 1032 | AGCUGAACCUGCAAAAAUUGAGC | 1334 |
| AD-1633737.1 | usgsaaccUfgCfAfAfaaauugagcuL96 | 731 | asGfscucAfaUfUfuuugCfaGfguucasgsc | 1033 | GCUGAACCUGCAAAAAUUGAGCA | 1335 |
| AD-1633738.1 | gsasaccuGfcAfAfAfaauugagcauL96 | 3213 | asUfsgcuCfaAfUfuuuuGfcAfgguucsasg | 3487 | CUGAACCUGCAAAAAUUGAGCAA | 2774 |
| AD-1633739.1 | asasccugCfaAfAfAfauugagcaauL96 | 3214 | asUfsugcUfcAfAfuuuuUfgCfagguuscsa | 3488 | UGAACCUGCAAAAAUUGAGCAAU | 3655 |
| AD-1633740.1 | ascscugcAfaAfAfAfuugagcaauuL96 | 3215 | asAfsuugCfuCfAfauuuUfuGfcaggususc | 3489 | GAACCUGCAAAAAUUGAGCAAUG | 3656 |
| AD-1633741.1 | cscsugcaAfaAfAfUfugagcaauguL96 | 3216 | asCfsauuGfcUfCfaauuUfuUfgcaggsusu | 3490 | AACCUGCAAAAAUUGAGCAAUGA | 3657 |
| AD-1633742.1 | csusgcaaAfaAfUfUfgagcaaugauL96 | 3217 | asUfscauUfgCfUfcaauUfuUfugcagsgsu | 3491 | ACCUGCAAAAAUUGAGCAAUGAC | 3658 |
| AD-1633743.1 | usgscaaaAfaUfUfGfagcaaugacuL96 | 732 | asGfsucaUfuGfCfucaaUfuUfuugcasgsg | 1034 | CCUGCAAAAAUUGAGCAAUGACC | 1336 |
| AD-1633759.1 | gsasggugCfuGfAfAfcagcauuuuuL96 | 737 | asAfsaaaUfgCfUfguucAfgCfaccucscsc | 1039 | GGGAGGUGCUGAACAGCAUUUUU | 1341 |
| AD-1633777.1 | usgsagagAfgAfGfCfccacagaguuL96 | 3218 | asAfscucUfgUfGfggcuCfuCfucucasusc | 3492 | GAUGAGAGAGAGCCCACAGAGUC | 2781 |
| AD-1633779.1 | asgsagagAfgCfCfCfacagagucuuL96 | 3219 | asAfsgacUfcUfGfugggCfuCfucucuscsa | 3493 | UGAGAGAGAGCCCACAGAGUCUA | 2782 |
| AD-1633780.1 | gsasgagaGfcCfCfAfcagagucuauL96 | 3220 | asUfsagaCfuCfUfguggGfcUfcucucsusc | 3494 | GAGAGAGAGCCCACAGAGUCUAC | 2783 |
| AD-1633840.1 | gsasaccgCfcCfAfUfuccuguuuguL96 | 3221 | asCfsaaaCfaGfGfaaugGfgCfgguucsasg | 3495 | CUGAACCGCCCAUUCCUGUUUGC | 2784 |
| AD-1633841.1 | asasccgcCfcAfUfUfccuguuugcuL96 | 750 | asGfscaaAfcAfGfgaauGfgGfcgguuscsa | 1052 | UGAACCGCCCAUUCCUGUUUGCU | 1354 |
| AD-1633842.1 | ascscgccCfaUfUfCfcuguuugcuuL96 | 751 | asAfsgcaAfaCfAfggaaUfgGfgcggususc | 1053 | GAACCGCCCAUUCCUGUUUGCUG | 1355 |
| AD-1633843.1 | cscsgcccAfuUfCfCfuguuugcuguL96 | 752 | asCfsagcAfaAfCfaggaAfuGfggcggsusu | 1054 | AACCGCCCAUUCCUGUUUGCUGU | 1356 |
| AD-1633844.1 | csgscccaUfuCfCfUfguuugcuguuL96 | 753 | asAfscagCfaAfAfcaggAfaUfgggcgsgsu | 1055 | ACCGCCCAUUCCUGUUUGCUGUG | 1357 |
| AD-1633845.1 | gscsccauUfcCfUfGfuuugcuguguL96 | 3222 | asCfsacaGfcAfAfacagGfaAfugggcsgsg | 3496 | CCGCCCAUUCCUGUUUGCUGUGU | 2785 |
| AD-1633846.1 | cscscauuCfcUfGfUfuugcuguguuL96 | 3223 | asAfscacAfgCfAfaacaGfgAfaugggscsg | 3497 | CGCCCAUUCCUGUUUGCUGUGUA | 2786 |
| AD-1633847.1 | csasuuccUfgUfUfUfgcuguguauuL96 | 3224 | asAfsuacAfcAfGfcaaaCfaGfgaaugsgsg | 3498 | CCCAUUCCUGUUUGCUGUGUAUG | 2788 |
| AD-1633848.1 | asusuccuGfuUfUfGfcuguguauguL96 | 754 | asCfsauaCfaCfAfgcaaAfcAfggaausgsg | 1056 | CCAUUCCUGUUUGCUGUGUAUGA | 1358 |
| AD-1633849.1 | ususccugUfuUfGfCfuguguaugauL96 | 3225 | asUfscauAfcAfCfagcaAfaCfaggaasusg | 3499 | CAUUCCUGUUUGCUGUGUAUGAU | 2789 |
| AD-1633850.1 | uscscuguUfuGfCfUfguguaugauuL96 | 755 | asAfsucaUfaCfAfcagcAfaAfcaggasasu | 1057 | AUUCCUGUUUGCUGUGUAUGAUC | 1359 |
| AD-1633851.1 | cscsuguuUfgCfUfGfuguaugaucuL96 | 3226 | asGfsaucAfuAfCfacagCfaAfacaggsasa | 3500 | UUCCUGUUUGCUGUGUAUGAUCA | 2790 |
| AD-1633852.1 | csusguuuGfcUfGfUfguaugaucauL96 | 3227 | asUfsgauCfaUfAfcacaGfcAfaacagsgsa | 3501 | UCCUGUUUGCUGUGUAUGAUCAA | 2791 |
| AD-1633853.1 | usgsuuugCfuGfUfGfuaugaucaauL96 | 3228 | asUfsugaUfcAfUfacacAfgCfaaacasgsg | 3502 | CCUGUUUGCUGUGUAUGAUCAAA | 2792 |
| AD-1633854.1 | gsusuugcUfgUfGfUfaugaucaaauL96 | 3229 | asUfsuugAfuCfAfuacaCfaGfcaaacsasg | 3503 | CUGUUUGCUGUGUAUGAUCAAAG | 2793 |
| AD-1633855.1 | ususugcuGfuGfUfAfugaucaaaguL96 | 3230 | asCfsuuuGfaUfCfauacAfcAfgcaaascsa | 3504 | UGUUUGCUGUGUAUGAUCAAAGC | 2794 |
| AD-1633946.1 | gsuscuccCfaCfCfUfuuucuucuauL96 | 3231 | asUfsagaAfgAfAfaaggUfgGfgagacsusg | 3505 | CAGUCUCCCACCUUUUCUUCUAA | 2796 |
| AD-1633947.1 | csuscccaCfcUfUfUfucuucuaauuL96 | 762 | asAfsuuaGfaAfGfaaaaGfgUfgggagsasc | 1064 | GUCUCCCACCUUUUCUUCUAAUG | 1366 |
| AD-1633948.1 | uscsccacCfuUfUfUfcuucuaauguL96 | 763 | asCfsauuAfgAfAfgaaaAfgGfugggasgsa | 1065 | UCUCCCACCUUUUCUUCUAAUGA | 1367 |
| AD-1633949.1 | cscscaccUfuUfUfCfuucuaaugauL96 | 764 | asUfscauUfaGfAfagaaAfaGfgugggsasg | 1066 | CUCCCACCUUUUCUUCUAAUGAG | 1368 |
| AD-1633950.1 | csasccuuUfuCfUfUfcuaaugaguuL96 | 3232 | asAfscucAfuUfAfgaagAfaAfaggugsgsg | 3506 | CCCACCUUUUCUUCUAAUGAGUC | 2798 |
| AD-1633951.1 | ascscuuuUfcUfUfCfuaaugagucuL96 | 3233 | asGfsacuCfaUfUfagaaGfaAfaaggusgsg | 3507 | CCACCUUUUCUUCUAAUGAGUCG | 2799 |
| AD-1633991.1 | cscsguuuCfuCfCfUfuggucuaaguL96 | 3234 | asCfsuuaGfaCfCfaaggAfgAfaacggscsu | 3508 | AGCCGUUUCUCCUUGGUCUAAGU | 2800 |
| AD-1633992.1 | csgsuuucUfcCfUfUfggucuaaguuL96 | 783 | asAfscuuAfgAfCfcaagGfaGfaaacgsgsc | 1085 | GCCGUUUCUCCUUGGUCUAAGUG | 1387 |
| AD-1633993.1 | gsusuucuCfcUfUfGfgucuaaguguL96 | 784 | asCfsacuUfaGfAfccaaGfgAfgaaacsgsg | 1086 | CCGUUUCUCCUUGGUCUAAGUGU | 1388 |
| AD-1634065.1 | gsusuugcUfgGfGfUfuuauuuuaguL96 | 803 | asCfsuaaAfaUfAfaaccCfaGfcaaacsusg | 1105 | CAGUUUGCUGGGUUUAUUUUAGA | 1407 |
| AD-1634066.1 | ususugcuGfgGfUfUfuauuuuagauL96 | 804 | asUfscuaAfaAfUfaaacCfcAfgcaaascsu | 1106 | AGUUUGCUGGGUUUAUUUUAGAG | 1408 |
| AD-1634067.1 | ususgcugGfgUfUfUfauuuuagaguL96 | 805 | asCfsucuAfaAfAfuaaaCfcCfagcaasasc | 1107 | GUUUGCUGGGUUUAUUUUAGAGA | 1409 |
| AD-1634068.1 | usgscuggGfuUfUfAfuuuuagagauL96 | 806 | asUfscucUfaAfAfauaaAfcCfcagcasasa | 1108 | UUUGCUGGGUUUAUUUUAGAGAA | 1410 |
| AD-1634069.1 | csusggguUfuAfUfUfuuagagaauuL96 | 3235 | asAfsuucUfcUfAfaaauAfaAfcccagscsa | 3509 | UGCUGGGUUUAUUUUAGAGAAUG | 2802 |
| AD-1634070.1 | usgsgguuUfaUfUfUfuagagaauguL96 | 3236 | asCfsauuCfuCfUfaaaaUfaAfacccasgsc | 3510 | GCUGGGUUUAUUUUAGAGAAUGG | 2803 |
| AD-1634071.1 | gsgsguuuAfuUfUfUfagagaaugguL96 | 807 | asCfscauUfcUfCfuaaaAfuAfaacccsasg | 1109 | CUGGGUUUAUUUUAGAGAAUGGG | 1411 |
| AD-1634072.1 | gsgsgaggCfaAfGfAfaccaguguuuL96 | 808 | asAfsacaCfuGfGfuucuUfgCfcucccscsa | 1110 | UGGGGAGGCAAGAACCAGUGUUU | 1412 |
| AD-1634073.1 | gsgsaggcAfaGfAfAfccaguguuuuL96 | 809 | asAfsaacAfcUfGfguucUfuGfccuccscsc | 1111 | GGGGAGGCAAGAACCAGUGUUUA | 1413 |
| AD-1634074.1 | gsasggcaAfgAfAfCfcaguguuuauL96 | 3237 | asUfsaaaCfaCfUfgguuCfuUfgccucscsc | 3511 | GGGAGGCAAGAACCAGUGUUUAG | 2804 |
| AD-1634075.1 | asgsgcaaGfaAfCfCfaguguuuaguL96 | 810 | asCfsuaaAfcAfCfugguUfcUfugccuscsc | 1112 | GGAGGCAAGAACCAGUGUUUAGC | 1414 |
| AD-1634076.1 | gsgscaagAfaCfCfAfguguuuagcuL96 | 811 | asGfscuaAfaCfAfcuggUfuCfuugccsusc | 1113 | GAGGCAAGAACCAGUGUUUAGCG | 1415 |
| AD-1634077.1 | gscsaagaAfcCfAfGfuguuuagcguL96 | 3238 | asCfsgcuAfaAfCfacugGfuUfcuugcscsu | 3512 | AGGCAAGAACCAGUGUUUAGCGC | 2805 |
| AD-1634078.1 | csasagaaCfcAfGfUfguuuagcgcuL96 | 3239 | asGfscgcUfaAfAfcacuGfgUfucuugscsc | 3513 | GGCAAGAACCAGUGUUUAGCGCG | 2806 |
| AD-1634079.1 | asasgaacCfaGfUfGfuuuagcgcguL96 | 3240 | asCfsgcgCfuAfAfacacUfgGfuucuusgsc | 3514 | GCAAGAACCAGUGUUUAGCGCGG | 2807 |
| AD-1634080.1 | asgsaaccAfgUfGfUfuuagcgcgguL96 | 3241 | asCfscgcGfcUfAfaacaCfuGfguucususg | 3515 | CAAGAACCAGUGUUUAGCGCGGG | 2808 |
| AD-1634081.1 | gsasaccaGfuGfUfUfuagcgcggguL96 | 3242 | asCfsccgCfgCfUfaaacAfcUfgguucsusu | 3516 | AAGAACCAGUGUUUAGCGCGGGA | 2809 |
| AD-1634082.1 | asasccagUfgUfUfUfagcgcgggauL96 | 3243 | asUfscccGfcGfCfuaaaCfaCfugguuscsu | 3517 | AGAACCAGUGUUUAGCGCGGGAC | 2810 |
| AD-1634105.1 | csusguucCfaAfAfAfagaauuccauL96 | 815 | asUfsggaAfuUfCfuuuuUfgGfaacagsusa | 1117 | UACUGUUCCAAAAAGAAUUCCAA | 1419 |
| AD-1634107.1 | gsusuccaAfaAfAfGfaauuccaacuL96 | 3244 | asGfsuugGfaAfUfucuuUfuUfggaacsasg | 3518 | CUGUUCCAAAAAGAAUUCCAACC | 2812 |
| AD-1634109.1 | uscscaaaAfaGfAfAfuuccaaccguL96 | 3245 | asCfsgguUfgGfAfauucUfuUfuuggasasc | 3519 | GUUCCAAAAAGAAUUCCAACCGA | 2813 |
| AD-1634110.1 | cscsaaaaAfgAfAfUfuccaaccgauL96 | 3246 | asUfscggUfuGfGfaauuCfuUfuuuggsasa | 3520 | UUCCAAAAAGAAUUCCAACCGAC | 2814 |
| AD-1634111.1 | csasaaaaGfaAfUfUfccaaccgacuL96 | 816 | asGfsucgGfuUfGfgaauUfcUfuuuugsgsa | 1118 | UCCAAAAAGAAUUCCAACCGACC | 1420 |
| AD-1634112.1 | asasaaagAfaUfUfCfcaaccgaccuL96 | 3247 | asGfsgucGfgUfUfggaaUfuCfuuuuusgsg | 3521 | CCAAAAAGAAUUCCAACCGACCA | 2815 |
| AD-1634113.1 | asasaagaAfuUfCfCfaaccgaccauL96 | 3248 | asUfsgguCfgGfUfuggaAfuUfcuuuususg | 3522 | CAAAAAGAAUUCCAACCGACCAG | 2816 |
| AD-1634114.1 | asasagaaUfuCfCfAfaccgaccaguL96 | 3249 | asCfsuggUfcGfGfuuggAfaUfucuuususu | 3523 | AAAAAGAAUUCCAACCGACCAGC | 2817 |
| AD-1634115.1 | asasgaauUfcCfAfAfccgaccagcuL96 | 3250 | asGfscugGfuCfGfguugGfaAfuucuususu | 3524 | AAAAGAAUUCCAACCGACCAGCU | 2818 |
| AD-1634116.1 | gsasauucCfaAfCfCfgaccagcuuuL96 | 3251 | asAfsagcUfgGfUfcgguUfgGfaauucsusu | 3525 | AAGAAUUCCAACCGACCAGCUUG | 2820 |
| AD-1634117.1 | asasuuccAfaCfCfGfaccagcuuguL96 | 3252 | asCfsaagCfuGfGfucggUfuGfgaauuscsu | 3526 | AGAAUUCCAACCGACCAGCUUGU | 2821 |
| AD-1634118.1 | asusuccaAfcCfGfAfccagcuuguuL96 | 3253 | asAfscaaGfcUfGfgucgGfuUfggaaususc | 3527 | GAAUUCCAACCGACCAGCUUGUU | 2822 |
| AD-1634119.1 | uscscaacCfgAfCfCfagcuuguuuuL96 | 3254 | asAfsaacAfaGfCfugguCfgGfuuggasasu | 3528 | AUUCCAACCGACCAGCUUGUUUG | 2824 |
| AD-1634120.1 | cscsaaccGfaCfCfAfgcuuguuuguL96 | 3255 | asCfsaaaCfaAfGfcuggUfcGfguuggsasa | 3529 | UUCCAACCGACCAGCUUGUUUGU | 2825 |
| AD-1634121.1 | csasaccgAfcCfAfGfcuuguuuguuL96 | 3256 | asAfscaaAfcAfAfgcugGfuCfgguugsgsa | 3530 | UCCAACCGACCAGCUUGUUUGUG | 2826 |
| AD-1634122.1 | asasccgaCfcAfGfCfuuguuuguguL96 | 3257 | asCfsacaAfaCfAfagcuGfgUfcgguusgsg | 3531 | CCAACCGACCAGCUUGUUUGUGA | 2827 |
| AD-1634123.1 | ascscgacCfaGfCfUfuguuugugauL96 | 817 | asUfscacAfaAfCfaagcUfgGfucggususg | 1119 | CAACCGACCAGCUUGUUUGUGAA | 1421 |
| AD-1634124.1 | cscsgaccAfgCfUfUfguuugugaauL96 | 3258 | asUfsucaCfaAfAfcaagCfuGfgucggsusu | 3532 | AACCGACCAGCUUGUUUGUGAAA | 2828 |
| AD-1634125.1 | csgsaccaGfcUfUfGfuuugugaaauL96 | 3259 | asUfsuucAfcAfAfacaaGfcUfggucgsgsu | 3533 | ACCGACCAGCUUGUUUGUGAAAC | 2829 |
| AD-1634126.1 | gsasccagCfuUfGfUfuugugaaacuL96 | 3260 | asGfsuuuCfaCfAfaacaAfgCfuggucsgsg | 3534 | CCGACCAGCUUGUUUGUGAAACA | 2830 |
| AD-1634127.1 | ascscagcUfuGfUfUfugugaaacauL96 | 3261 | asUfsguuUfcAfCfaaacAfaGfcugguscsg | 3535 | CGACCAGCUUGUUUGUGAAACAA | 2831 |
| AD-1634128.1 | cscsagcuUfgUfUfUfgugaaacaauL96 | 3262 | asUfsuguUfuCfAfcaaaCfaAfgcuggsusc | 3536 | GACCAGCUUGUUUGUGAAACAAA | 2832 |
| AD-1634129.1 | csasgcuuGfuUfUfGfugaaacaaauL96 | 3263 | asUfsuugUfuUfCfacaaAfcAfagcugsgsu | 3537 | ACCAGCUUGUUUGUGAAACAAAA | 2833 |
| AD-1634130.1 | asgscuugUfuUfGfUfgaaacaaaauL96 | 3264 | asUfsuuuGfuUfUfcacaAfaCfaagcusgsg | 3538 | CCAGCUUGUUUGUGAAACAAAAA | 2834 |
| AD-1634135.1 | usgsuuccCfuUfUfUfcaaguugaguL96 | 821 | asCfsucaAfcUfUfgaaaAfgGfgaacascsu | 1123 | AGUGUUCCCUUUUCAAGUUGAGA | 1425 |
| AD-1634136.1 | gsusucccUfuUfUfCfaaguugagauL96 | 822 | asUfscucAfaCfUfugaaAfaGfggaacsasc | 1124 | GUGUUCCCUUUUCAAGUUGAGAA | 1426 |
| AD-1634137.1 | ususcccuUfuUfCfAfaguugagaauL96 | 3265 | asUfsucuCfaAfCfuugaAfaAfgggaascsa | 3539 | UGUUCCCUUUUCAAGUUGAGAAC | 2837 |
| AD-1634146.1 | csasaguuGfaGfAfAfcaaaaauuguL96 | 823 | asCfsaauUfuUfUfguucUfcAfacuugsasa | 1125 | UUCAAGUUGAGAACAAAAAUUGG | 1427 |
| AD-1634147.1 | asasguugAfgAfAfCfaaaaauugguL96 | 824 | asCfscaaUfuUfUfuguuCfuCfaacuusgsa | 1126 | UCAAGUUGAGAACAAAAAUUGGG | 1428 |
| AD-1634148.1 | gsusugagAfaCfAfAfaaauuggguuL96 | 825 | asAfscccAfaUfUfuuugUfuCfucaacsusu | 1127 | AAGUUGAGAACAAAAAUUGGGUU | 1429 |
| AD-1634149.1 | ususgagaAfcAfAfAfaauuggguuuL96 | 826 | asAfsaccCfaAfUfuuuuGfuUfcucaascsu | 1128 | AGUUGAGAACAAAAAUUGGGUUU | 1430 |
| AD-1634150.1 | usgsagaaCfaAfAfAfauuggguuuuL96 | 827 | asAfsaacCfcAfAfuuuuUfgUfucucasasc | 1129 | GUUGAGAACAAAAAUUGGGUUUU | 1431 |
| AD-1634151.1 | gsasgaacAfaAfAfAfuuggguuuuuL96 | 828 | asAfsaaaCfcCfAfauuuUfuGfuucucsasa | 1130 | UUGAGAACAAAAAUUGGGUUUUA | 1432 |
| AD-1634152.1 | asgsaacaAfaAfAfUfuggguuuuauL96 | 829 | asUfsaaaAfcCfCfaauuUfuUfguucuscsa | 1131 | UGAGAACAAAAAUUGGGUUUUAA | 1433 |
| AD-1634153.1 | gsasacaaAfaAfUfUfggguuuuaauL96 | 830 | asUfsuaaAfaCfCfcaauUfuUfuguucsusc | 1132 | GAGAACAAAAAUUGGGUUUUAAA | 1434 |
| AD-1634162.1 | asgsuauaCfaUfUfUfuugcauugcuL96 | 3266 | asGfscaaUfgCfAfaaaaUfgUfauacususu | 3540 | AAAGUAUACAUUUUUGCAUUGCC | 2839 |
| AD-1634163.1 | gsusauacAfuUfUfUfugcauugccuL96 | 831 | asGfsgcaAfuGfCfaaaaAfuGfuauacsusu | 1133 | AAGUAUACAUUUUUGCAUUGCCU | 1435 |
| AD-1634164.1 | usasuacaUfuUfUfUfgcauugccuuL96 | 3267 | asAfsggcAfaUfGfcaaaAfaUfguauascsu | 3541 | AGUAUACAUUUUUGCAUUGCCUU | 2840 |
| AD-1634165.1 | asusacauUfuUfUfGfcauugccuuuL96 | 832 | asAfsaggCfaAfUfgcaaAfaAfuguausasc | 1134 | GUAUACAUUUUUGCAUUGCCUUC | 1436 |
| AD-1634169.1 | asusuuuuGfcAfUfUfgccuucgguuL96 | 834 | asAfsccgAfaGfGfcaauGfcAfaaaausgsu | 1136 | ACAUUUUUGCAUUGCCUUCGGUU | 1438 |
| AD-1634170.1 | ususuuugCfaUfUfGfccuucgguuuL96 | 835 | asAfsaccGfaAfGfgcaaUfgCfaaaaasusg | 1137 | CAUUUUUGCAUUGCCUUCGGUUU | 1439 |
| AD-1634171.1 | ususuugcAfuUfGfCfcuucgguuuuL96 | 836 | asAfsaacCfgAfAfggcaAfuGfcaaaasasu | 1138 | AUUUUUGCAUUGCCUUCGGUUUG | 1440 |
| AD-1634172.1 | ususugcaUfuGfCfCfuucgguuuguL96 | 837 | asCfsaaaCfcGfAfaggcAfaUfgcaaasasa | 1139 | UUUUUGCAUUGCCUUCGGUUUGU | 1441 |
| AD-1634173.1 | ususgcauUfgCfCfUfucgguuuguuL96 | 838 | asAfscaaAfcCfGfaaggCfaAfugcaasasa | 1140 | UUUUGCAUUGCCUUCGGUUUGUA | 1442 |
| AD-1634174.1 | usgscauuGfcCfUfUfcgguuuguauL96 | 839 | asUfsacaAfaCfCfgaagGfcAfaugcasasa | 1141 | UUUGCAUUGCCUUCGGUUUGUAU | 1443 |
| AD-1634175.1 | gscsauugCfcUfUfCfgguuuguauuL96 | 840 | asAfsuacAfaAfCfcgaaGfgCfaaugcsasa | 1142 | UUGCAUUGCCUUCGGUUUGUAUU | 1444 |
| AD-1634176.1 | csasuugcCfuUfCfGfguuuguauuuL96 | 841 | asAfsauaCfaAfAfccgaAfgGfcaaugscsa | 1143 | UGCAUUGCCUUCGGUUUGUAUUU | 1445 |
| AD-1634177.1 | asusugccUfuCfGfGfuuuguauuuuL96 | 842 | asAfsaauAfcAfAfaccgAfaGfgcaausgsc | 1144 | GCAUUGCCUUCGGUUUGUAUUUA | 1446 |
| AD-1634178.1 | ususgccuUfcGfGfUfuuguauuuauL96 | 843 | asUfsaaaUfaCfAfaaccGfaAfggcaasusg | 1145 | CAUUGCCUUCGGUUUGUAUUUAG | 1447 |
| AD-1634179.1 | usgsccuuCfgGfUfUfuguauuuaguL96 | 844 | asCfsuaaAfuAfCfaaacCfgAfaggcasasu | 1146 | AUUGCCUUCGGUUUGUAUUUAGU | 1448 |
| AD-1634180.1 | gscscuucGfgUfUfUfguauuuaguuL96 | 845 | asAfscuaAfaUfAfcaaaCfcGfaaggcsasa | 1147 | UUGCCUUCGGUUUGUAUUUAGUG | 1449 |
| AD-1634181.1 | cscsuucgGfuUfUfGfuauuuaguguL96 | 846 | asCfsacuAfaAfUfacaaAfcCfgaaggscsa | 1148 | UGCCUUCGGUUUGUAUUUAGUGU | 1450 |
| AD-1634182.1 | csusucggUfuUfGfUfauuuaguguuL96 | 847 | asAfscacUfaAfAfuacaAfaCfcgaagsgsc | 1149 | GCCUUCGGUUUGUAUUUAGUGUC | 1451 |
| AD-1634183.1 | ususcgguUfuGfUfAfuuuagugucuL96 | 3268 | asGfsacaCfuAfAfauacAfaAfccgaasgsg | 3542 | CCUUCGGUUUGUAUUUAGUGUCU | 2841 |
| AD-1634184.1 | uscsgguuUfgUfAfUfuuagugucuuL96 | 3269 | asAfsgacAfcUfAfaauaCfaAfaccgasasg | 3543 | CUUCGGUUUGUAUUUAGUGUCUU | 2842 |
| AD-1634185.1 | csgsguuuGfuAfUfUfuagugucuuuL96 | 3270 | asAfsagaCfaCfUfaaauAfcAfaaccgsasa | 3544 | UUCGGUUUGUAUUUAGUGUCUUG | 2843 |
| AD-1634186.1 | gsgsuuugUfaUfUfUfagugucuuguL96 | 848 | asCfsaagAfcAfCfuaaaUfaCfaaaccsgsa | 1150 | UCGGUUUGUAUUUAGUGUCUUGA | 1452 |
| AD-1634187.1 | gsusuuguAfuUfUfAfgugucuugauL96 | 3271 | asUfscaaGfaCfAfcuaaAfuAfcaaacscsg | 3545 | CGGUUUGUAUUUAGUGUCUUGAA | 2844 |
| AD-1634188.1 | ususuguaUfuUfAfGfugucuugaauL96 | 3272 | asUfsucaAfgAfCfacuaAfaUfacaaascsc | 3546 | GGUUUGUAUUUAGUGUCUUGAAU | 2845 |
| AD-1634189.1 | ususguauUfuAfGfUfgucuugaauuL96 | 3273 | asAfsuucAfaGfAfcacuAfaAfuacaasasc | 3547 | GUUUGUAUUUAGUGUCUUGAAUG | 2846 |
| AD-1634190.1 | usgsuauuUfaGfUfGfucuugaauguL96 | 849 | asCfsauuCfaAfGfacacUfaAfauacasasa | 1151 | UUUGUAUUUAGUGUCUUGAAUGU | 1453 |
| AD-1634191.1 | gsusauuuAfgUfGfUfcuugaauguuL96 | 3274 | asAfscauUfcAfAfgacaCfuAfaauacsasa | 3548 | UUGUAUUUAGUGUCUUGAAUGUA | 2847 |
| AD-1634192.1 | usasuuuaGfuGfUfCfuugaauguauL96 | 850 | asUfsacaUfuCfAfagacAfcUfaaauascsa | 1152 | UGUAUUUAGUGUCUUGAAUGUAA | 1454 |
| AD-1634193.1 | asusuuagUfgUfCfUfugaauguaauL96 | 3275 | asUfsuacAfuUfCfaagaCfaCfuaaausasc | 3549 | GUAUUUAGUGUCUUGAAUGUAAG | 2848 |
| AD-1634194.1 | ususuaguGfuCfUfUfgaauguaaguL96 | 851 | asCfsuuaCfaUfUfcaagAfcAfcuaaasusa | 1153 | UAUUUAGUGUCUUGAAUGUAAGA | 1455 |
| AD-1634195.1 | ususagugUfcUfUfGfaauguaagauL96 | 3276 | asUfscuuAfcAfUfucaaGfaCfacuaasasu | 3550 | AUUUAGUGUCUUGAAUGUAAGAA | 2849 |
| AD-1634196.1 | usasguguCfuUfGfAfauguaagaauL96 | 3277 | asUfsucuUfaCfAfuucaAfgAfcacuasasa | 3551 | UUUAGUGUCUUGAAUGUAAGAAC | 2850 |
| AD-1634197.1 | asgsugucUfuGfAfAfuguaagaacuL96 | 3278 | asGfsuucUfuAfCfauucAfaGfacacusasa | 3552 | UUAGUGUCUUGAAUGUAAGAACA | 2851 |
| AD-1634199.1 | usgsucuuGfaAfUfGfuaagaacauuL96 | 3279 | asAfsuguUfcUfUfacauUfcAfagacascsu | 3553 | AGUGUCUUGAAUGUAAGAACAUG | 2852 |
| AD-1634200.1 | gsuscuugAfaUfGfUfaagaacauguL96 | 852 | asCfsaugUfuCfUfuacaUfuCfaagacsasc | 1154 | GUGUCUUGAAUGUAAGAACAUGA | 1456 |
| AD-1634203.1 | ususgaauGfuAfAfGfaacaugaccuL96 | 3280 | asGfsgucAfuGfUfucuuAfcAfuucaasgsa | 3554 | UCUUGAAUGUAAGAACAUGACCU | 2853 |
| AD-1634209.1 | gsusaagaAfcAfUfGfaccuccguguL96 | 853 | asCfsacgGfaGfGfucauGfuUfcuuacsasu | 1155 | AUGUAAGAACAUGACCUCCGUGU | 1457 |
| AD-1634210.1 | usasagaaCfaUfGfAfccuccguguuL96 | 854 | asAfscacGfgAfGfgucaUfgUfucuuascsa | 1156 | UGUAAGAACAUGACCUCCGUGUA | 1458 |
| AD-1634211.1 | asasgaacAfuGfAfCfcuccguguauL96 | 855 | asUfsacaCfgGfAfggucAfuGfuucuusasc | 1157 | GUAAGAACAUGACCUCCGUGUAG | 1459 |
| AD-1634212.1 | asgsaacaUfgAfCfCfuccguguaguL96 | 856 | asCfsuacAfcGfGfagguCfaUfguucususa | 1158 | UAAGAACAUGACCUCCGUGUAGU | 1460 |
| AD-1634213.1 | gsasacauGfaCfCfUfccguguaguuL96 | 857 | asAfscuaCfaCfGfgaggUfcAfuguucsusu | 1159 | AAGAACAUGACCUCCGUGUAGUG | 1461 |
| AD-1634214.1 | asascaugAfcCfUfCfcguguaguguL96 | 858 | asCfsacuAfcAfCfggagGfuCfauguuscsu | 1160 | AGAACAUGACCUCCGUGUAGUGU | 1462 |
| AD-1634215.1 | ascsaugaCfcUfCfCfguguaguguuL96 | 859 | asAfscacUfaCfAfcggaGfgUfcaugususc | 1161 | GAACAUGACCUCCGUGUAGUGUC | 1463 |
| AD-1634216.1 | csasugacCfuCfCfGfuguagugucuL96 | 3281 | asGfsacaCfuAfCfacggAfgGfucaugsusu | 3555 | AACAUGACCUCCGUGUAGUGUCU | 2854 |
| AD-1634217.1 | asusgaccUfcCfGfUfguagugucuuL96 | 3282 | asAfsgacAfcUfAfcacgGfaGfgucausgsu | 3556 | ACAUGACCUCCGUGUAGUGUCUG | 2855 |
| AD-1634234.1 | ususuccaCfaGfAfUfgcuugugauuL96 | 869 | asAfsucaCfaAfGfcaucUfgUfggaaasasa | 1171 | UUUUUCCACAGAUGCUUGUGAUU | 1473 |
| AD-1634235.1 | ususccacAfgAfUfGfcuugugauuuL96 | 3283 | asAfsaucAfcAfAfgcauCfuGfuggaasasa | 3557 | UUUUCCACAGAUGCUUGUGAUUU | 2863 |
| AD-1634236.1 | uscscacaGfaUfGfCfuugugauuuuL96 | 3284 | asAfsaauCfaCfAfagcaUfcUfguggasasa | 3558 | UUUCCACAGAUGCUUGUGAUUUU | 2864 |
| AD-1634237.1 | cscsacagAfuGfCfUfugugauuuuuL96 | 3285 | asAfsaaaUfcAfCfaagcAfuCfuguggsasa | 3559 | UUCCACAGAUGCUUGUGAUUUUU | 2865 |
| AD-1634238.1 | csascagaUfgCfUfUfgugauuuuuuL96 | 870 | asAfsaaaAfuCfAfcaagCfaUfcugugsgsa | 1172 | UCCACAGAUGCUUGUGAUUUUUG | 1474 |
| AD-1634282.1 | ascscugaAfuUfUfCfuguuugaauuL96 | 890 | asAfsuucAfaAfCfagaaAfuUfcaggusgsc | 1192 | GCACCUGAAUUUCUGUUUGAAUG | 1494 |
| AD-1634283.1 | cscsugaaUfuUfCfUfguuugaauguL96 | 891 | asCfsauuCfaAfAfcagaAfaUfucaggsusg | 1193 | CACCUGAAUUUCUGUUUGAAUGC | 1495 |
| AD-1634304.1 | gsgsaaccAfuAfGfCfugguuauuuuL96 | 899 | asAfsaauAfaCfCfagcuAfuGfguuccsgsc | 1201 | GCGGAACCAUAGCUGGUUAUUUC | 1503 |
| AD-1634305.1 | gsasaccaUfaGfCfUfgguuauuucuL96 | 900 | asGfsaaaUfaAfCfcagcUfaUfgguucscsg | 1202 | CGGAACCAUAGCUGGUUAUUUCU | 1504 |
| AD-1634306.1 | asasccauAfgCfUfGfguuauuucuuL96 | 901 | asAfsgaaAfuAfAfccagCfuAfugguuscsc | 1203 | GGAACCAUAGCUGGUUAUUUCUC | 1505 |
| AD-1634307.1 | ascscauaGfcUfGfGfuuauuucucuL96 | 902 | asGfsagaAfaUfAfaccaGfcUfauggususc | 1204 | GAACCAUAGCUGGUUAUUUCUCC | 1506 |
| AD-1634308.1 | cscsauagCfuGfGfUfuauuucuccuL96 | 903 | asGfsgagAfaAfUfaaccAfgCfuauggsusu | 1205 | AACCAUAGCUGGUUAUUUCUCCC | 1507 |
| AD-1634327.1 | cscsuuguGfuUfAfGfuaauaaacguL96 | 914 | asCfsguuUfaUfUfacuaAfcAfcaaggsgsa | 1216 | UCCCUUGUGUUAGUAAUAAACGU | 1518 |
| AD-1634328.1 | csusugugUfuAfGfUfaauaaacguuL96 | 915 | asAfscguUfuAfUfuacuAfaCfacaagsgsg | 1217 | CCCUUGUGUUAGUAAUAAACGUC | 1519 |
| AD-1634329.1 | ususguguUfaGfUfAfauaaacgucuL96 | 916 | asGfsacgUfuUfAfuuacUfaAfcacaasgsg | 1218 | CCUUGUGUUAGUAAUAAACGUCU | 1520 |
| AD-1634330.1 | usgsuguuAfgUfAfAfuaaacgucuuL96 | 917 | asAfsgacGfuUfUfauuaCfuAfacacasasg | 1219 | CUUGUGUUAGUAAUAAACGUCUU | 1521 |
| AD-1634331.1 | gsusguuaGfuAfAfUfaaacgucuuuL96 | 918 | asAfsagaCfgUfUfuauuAfcUfaacacsasa | 1220 | UUGUGUUAGUAAUAAACGUCUUG | 1522 |
| AD-1634332.1 | usgsuuagUfaAfUfAfaacgucuuguL96 | 919 | asCfsaagAfcGfUfuuauUfaCfuaacascsa | 1221 | UGUGUUAGUAAUAAACGUCUUGC | 1523 |
| AD-1634333.1 | gsusuaguAfaUfAfAfacgucuugcuL96 | 920 | asGfscaaGfaCfGfuuuaUfuAfcuaacsasc | 1222 | GUGUUAGUAAUAAACGUCUUGCC | 1524 |
| AD-1657992.1 | asgsccugagGfGfCfcaccauccuuL96 | 2016 | asdAsggdAudGguggdCcCfucaggcuscsa | 2338 | UGAGCCUGAGGGCCACCAUCCUC | 2660 |
| AD-1657994.1 | cscsugagggCfCfAfccauccucuuL96 | 2017 | asdAsgadGgdAuggudGgCfccucaggscsu | 2339 | AGCCUGAGGGCCACCAUCCUCUG | 2661 |
| AD-1657998.1 | asgsggccacCfAfUfccucugccuuL96 | 2018 | asdAsggdCadGaggadTgGfuggcccuscsa | 2340 | UGAGGGCCACCAUCCUCUGCCUC | 2662 |
| AD-1658030.1 | gsusgaccggGfUfGfuacauacacuL96 | 2019 | asdGsugdTadTguacdAcCfcggucacscsu | 2341 | AGGUGACCGGGUGUACAUACACC | 2663 |
| AD-1658032.1 | csusuccaccUfCfGfucauccacauL96 | 2020 | asdTsgudGgdAugacdGaGfguggaagsgsg | 2342 | CCCUUCCACCUCGUCAUCCACAA | 2664 |
| AD-1658033.1 | ususccaccuCfGfUfcauccacaauL96 | 2021 | asdTsugdTgdGaugadCgAfgguggaasgsg | 2343 | CCUUCCACCUCGUCAUCCACAAU | 2665 |
| AD-1658034.1 | uscscaccucGfUfCfauccacaauuL96 | 2022 | asdAsuudGudGgaugdAcGfagguggasasg | 2344 | CUUCCACCUCGUCAUCCACAAUG | 2666 |
| AD-1658035.1 | cscsaccucgUfCfAfuccacaauguL96 | 2023 | asdCsaudTgdTggaudGaCfgagguggsasa | 2345 | UUCCACCUCGUCAUCCACAAUGA | 2667 |
| AD-1658036.1 | csasccucguCfAfUfccacaaugauL96 | 2024 | asdTscadTudGuggadTgAfcgaggugsgsa | 2346 | UCCACCUCGUCAUCCACAAUGAG | 2668 |
| AD-1658038.1 | cscsucgucaUfCfCfacaaugagauL96 | 2026 | asdTscudCadTugugdGaUfgacgaggsusg | 2348 | CACCUCGUCAUCCACAAUGAGAG | 2670 |
| AD-1658039.1 | csuscgucauCfCfAfcaaugagaguL96 | 2027 | asdCsucdTcdAuugudGgAfugacgagsgsu | 2349 | ACCUCGUCAUCCACAAUGAGAGU | 2671 |
| AD-1658040.1 | uscsgucaucCfAfCfaaugagaguuL96 | 2028 | asdAscudCudCauugdTgGfaugacgasgsg | 2350 | CCUCGUCAUCCACAAUGAGAGUA | 2672 |
| AD-1658041.1 | csgsucauccAfCfAfaugagaguauL96 | 2029 | asdTsacdTcdTcauudGuGfgaugacgsasg | 2351 | CUCGUCAUCCACAAUGAGAGUAC | 2673 |
| AD-1658042.1 | gsuscauccaCfAfAfugagaguacuL96 | 2030 | asdGsuadCudCucaudTgUfggaugacsgsa | 2352 | UCGUCAUCCACAAUGAGAGUACC | 2674 |
| AD-1658043.1 | uscsauccacAfAfUfgagaguaccuL96 | 2031 | asdGsgudAcdTcucadTuGfuggaugascsg | 2353 | CGUCAUCCACAAUGAGAGUACCU | 2675 |
| AD-1658044.1 | csasuccacaAfUfGfagaguaccuuL96 | 2032 | asdAsggdTadCucucdAuUfguggaugsasc | 2354 | GUCAUCCACAAUGAGAGUACCUG | 2676 |
| AD-1658045.1 | asusccacaaUfGfAfgaguaccuguL96 | 2033 | asdCsagdGudAcucudCaUfuguggausgsa | 2355 | UCAUCCACAAUGAGAGUACCUGU | 1240 |
| AD-1658046.1 | uscscacaauGfAfGfaguaccuguuL96 | 2034 | asdAscadGgdTacucdTcAfuuguggasusg | 2356 | CAUCCACAAUGAGAGUACCUGUG | 2677 |
| AD-1658047.1 | cscsacaaugAfGfAfguaccuguguL96 | 2035 | asdCsacdAgdGuacudCuCfauuguggsasu | 2357 | AUCCACAAUGAGAGUACCUGUGA | 2678 |
| AD-1658048.1 | csascaaugaGfAfGfuaccugugauL96 | 2036 | asdTscadCadGguacdTcUfcauugugsgsa | 2358 | UCCACAAUGAGAGUACCUGUGAG | 2679 |
| AD-1658049.1 | ascsaaugagAfGfUfaccugugaguL96 | 2037 | asdCsucdAcdAgguadCuCfucauugusgsg | 2359 | CCACAAUGAGAGUACCUGUGAGC | 1241 |
| AD-1658050.1 | csasaugagaGfUfAfccugugagcuL96 | 2038 | asdGscudCadCaggudAcUfcucauugsusg | 2360 | CACAAUGAGAGUACCUGUGAGCA | 2680 |
| AD-1658051.1 | asasugagagUfAfCfcugugagcauL96 | 2039 | asdTsgcdTcdAcaggdTaCfucucauusgsu | 2361 | ACAAUGAGAGUACCUGUGAGCAG | 2681 |
| AD-1658052.1 | asusgagaguAfCfCfugugagcaguL96 | 2040 | asdCsugdCudCacagdGuAfcucucaususg | 2362 | CAAUGAGAGUACCUGUGAGCAGC | 2682 |
| AD-1658053.1 | usgsagaguaCfCfUfgugagcagcuL96 | 2041 | asdGscudGcdTcacadGgUfacucucasusu | 2363 | AAUGAGAGUACCUGUGAGCAGCU | 2683 |
| AD-1658054.1 | gsasgaguacCfUfGfugagcagcuuL96 | 2042 | asdAsgcdTgdCucacdAgGfuacucucsasu | 2364 | AUGAGAGUACCUGUGAGCAGCUG | 2684 |
| AD-1658055.1 | asgsaguaccUfGfUfgagcagcuguL96 | 2043 | asdCsagdCudGcucadCaGfguacucuscsa | 2365 | UGAGAGUACCUGUGAGCAGCUGG | 2685 |
| AD-1658056.1 | gsasguaccuGfUfGfagcagcugguL96 | 2044 | asdCscadGcdTgcucdAcAfgguacucsusc | 2366 | GAGAGUACCUGUGAGCAGCUGGC | 2686 |
| AD-1658057.1 | asgsuaccugUfGfAfgcagcuggcuL96 | 2045 | asdGsccdAgdCugcudCaCfagguacuscsu | 2367 | AGAGUACCUGUGAGCAGCUGGCA | 2687 |
| AD-1658058.1 | gsusaccuguGfAfGfcagcuggcauL96 | 2046 | asdTsgcdCadGcugcdTcAfcagguacsusc | 2368 | GAGUACCUGUGAGCAGCUGGCAA | 2688 |
| AD-1658059.1 | usasccugugAfGfCfagcuggcaauL96 | 2047 | asdTsugdCcdAgcugdCuCfacagguascsu | 2369 | AGUACCUGUGAGCAGCUGGCAAA | 2689 |
| AD-1658184.1 | asasuggucgGfGfAfugcuggccauL96 | 2048 | asdTsggdCcdAgcaudCcCfgaccauusgsc | 2370 | GCAAUGGUCGGGAUGCUGGCCAA | 2690 |
| AD-1658185.1 | asusggucggGfAfUfgcuggccaauL96 | 2049 | asdTsugdGcdCagcadTcCfcgaccaususg | 2371 | CAAUGGUCGGGAUGCUGGCCAAC | 2691 |
| AD-1658186.1 | usgsgucgggAfUfGfcuggccaacuL96 | 2050 | asdGsuudGgdCcagcdAuCfccgaccasusu | 2372 | AAUGGUCGGGAUGCUGGCCAACU | 2692 |
| AD-1658187.1 | gsgsucgggaUfGfCfuggccaacuuL96 | 2051 | asdAsgudTgdGccagdCaUfcccgaccsasu | 2373 | AUGGUCGGGAUGCUGGCCAACUU | 2693 |
| AD-1658188.1 | gsuscgggauGfCfUfggccaacuuuL96 | 2052 | asdAsagdTudGgccadGcAfucccgacscsa | 2374 | UGGUCGGGAUGCUGGCCAACUUC | 2694 |
| AD-1658189.1 | uscsgggaugCfUfGfgccaacuucuL96 | 2053 | asdGsaadGudTggccdAgCfaucccgascsc | 2375 | GGUCGGGAUGCUGGCCAACUUCU | 2695 |
| AD-1658190.1 | csgsggaugcUfGfGfccaacuucuuL96 | 2054 | asdAsgadAgdTuggcdCaGfcaucccgsasc | 2376 | GUCGGGAUGCUGGCCAACUUCUU | 2696 |
| AD-1658191.1 | gsgsgaugcuGfGfCfcaacuucuuuL96 | 2055 | asdAsagdAadGuuggdCcAfgcaucccsgsa | 2377 | UCGGGAUGCUGGCCAACUUCUUG | 1257 |
| AD-1658192.1 | gsgsaugcugGfCfCfaacuucuuguL96 | 2056 | asdCsaadGadAguugdGcCfagcauccscsg | 2378 | CGGGAUGCUGGCCAACUUCUUGG | 2697 |
| AD-1658193.1 | gsasugcuggCfCfAfacuucuugguL96 | 2057 | asdCscadAgdAaguudGgCfcagcaucscsc | 2379 | GGGAUGCUGGCCAACUUCUUGGG | 2698 |
| AD-1658196.1 | gscsuggccaAfCfUfucuugggcuuL96 | 2058 | asdAsgcdCcdAagaadGuUfggccagcsasu | 2380 | AUGCUGGCCAACUUCUUGGGCUU | 1258 |
| AD-1658197.1 | csusggccaaCfUfUfcuugggcuuuL96 | 2059 | asdAsagdCcdCaagadAgUfuggccagscsa | 2381 | UGCUGGCCAACUUCUUGGGCUUC | 2699 |
| AD-1658200.1 | gscscaacuuCfUfUfgggcuuccguL96 | 2060 | asdCsggdAadGcccadAgAfaguuggcscsa | 2382 | UGGCCAACUUCUUGGGCUUCCGU | 2700 |
| AD-1658201.1 | cscsaacuucUfUfGfggcuuccguuL96 | 2061 | asdAscgdGadAgcccdAaGfaaguuggscsc | 2383 | GGCCAACUUCUUGGGCUUCCGUA | 2701 |
| AD-1658202.1 | csasacuucuUfGfGfgcuuccguauL96 | 2062 | asdTsacdGgdAagccdCaAfgaaguugsgsc | 2384 | GCCAACUUCUUGGGCUUCCGUAU | 1259 |
| AD-1658203.1 | asascuucuuGfGfGfcuuccguauuL96 | 2063 | asdAsuadCgdGaagcdCcAfagaaguusgsg | 2385 | CCAACUUCUUGGGCUUCCGUAUA | 1260 |
| AD-1658204.1 | ascsuucuugGfGfCfuuccguauauL96 | 2064 | asdTsaudAcdGgaagdCcCfaagaagususg | 2386 | CAACUUCUUGGGCUUCCGUAUAU | 1261 |
| AD-1658205.1 | csusucuuggGfCfUfuccguauauuL96 | 2065 | asdAsuadTadCggaadGcCfcaagaagsusu | 2387 | AACUUCUUGGGCUUCCGUAUAUA | 2702 |
| AD-1658206.1 | ususcuugggCfUfUfccguauauauL96 | 2066 | asdTsaudAudAcggadAgCfccaagaasgsu | 2388 | ACUUCUUGGGCUUCCGUAUAUAU | 2703 |
| AD-1658207.1 | uscsuugggcUfUfCfcguauauauuL96 | 2067 | asdAsuadTadTacggdAaGfcccaagasasg | 2389 | CUUCUUGGGCUUCCGUAUAUAUG | 1262 |
| AD-1658208.1 | csusugggcuUfCfCfguauauauguL96 | 2068 | asdCsaudAudAuacgdGaAfgcccaagsasa | 2390 | UUCUUGGGCUUCCGUAUAUAUGG | 2704 |
| AD-1658209.1 | ususgggcuuCfCfGfuauauaugguL96 | 2069 | asdCscadTadTauacdGgAfagcccaasgsa | 2391 | UCUUGGGCUUCCGUAUAUAUGGC | 1263 |
| AD-1658211.1 | gsgsgcuuccGfUfAfuauauggcauL96 | 2071 | asdTsgcdCadTauaudAcGfgaagcccsasa | 2393 | UUGGGCUUCCGUAUAUAUGGCAU | 2706 |
| AD-1658212.1 | gsgscuuccgUfAfUfauauggcauuL96 | 2072 | asdAsugdCcdAuauadTaCfggaagccscsa | 2394 | UGGGCUUCCGUAUAUAUGGCAUG | 2707 |
| AD-1658213.1 | gscsuuccguAfUfAfuauggcauguL96 | 2073 | asdCsaudGcdCauaudAuAfcggaagcscsc | 2395 | GGGCUUCCGUAUAUAUGGCAUGC | 2708 |
| AD-1658220.1 | usasuauaugGfCfAfugcacaguguL96 | 2074 | asdCsacdTgdTgcaudGcCfauauauascsg | 2396 | CGUAUAUAUGGCAUGCACAGUGA | 2709 |
| AD-1658221.1 | asusauauggCfAfUfgcacagugauL96 | 2075 | asdTscadCudGugcadTgCfcauauausasc | 2397 | GUAUAUAUGGCAUGCACAGUGAG | 2710 |
| AD-1658222.1 | usasuauggcAfUfGfcacagugaguL96 | 2076 | asdCsucdAcdTgugcdAuGfccauauasusa | 2398 | UAUAUAUGGCAUGCACAGUGAGC | 1264 |
| AD-1658223.1 | asusauggcaUfGfCfacagugagcuL96 | 2077 | asdGscudCadCugugdCaUfgccauausasu | 2399 | AUAUAUGGCAUGCACAGUGAGCU | 2711 |
| AD-1658224.1 | usasuggcauGfCfAfcagugagcuuL96 | 2078 | asdAsgcdTcdAcugudGcAfugccauasusa | 2400 | UAUAUGGCAUGCACAGUGAGCUA | 2712 |
| AD-1658225.1 | asusggcaugCfAfCfagugagcuauL96 | 2079 | asdTsagdCudCacugdTgCfaugccausasu | 2401 | AUAUGGCAUGCACAGUGAGCUAU | 2713 |
| AD-1658226.1 | usgsgcaugcAfCfAfgugagcuauuL96 | 2080 | asdAsuadGcdTcacudGuGfcaugccasusa | 2402 | UAUGGCAUGCACAGUGAGCUAUG | 2714 |
| AD-1658227.1 | gsgscaugcaCfAfGfugagcuauguL96 | 2081 | asdCsaudAgdCucacdTgUfgcaugccsasu | 2403 | AUGGCAUGCACAGUGAGCUAUGG | 2715 |
| AD-1658228.1 | gscsaugcacAfGfUfgagcuaugguL96 | 2082 | asdCscadTadGcucadCuGfugcaugcscsa | 2404 | UGGCAUGCACAGUGAGCUAUGGG | 1265 |
| AD-1658242.1 | usgsgcacccUfGfGfccucucucuuL96 | 2083 | asdAsgadGadGaggcdCaGfggugccasasa | 2405 | UUUGGCACCCUGGCCUCUCUCUA | 2716 |
| AD-1658243.1 | gsgscacccuGfGfCfcucucucuauL96 | 2084 | asdTsagdAgdAgaggdCcAfgggugccsasa | 2406 | UUGGCACCCUGGCCUCUCUCUAU | 2717 |
| AD-1658288.1 | gsascaggcuAfCfAfggcaauccuuL96 | 2085 | asdAsggdAudTgccudGuAfgccugucsasg | 2407 | CUGACAGGCUACAGGCAAUCCUG | 1267 |
| AD-1658289.1 | ascsaggcuaCfAfGfgcaauccuguL96 | 2086 | asdCsagdGadTugccdTgUfagccuguscsa | 2408 | UGACAGGCUACAGGCAAUCCUGG | 1268 |
| AD-1658313.1 | ususccuuggAfAfGfgacaagaacuL96 | 2087 | asdGsuudCudTguccdTuCfcaaggaascsa | 2409 | UGUUCCUUGGAAGGACAAGAACU | 2718 |
| AD-1658315.1 | cscsuuggaaGfGfAfcaagaacuguL96 | 2088 | asdCsagdTudCuugudCcUfuccaaggsasa | 2410 | UUCCUUGGAAGGACAAGAACUGC | 1275 |
| AD-1658316.1 | csusuggaagGfAfCfaagaacugcuL96 | 2089 | asdGscadGudTcuugdTcCfuuccaagsgsa | 2411 | UCCUUGGAAGGACAAGAACUGCA | 2719 |
| AD-1658448.2 | csasccugaaGfCfAfgccguuuguuL96 | 2090 | asdAscadAadCggcudGcUfucaggugscsa | 2412 | UGCACCUGAAGCAGCCGUUUGUG | 1276 |
| AD-1658451.2 | csusgaagcaGfCfCfguuugugcauL96 | 2091 | asdTsgcdAcdAaacgdGcUfgcuucagsgsu | 2413 | ACCUGAAGCAGCCGUUUGUGCAG | 2720 |
| AD-1658463.2 | ususugugcaGfGfGfccuggcucuuL96 | 2092 | asdAsgadGcdCaggcdCcUfgcacaaascsg | 2414 | CGUUUGUGCAGGGCCUGGCUCUC | 2721 |
| AD-1658464.2 | ususgugcagGfGfCfcuggcucucuL96 | 2093 | asdGsagdAgdCcaggdCcCfugcacaasasc | 2415 | GUUUGUGCAGGGCCUGGCUCUCU | 2722 |
| AD-1658465.2 | usgsugcaggGfCfCfuggcucucuuL96 | 2094 | asdAsgadGadGccagdGcCfcugcacasasa | 2416 | UUUGUGCAGGGCCUGGCUCUCUA | 2723 |
| AD-1658466.2 | gsusgcagggCfCfUfggcucucuauL96 | 2095 | asdTsagdAgdAgccadGgCfccugcacsasa | 2417 | UUGUGCAGGGCCUGGCUCUCUAU | 2724 |
| AD-1658467.2 | usgscagggcCfUfGfgcucucuauuL96 | 2096 | asdAsuadGadGagccdAgGfcccugcascsa | 2418 | UGUGCAGGGCCUGGCUCUCUAUA | 2725 |
| AD-1658484.2 | ascsgcucucUfGfGfacuucacaguL96 | 2097 | asdCsugdTgdAagucdCaGfagagcgusgsg | 2419 | CCACGCUCUCUGGACUUCACAGA | 2726 |
| AD-1658485.2 | csgscucucuGfGfAfcuucacagauL96 | 2098 | asdTscudGudGaagudCcAfgagagcgsusg | 2420 | CACGCUCUCUGGACUUCACAGAA | 2727 |
| AD-1658519.2 | csusgagaagAfUfUfgacagguucuL96 | 2099 | asdGsaadCcdTgucadAuCfuucucagscsa | 2421 | UGCUGAGAAGAUUGACAGGUUCA | 2728 |
| AD-1658520.2 | usgsagaagaUfUfGfacagguucauL96 | 2100 | asdTsgadAcdCugucdAaUfcuucucasgsc | 2422 | GCUGAGAAGAUUGACAGGUUCAU | 2729 |
| AD-1658521.2 | gsasgaagauUfGfAfcagguucauuL96 | 2101 | asdAsugdAadCcugudCaAfucuucucsasg | 2423 | CUGAGAAGAUUGACAGGUUCAUG | 2730 |
| AD-1658522.2 | asgsaagauuGfAfCfagguucauguL96 | 2102 | asdCsaudGadAccugdTcAfaucuucuscsa | 2424 | UGAGAAGAUUGACAGGUUCAUGC | 2731 |
| AD-1658523.2 | gsasagauugAfCfAfgguucaugcuL96 | 2103 | asdGscadTgdAaccudGuCfaaucuucsusc | 2425 | GAGAAGAUUGACAGGUUCAUGCA | 2732 |
| AD-1658524.2 | asasgauugaCfAfGfguucaugcauL96 | 2104 | asdTsgcdAudGaaccdTgUfcaaucuuscsu | 2426 | AGAAGAUUGACAGGUUCAUGCAG | 2733 |
| AD-1658525.2 | asgsauugacAfGfGfuucaugcaguL96 | 2105 | asdCsugdCadTgaacdCuGfucaaucususc | 2427 | GAAGAUUGACAGGUUCAUGCAGG | 2734 |
| AD-1658526.2 | gsasuugacaGfGfUfucaugcagguL96 | 2106 | asdCscudGcdAugaadCcUfgucaaucsusu | 2428 | AAGAUUGACAGGUUCAUGCAGGC | 2735 |
| AD-1658527.2 | asusugacagGfUfUfcaugcaggcuL96 | 2107 | asdGsccdTgdCaugadAcCfugucaauscsu | 2429 | AGAUUGACAGGUUCAUGCAGGCU | 2736 |
| AD-1658528.2 | ususgacaggUfUfCfaugcaggcuuL96 | 2108 | asdAsgcdCudGcaugdAaCfcugucaasusc | 2430 | GAUUGACAGGUUCAUGCAGGCUG | 2737 |
| AD-1658529.2 | usgsacagguUfCfAfugcaggcuguL96 | 2109 | asdCsagdCcdTgcaudGaAfccugucasasu | 2431 | AUUGACAGGUUCAUGCAGGCUGU | 2738 |
| AD-1658530.2 | gsascagguuCfAfUfgcaggcuguuL96 | 2110 | asdAscadGcdCugcadTgAfaccugucsasa | 2432 | UUGACAGGUUCAUGCAGGCUGUG | 2739 |
| AD-1658531.2 | ascsagguucAfUfGfcaggcuguguL96 | 2111 | asdCsacdAgdCcugcdAuGfaaccuguscsa | 2433 | UGACAGGUUCAUGCAGGCUGUGA | 1287 |
| AD-1658539.2 | asusgcaggcUfGfUfgacaggauguL96 | 2113 | asdCsaudCcdTgucadCaGfccugcausgsa | 2435 | UCAUGCAGGCUGUGACAGGAUGG | 1288 |
| AD-1658541.2 | gscsaggcugUfGfAfcaggauggauL96 | 2114 | asdTsccdAudCcugudCaCfagccugcsasu | 2436 | AUGCAGGCUGUGACAGGAUGGAA | 1289 |
| AD-1658542.2 | csasggcuguGfAfCfaggauggaauL96 | 2115 | asdTsucdCadTccugdTcAfcagccugscsa | 2437 | UGCAGGCUGUGACAGGAUGGAAG | 2741 |
| AD-1658605.2 | gscsuuucaaCfAfCfcuacguccauL96 | 2116 | asdTsggdAcdGuaggdTgUfugaaagcscsa | 2438 | UGGCUUUCAACACCUACGUCCAC | 1292 |
| AD-1658650.2 | gsasguucugGfGfUfggacaacaguL96 | 2117 | asdCsugdTudGuccadCcCfagaacucscsu | 2439 | AGGAGUUCUGGGUGGACAACAGC | 2742 |
| AD-1658661.2 | gsgsacaacaGfCfAfccucaguguuL96 | 2118 | asdAscadCudGaggudGcUfguuguccsasc | 2440 | GUGGACAACAGCACCUCAGUGUC | 1299 |
| AD-1658662.2 | gsascaacagCfAfCfcucagugucuL96 | 2119 | asdGsacdAcdTgaggdTgCfuguugucscsa | 2441 | UGGACAACAGCACCUCAGUGUCU | 1300 |
| AD-1658663.2 | ascsaacagcAfCfCfucagugucuuL96 | 2120 | asdAsgadCadCugagdGuGfcuguuguscsc | 2442 | GGACAACAGCACCUCAGUGUCUG | 2743 |
| AD-1658664.2 | csasacagcaCfCfUfcagugucuguL96 | 2121 | asdCsagdAcdAcugadGgUfgcuguugsusc | 2443 | GACAACAGCACCUCAGUGUCUGU | 1301 |
| AD-1658665.2 | asascagcacCfUfCfagugucuguuL96 | 2122 | asdAscadGadCacugdAgGfugcuguusgsu | 2444 | ACAACAGCACCUCAGUGUCUGUU | 2744 |
| AD-1658801.2 | asusgccucuGfAfCfcuggacaaguL96 | 2123 | asdCsuudGudCcaggdTcAfgaggcausasg | 2445 | CUAUGCCUCUGACCUGGACAAGG | 2745 |
| AD-1658818.2 | asasgguggaGfGfGfucucacuuuuL96 | 2125 | asdAsaadGudGagacdCcUfccaccuusgsu | 2447 | ACAAGGUGGAGGGUCUCACUUUC | 2747 |
| AD-1658819.2 | asgsguggagGfGfUfcucacuuucuL96 | 2126 | asdGsaadAgdTgagadCcCfuccaccususg | 2448 | CAAGGUGGAGGGUCUCACUUUCC | 2748 |
| AD-1658820.2 | gsgsuggaggGfUfCfucacuuuccuL96 | 2127 | asdGsgadAadGugagdAcCfcuccaccsusu | 2449 | AAGGUGGAGGGUCUCACUUUCCA | 2749 |
| AD-1658824.2 | gsasgggucuCfAfCfuuuccagcauL96 | 2129 | asdTsgcdTgdGaaagdTgAfgacccucscsa | 2451 | UGGAGGGUCUCACUUUCCAGCAA | 2750 |
| AD-1658825.2 | asgsggucucAfCfUfuuccagcaauL96 | 2130 | asdTsugdCudGgaaadGuGfagacccuscsc | 2452 | GGAGGGUCUCACUUUCCAGCAAA | 2751 |
| AD-1658827.2 | gsgsucucacUfUfUfccagcaaaauL96 | 2132 | asdTsuudTgdCuggadAaGfugagaccscsu | 2454 | AGGGUCUCACUUUCCAGCAAAAC | 2753 |
| AD-1658828.2 | gsuscucacuUfUfCfcagcaaaacuL96 | 2133 | asdGsuudTudGcuggdAaAfgugagacscsc | 2455 | GGGUCUCACUUUCCAGCAAAACU | 2754 |
| AD-1658829.2 | uscsucacuuUfCfCfagcaaaacuuL96 | 2134 | asdAsgudTudTgcugdGaAfagugagascsc | 2456 | GGUCUCACUUUCCAGCAAAACUC | 2755 |
| AD-1658830.1 | csuscacuuuCfCfAfgcaaaacucuL96 | 2135 | asdGsagdTudTugcudGgAfaagugagsasc | 2457 | GUCUCACUUUCCAGCAAAACUCC | 1319 |
| AD-1658831.1 | uscsacuuucCfAfGfcaaaacuccuL96 | 2136 | asdGsgadGudTuugcdTgGfaaagugasgsa | 2458 | UCUCACUUUCCAGCAAAACUCCC | 2756 |
| AD-1658832.1 | csascuuuccAfGfCfaaaacucccuL96 | 2137 | asdGsggdAgdTuuugdCuGfgaaagugsasg | 2459 | CUCACUUUCCAGCAAAACUCCCU | 2757 |
| AD-1658833.1 | ascsuuuccaGfCfAfaaacucccuuL96 | 2138 | asdAsggdGadGuuuudGcUfggaaagusgsa | 2460 | UCACUUUCCAGCAAAACUCCCUC | 2758 |
| AD-1658834.1 | csusuuccagCfAfAfaacucccucuL96 | 2139 | asdGsagdGgdAguuudTgCfuggaaagsusg | 2461 | CACUUUCCAGCAAAACUCCCUCA | 2759 |
| AD-1658835.1 | ususuccagcAfAfAfacucccucauL96 | 2140 | asdTsgadGgdGaguudTuGfcuggaaasgsu | 2462 | ACUUUCCAGCAAAACUCCCUCAA | 2760 |
| AD-1658836.1 | ususccagcaAfAfAfcucccucaauL96 | 2141 | asdTsugdAgdGgagudTuUfgcuggaasasg | 2463 | CUUUCCAGCAAAACUCCCUCAAC | 2761 |
| AD-1658837.1 | uscscagcaaAfAfCfucccucaacuL96 | 2142 | asdGsuudGadGggagdTuUfugcuggasasa | 2464 | UUUCCAGCAAAACUCCCUCAACU | 2762 |
| AD-1658838.1 | cscsagcaaaAfCfUfcccucaacuuL96 | 2143 | asdAsgudTgdAgggadGuUfuugcuggsasa | 2465 | UUCCAGCAAAACUCCCUCAACUG | 2763 |
| AD-1658839.1 | csasgcaaaaCfUfCfccucaacuguL96 | 2144 | asdCsagdTudGagggdAgUfuuugcugsgsa | 2466 | UCCAGCAAAACUCCCUCAACUGG | 1320 |
| AD-1658840.1 | asgscaaaacUfCfCfcucaacugguL96 | 2145 | asdCscadGudTgaggdGaGfuuuugcusgsg | 2467 | CCAGCAAAACUCCCUCAACUGGA | 1321 |
| AD-1658841.1 | gscsaaaacuCfCfCfucaacuggauL96 | 2146 | asdTsccdAgdTugagdGgAfguuuugcsusg | 2468 | CAGCAAAACUCCCUCAACUGGAU | 2764 |
| AD-1658842.1 | csasaaacucCfCfUfcaacuggauuL96 | 2147 | asdAsucdCadGuugadGgGfaguuuugscsu | 2469 | AGCAAAACUCCCUCAACUGGAUG | 2765 |
| AD-1658843.1 | asasaacuccCfUfCfaacuggauguL96 | 2148 | asdCsaudCcdAguugdAgGfgaguuuusgsc | 2470 | GCAAAACUCCCUCAACUGGAUGA | 1322 |
| AD-1658844.1 | asasacucccUfCfAfacuggaugauL96 | 2149 | asdTscadTcdCaguudGaGfggaguuususg | 2471 | CAAAACUCCCUCAACUGGAUGAA | 2766 |
| AD-1658845.1 | asascucccuCfAfAfcuggaugaauL96 | 2150 | asdTsucdAudCcagudTgAfgggaguususu | 2472 | AAAACUCCCUCAACUGGAUGAAG | 2767 |
| AD-1658846.1 | ascsucccucAfAfCfuggaugaaguL96 | 2151 | asdCsuudCadTccagdTuGfagggagususu | 2473 | AAACUCCCUCAACUGGAUGAAGA | 1323 |
| AD-1658847.1 | csuscccucaAfCfUfggaugaagauL96 | 2152 | asdTscudTcdAuccadGuUfgagggagsusu | 2474 | AACUCCCUCAACUGGAUGAAGAA | 2768 |
| AD-1658848.1 | uscsccucaaCfUfGfgaugaagaauL96 | 2153 | asdTsucdTudCauccdAgUfugagggasgsu | 2475 | ACUCCCUCAACUGGAUGAAGAAA | 2769 |
| AD-1658849.1 | cscscucaacUfGfGfaugaagaaauL96 | 2154 | asdTsuudCudTcaucdCaGfuugagggsasg | 2476 | CUCCCUCAACUGGAUGAAGAAAC | 2770 |
| AD-1658850.1 | csuscaacugGfAfUfgaagaaacuuL96 | 2155 | asdAsgudTudCuucadTcCfaguugagsgsg | 2477 | CCCUCAACUGGAUGAAGAAACUA | 2771 |
| AD-1658875.1 | asgsgaucuuAfUfGfaccugcagguL96 | 2157 | asdCscudGcdAggucdAuAfagauccususg | 2479 | CAAGGAUCUUAUGACCUGCAGGA | 2773 |
| AD-1658880.1 | csusuaugacCfUfGfcaggaccuguL96 | 2158 | asdCsagdGudCcugcdAgGfucauaagsasu | 2480 | AUCUUAUGACCUGCAGGACCUGC | 1329 |
| AD-1658929.1 | csgsagcugaAfCfCfugcaaaaauuL96 | 2159 | asdAsuudTudTgcagdGuUfcagcucgsgsu | 2481 | ACCGAGCUGAACCUGCAAAAAUU | 1330 |
| AD-1658930.1 | gsasgcugaaCfCfUfgcaaaaauuuL96 | 2160 | asdAsaudTudTugcadGgUfucagcucsgsg | 2482 | CCGAGCUGAACCUGCAAAAAUUG | 1331 |
| AD-1658931.1 | asgscugaacCfUfGfcaaaaauuguL96 | 2161 | asdCsaadTudTuugcdAgGfuucagcuscsg | 2483 | CGAGCUGAACCUGCAAAAAUUGA | 1332 |
| AD-1658932.1 | gscsugaaccUfGfCfaaaaauugauL96 | 2162 | asdTscadAudTuuugdCaGfguucagcsusc | 2484 | GAGCUGAACCUGCAAAAAUUGAG | 1333 |
| AD-1658933.1 | csusgaaccuGfCfAfaaaauugaguL96 | 2163 | asdCsucdAadTuuuudGcAfgguucagscsu | 2485 | AGCUGAACCUGCAAAAAUUGAGC | 1334 |
| AD-1658934.1 | usgsaaccugCfAfAfaaauugagcuL96 | 2164 | asdGscudCadAuuuudTgCfagguucasgsc | 2486 | GCUGAACCUGCAAAAAUUGAGCA | 1335 |
| AD-1658935.1 | gsasaccugcAfAfAfaauugagcauL96 | 2165 | asdTsgcdTcdAauuudTuGfcagguucsasg | 2487 | CUGAACCUGCAAAAAUUGAGCAA | 2774 |
| AD-1658936.1 | asasccugcaAfAfAfauugagcaauL96 | 3286 | asdTsugdCudCaauudTuUfgcagguuscsa | 3560 | UGAACCUGCAAAAAUUGAGCAAU | 3655 |
| AD-1658937.1 | ascscugcaaAfAfAfuugagcaauuL96 | 3287 | asdAsuudGcdTcaaudTuUfugcaggususc | 3561 | GAACCUGCAAAAAUUGAGCAAUG | 3656 |
| AD-1658938.1 | cscsugcaaaAfAfUfugagcaauguL96 | 3288 | asdCsaudTgdCucaadTuUfuugcaggsusu | 3562 | AACCUGCAAAAAUUGAGCAAUGA | 3657 |
| AD-1658939.1 | csusgcaaaaAfUfUfgagcaaugauL96 | 3289 | asdTscadTudGcucadAuUfuuugcagsgsu | 3563 | ACCUGCAAAAAUUGAGCAAUGAC | 3658 |
| AD-1658940.1 | usgscaaaaaUfUfGfagcaaugacuL96 | 2166 | asdGsucdAudTgcucdAaUfuuuugcasgsg | 2488 | CCUGCAAAAAUUGAGCAAUGACC | 1336 |
| AD-1658954.1 | gsasggugcuGfAfAfcagcauuuuuL96 | 2167 | asdAsaadAudGcugudTcAfgcaccucscsc | 2489 | GGGAGGUGCUGAACAGCAUUUUU | 1341 |
| AD-1658955.1 | asgsgugcugAfAfCfagcauuuuuuL96 | 2168 | asdAsaadAadTgcugdTuCfagcaccuscsc | 2490 | GGAGGUGCUGAACAGCAUUUUUU | 2775 |
| AD-1658956.1 | gsgsugcugaAfCfAfgcauuuuuuuL96 | 2169 | asdAsaadAadAugcudGuUfcagcaccsusc | 2491 | GAGGUGCUGAACAGCAUUUUUUU | 2776 |
| AD-1658957.1 | gsusgcugaaCfAfGfcauuuuuuuuL96 | 2170 | asdAsaadAadAaugcdTgUfucagcacscsu | 2492 | AGGUGCUGAACAGCAUUUUUUUU | 2777 |
| AD-1658958.1 | usgscugaacAfGfCfauuuuuuuuuL96 | 2171 | asdAsaadAadAaaugdCuGfuucagcascsc | 2493 | GGUGCUGAACAGCAUUUUUUUUG | 2778 |
| AD-1658959.1 | gscsugaacaGfCfAfuuuuuuuuguL96 | 2172 | asdCsaadAadAaaaudGcUfguucagcsasc | 2494 | GUGCUGAACAGCAUUUUUUUUGA | 2779 |
| AD-1658960.1 | csusgaacagCfAfUfuuuuuuugauL96 | 2173 | asdTscadAadAaaaadTgCfuguucagscsa | 2495 | UGCUGAACAGCAUUUUUUUUGAG | 2780 |
| AD-1658992.1 | usgsagagagAfGfCfccacagaguuL96 | 2174 | asdAscudCudGugggdCuCfucucucasusc | 2496 | GAUGAGAGAGAGCCCACAGAGUC | 2781 |
| AD-1658994.1 | asgsagagagCfCfCfacagagucuuL96 | 2175 | asdAsgadCudCugugdGgCfucucucuscsa | 2497 | UGAGAGAGAGCCCACAGAGUCUA | 2782 |
| AD-1658995.1 | gsasgagagcCfCfAfcagagucuauL96 | 2176 | asdTsagdAcdTcugudGgGfcucucucsusc | 2498 | GAGAGAGAGCCCACAGAGUCUAC | 2783 |
| AD-1659055.1 | gsasaccgccCfAfUfuccuguuuguL96 | 2177 | asdCsaadAcdAggaadTgGfgcgguucsasg | 2499 | CUGAACCGCCCAUUCCUGUUUGC | 2784 |
| AD-1659056.1 | asasccgcccAfUfUfccuguuugcuL96 | 2178 | asdGscadAadCaggadAuGfggcgguuscsa | 2500 | UGAACCGCCCAUUCCUGUUUGCU | 1354 |
| AD-1659057.1 | ascscgcccaUfUfCfcuguuugcuuL96 | 2179 | asdAsgcdAadAcaggdAaUfgggcggususc | 2501 | GAACCGCCCAUUCCUGUUUGCUG | 1355 |
| AD-1659058.1 | cscsgcccauUfCfCfuguuugcuguL96 | 2180 | asdCsagdCadAacagdGaAfugggcggsusu | 2502 | AACCGCCCAUUCCUGUUUGCUGU | 1356 |
| AD-1659059.1 | csgscccauuCfCfUfguuugcuguuL96 | 2181 | asdAscadGcdAaacadGgAfaugggcgsgsu | 2503 | ACCGCCCAUUCCUGUUUGCUGUG | 1357 |
| AD-1659060.1 | gscsccauucCfUfGfuuugcuguguL96 | 2182 | asdCsacdAgdCaaacdAgGfaaugggcsgsg | 2504 | CCGCCCAUUCCUGUUUGCUGUGU | 2785 |
| AD-1659061.1 | cscscauuccUfGfUfuugcuguguuL96 | 2183 | asdAscadCadGcaaadCaGfgaaugggscsg | 2505 | CGCCCAUUCCUGUUUGCUGUGUA | 2786 |
| AD-1659062.1 | cscsauuccuGfUfUfugcuguguauL96 | 2184 | asdTsacdAcdAgcaadAcAfggaauggsgsc | 2506 | GCCCAUUCCUGUUUGCUGUGUAU | 2787 |
| AD-1659063.1 | csasuuccugUfUfUfgcuguguauuL96 | 2185 | asdAsuadCadCagcadAaCfaggaaugsgsg | 2507 | CCCAUUCCUGUUUGCUGUGUAUG | 2788 |
| AD-1659064.1 | asusuccuguUfUfGfcuguguauguL96 | 2186 | asdCsaudAcdAcagcdAaAfcaggaausgsg | 2508 | CCAUUCCUGUUUGCUGUGUAUGA | 1358 |
| AD-1659065.1 | ususccuguuUfGfCfuguguaugauL96 | 2187 | asdTscadTadCacagdCaAfacaggaasusg | 2509 | CAUUCCUGUUUGCUGUGUAUGAU | 2789 |
| AD-1659066.1 | uscscuguuuGfCfUfguguaugauuL96 | 2188 | asdAsucdAudAcacadGcAfaacaggasasu | 2510 | AUUCCUGUUUGCUGUGUAUGAUC | 1359 |
| AD-1659067.1 | cscsuguuugCfUfGfuguaugaucuL96 | 2189 | asdGsaudCadTacacdAgCfaaacaggsasa | 2511 | UUCCUGUUUGCUGUGUAUGAUCA | 2790 |
| AD-1659068.1 | csusguuugcUfGfUfguaugaucauL96 | 2190 | asdTsgadTcdAuacadCaGfcaaacagsgsa | 2512 | UCCUGUUUGCUGUGUAUGAUCAA | 2791 |
| AD-1659069.1 | usgsuuugcuGfUfGfuaugaucaauL96 | 2191 | asdTsugdAudCauacdAcAfgcaaacasgsg | 2513 | CCUGUUUGCUGUGUAUGAUCAAA | 2792 |
| AD-1659070.1 | gsusuugcugUfGfUfaugaucaaauL96 | 2192 | asdTsuudGadTcauadCaCfagcaaacsasg | 2514 | CUGUUUGCUGUGUAUGAUCAAAG | 2793 |
| AD-1659071.1 | ususugcuguGfUfAfugaucaaaguL96 | 2193 | asdCsuudTgdAucaudAcAfcagcaaascsa | 2515 | UGUUUGCUGUGUAUGAUCAAAGC | 2794 |
| AD-1659162.1 | gsuscucccaCfCfUfuuucuucuauL96 | 2195 | asdTsagdAadGaaaadGgUfgggagacsusg | 2517 | CAGUCUCCCACCUUUUCUUCUAA | 2796 |
| AD-1659163.1 | csuscccaccUfUfUfucuucuaauuL96 | 2196 | asdAsuudAgdAagaadAaGfgugggagsasc | 2518 | GUCUCCCACCUUUUCUUCUAAUG | 1366 |
| AD-1659164.1 | uscsccaccuUfUfUfcuucuaauguL96 | 2197 | asdCsaudTadGaagadAaAfggugggasgsa | 2519 | UCUCCCACCUUUUCUUCUAAUGA | 1367 |
| AD-1659165.1 | cscscaccuuUfUfCfuucuaaugauL96 | 2198 | asdTscadTudAgaagdAaAfaggugggsasg | 2520 | CUCCCACCUUUUCUUCUAAUGAG | 1368 |
| AD-1659166.1 | cscsaccuuuUfCfUfucuaaugaguL96 | 2199 | asdCsucdAudTagaadGaAfaagguggsgsa | 2521 | UCCCACCUUUUCUUCUAAUGAGU | 2797 |
| AD-1659167.1 | csasccuuuuCfUfUfcuaaugaguuL96 | 2200 | asdAscudCadTuagadAgAfaaaggugsgsg | 2522 | CCCACCUUUUCUUCUAAUGAGUC | 2798 |
| AD-1659168.1 | ascscuuuucUfUfCfuaaugagucuL96 | 2201 | asdGsacdTcdAuuagdAaGfaaaaggusgsg | 2523 | CCACCUUUUCUUCUAAUGAGUCG | 2799 |
| AD-1659208.1 | cscsguuucuCfCfUfuggucuaaguL96 | 2202 | asdCsuudAgdAccaadGgAfgaaacggscsu | 2524 | AGCCGUUUCUCCUUGGUCUAAGU | 2800 |
| AD-1659209.1 | csgsuuucucCfUfUfggucuaaguuL96 | 2203 | asdAscudTadGaccadAgGfagaaacgsgsc | 2525 | GCCGUUUCUCCUUGGUCUAAGUG | 1387 |
| AD-1659210.1 | gsusuucuccUfUfGfgucuaaguguL96 | 2204 | asdCsacdTudAgaccdAaGfgagaaacsgsg | 2526 | CCGUUUCUCCUUGGUCUAAGUGU | 1388 |
| AD-1659282.1 | gsusuugcugGfGfUfuuauuuuaguL96 | 2205 | asdCsuadAadAuaaadCcCfagcaaacsusg | 2527 | CAGUUUGCUGGGUUUAUUUUAGA | 1407 |
| AD-1659283.1 | ususugcuggGfUfUfuauuuuagauL96 | 2206 | asdTscudAadAauaadAcCfcagcaaascsu | 2528 | AGUUUGCUGGGUUUAUUUUAGAG | 1408 |
| AD-1659284.1 | ususgcugggUfUfUfauuuuagaguL96 | 2207 | asdCsucdTadAaauadAaCfccagcaasasc | 2529 | GUUUGCUGGGUUUAUUUUAGAGA | 1409 |
| AD-1659285.1 | usgscuggguUfUfAfuuuuagagauL96 | 2208 | asdTscudCudAaaaudAaAfcccagcasasa | 2530 | UUUGCUGGGUUUAUUUUAGAGAA | 1410 |
| AD-1659286.1 | gscsuggguuUfAfUfuuuagagaauL96 | 2209 | asdTsucdTcdTaaaadTaAfacccagcsasa | 2531 | UUGCUGGGUUUAUUUUAGAGAAU | 2801 |
| AD-1659287.1 | csusggguuuAfUfUfuuagagaauuL96 | 2210 | asdAsuudCudCuaaadAuAfaacccagscsa | 2532 | UGCUGGGUUUAUUUUAGAGAAUG | 2802 |
| AD-1659288.1 | usgsgguuuaUfUfUfuagagaauguL96 | 2211 | asdCsaudTcdTcuaadAaUfaaacccasgsc | 2533 | GCUGGGUUUAUUUUAGAGAAUGG | 2803 |
| AD-1659289.1 | gsgsguuuauUfUfUfagagaaugguL96 | 2212 | asdCscadTudCucuadAaAfuaaacccsasg | 2534 | CUGGGUUUAUUUUAGAGAAUGGG | 1411 |
| AD-1659290.1 | gsasggcaagAfAfCfcaguguuuauL96 | 2213 | asdTsaadAcdAcuggdTuCfuugccucscsc | 2535 | GGGAGGCAAGAACCAGUGUUUAG | 2804 |
| AD-1659291.1 | asgsgcaagaAfCfCfaguguuuaguL96 | 2214 | asdCsuadAadCacugdGuUfcuugccuscsc | 2536 | GGAGGCAAGAACCAGUGUUUAGC | 1414 |
| AD-1659292.1 | gsgscaagaaCfCfAfguguuuagcuL96 | 2215 | asdGscudAadAcacudGgUfucuugccsusc | 2537 | GAGGCAAGAACCAGUGUUUAGCG | 1415 |
| AD-1659293.1 | gscsaagaacCfAfGfuguuuagcguL96 | 2216 | asdCsgcdTadAacacdTgGfuucuugcscsu | 2538 | AGGCAAGAACCAGUGUUUAGCGC | 2805 |
| AD-1659294.1 | csasagaaccAfGfUfguuuagcgcuL96 | 2217 | asdGscgdCudAaacadCuGfguucuugscsc | 2539 | GGCAAGAACCAGUGUUUAGCGCG | 2806 |
| AD-1659295.1 | asasgaaccaGfUfGfuuuagcgcguL96 | 2218 | asdCsgcdGcdTaaacdAcUfgguucuusgsc | 2540 | GCAAGAACCAGUGUUUAGCGCGG | 2807 |
| AD-1659296.1 | asgsaaccagUfGfUfuuagcgcgguL96 | 2219 | asdCscgdCgdCuaaadCaCfugguucususg | 2541 | CAAGAACCAGUGUUUAGCGCGGG | 2808 |
| AD-1659297.1 | gsasaccaguGfUfUfuagcgcggguL96 | 2220 | asdCsccdGcdGcuaadAcAfcugguucsusu | 2542 | AAGAACCAGUGUUUAGCGCGGGA | 2809 |
| AD-1659298.1 | asasccagugUfUfUfagcgcgggauL96 | 2221 | asdTsccdCgdCgcuadAaCfacugguuscsu | 2543 | AGAACCAGUGUUUAGCGCGGGAC | 2810 |
| AD-1659321.1 | csusguuccaAfAfAfagaauuccauL96 | 2222 | asdTsggdAadTucuudTuUfggaacagsusa | 2544 | UACUGUUCCAAAAAGAAUUCCAA | 1419 |
| AD-1659323.1 | gsusuccaaaAfAfGfaauuccaacuL96 | 2224 | asdGsuudGgdAauucdTuUfuuggaacsasg | 2546 | CUGUUCCAAAAAGAAUUCCAACC | 2812 |
| AD-1659325.1 | uscscaaaaaGfAfAfuuccaaccguL96 | 2225 | asdCsggdTudGgaaudTcUfuuuuggasasc | 2547 | GUUCCAAAAAGAAUUCCAACCGA | 2813 |
| AD-1659326.1 | cscsaaaaagAfAfUfuccaaccgauL96 | 2226 | asdTscgdGudTggaadTuCfuuuuuggsasa | 2548 | UUCCAAAAAGAAUUCCAACCGAC | 2814 |
| AD-1659327.1 | csasaaaagaAfUfUfccaaccgacuL96 | 2227 | asdGsucdGgdTuggadAuUfcuuuuugsgsa | 2549 | UCCAAAAAGAAUUCCAACCGACC | 1420 |
| AD-1659328.1 | asasaaagaaUfUfCfcaaccgaccuL96 | 2228 | asdGsgudCgdGuuggdAaUfucuuuuusgsg | 2550 | CCAAAAAGAAUUCCAACCGACCA | 2815 |
| AD-1659329.1 | asasaagaauUfCfCfaaccgaccauL96 | 2229 | asdTsggdTcdGguugdGaAfuucuuuususg | 2551 | CAAAAAGAAUUCCAACCGACCAG | 2816 |
| AD-1659330.1 | asasagaauuCfCfAfaccgaccaguL96 | 2230 | asdCsugdGudCgguudGgAfauucuuususu | 2552 | AAAAAGAAUUCCAACCGACCAGC | 2817 |
| AD-1659331.1 | asasgaauucCfAfAfccgaccagcuL96 | 2231 | asdGscudGgdTcggudTgGfaauucuususu | 2553 | AAAAGAAUUCCAACCGACCAGCU | 2818 |
| AD-1659332.1 | asgsaauuccAfAfCfcgaccagcuuL96 | 2232 | asdAsgcdTgdGucggdTuGfgaauucususu | 2554 | AAAGAAUUCCAACCGACCAGCUU | 2819 |
| AD-1659333.1 | gsasauuccaAfCfCfgaccagcuuuL96 | 2233 | asdAsagdCudGgucgdGuUfggaauucsusu | 2555 | AAGAAUUCCAACCGACCAGCUUG | 2820 |
| AD-1659334.1 | asasuuccaaCfCfGfaccagcuuguL96 | 2234 | asdCsaadGcdTggucdGgUfuggaauuscsu | 2556 | AGAAUUCCAACCGACCAGCUUGU | 2821 |
| AD-1659335.1 | asusuccaacCfGfAfccagcuuguuL96 | 2235 | asdAscadAgdCuggudCgGfuuggaaususc | 2557 | GAAUUCCAACCGACCAGCUUGUU | 2822 |
| AD-1659336.1 | ususccaaccGfAfCfcagcuuguuuL96 | 2236 | asdAsacdAadGcuggdTcGfguuggaasusu | 2558 | AAUUCCAACCGACCAGCUUGUUU | 2823 |
| AD-1659337.1 | uscscaaccgAfCfCfagcuuguuuuL96 | 2237 | asdAsaadCadAgcugdGuCfgguuggasasu | 2559 | AUUCCAACCGACCAGCUUGUUUG | 2824 |
| AD-1659338.1 | cscsaaccgaCfCfAfgcuuguuuguL96 | 2238 | asdCsaadAcdAagcudGgUfcgguuggsasa | 2560 | UUCCAACCGACCAGCUUGUUUGU | 2825 |
| AD-1659339.1 | csasaccgacCfAfGfcuuguuuguuL96 | 2239 | asdAscadAadCaagcdTgGfucgguugsgsa | 2561 | UCCAACCGACCAGCUUGUUUGUG | 2826 |
| AD-1659340.1 | asasccgaccAfGfCfuuguuuguguL96 | 2240 | asdCsacdAadAcaagdCuGfgucgguusgsg | 2562 | CCAACCGACCAGCUUGUUUGUGA | 2827 |
| AD-1659341.1 | ascscgaccaGfCfUfuguuugugauL96 | 2241 | asdTscadCadAacaadGcUfggucggususg | 2563 | CAACCGACCAGCUUGUUUGUGAA | 1421 |
| AD-1659342.1 | cscsgaccagCfUfUfguuugugaauL96 | 2242 | asdTsucdAcdAaacadAgCfuggucggsusu | 2564 | AACCGACCAGCUUGUUUGUGAAA | 2828 |
| AD-1659343.1 | csgsaccagcUfUfGfuuugugaaauL96 | 2243 | asdTsuudCadCaaacdAaGfcuggucgsgsu | 2565 | ACCGACCAGCUUGUUUGUGAAAC | 2829 |
| AD-1659344.1 | gsasccagcuUfGfUfuugugaaacuL96 | 2244 | asdGsuudTcdAcaaadCaAfgcuggucsgsg | 2566 | CCGACCAGCUUGUUUGUGAAACA | 2830 |
| AD-1659345.1 | ascscagcuuGfUfUfugugaaacauL96 | 2245 | asdTsgudTudCacaadAcAfagcugguscsg | 2567 | CGACCAGCUUGUUUGUGAAACAA | 2831 |
| AD-1659346.1 | cscsagcuugUfUfUfgugaaacaauL96 | 2246 | asdTsugdTudTcacadAaCfaagcuggsusc | 2568 | GACCAGCUUGUUUGUGAAACAAA | 2832 |
| AD-1659347.1 | csasgcuuguUfUfGfugaaacaaauL96 | 2247 | asdTsuudGudTucacdAaAfcaagcugsgsu | 2569 | ACCAGCUUGUUUGUGAAACAAAA | 2833 |
| AD-1659348.1 | asgscuuguuUfGfUfgaaacaaaauL96 | 2248 | asdTsuudTgdTuucadCaAfacaagcusgsg | 2570 | CCAGCUUGUUUGUGAAACAAAAA | 2834 |
| AD-1659349.1 | gscsuuguuuGfUfGfaaacaaaaauL96 | 3290 | asdTsuudTudGuuucdAcAfaacaagcsusg | 3564 | CAGCUUGUUUGUGAAACAAAAAA | 3659 |
| AD-1659350.1 | csusuguuugUfGfAfaacaaaaaauL96 | 2249 | asdTsuudTudTguuudCaCfaaacaagscsu | 2571 | AGCUUGUUUGUGAAACAAAAAAG | 2835 |
| AD-1659351.1 | ususguuuguGfAfAfacaaaaaaguL96 | 2250 | asdCsuudTudTuguudTcAfcaaacaasgsc | 2572 | GCUUGUUUGUGAAACAAAAAAGU | 2836 |
| AD-1659371.1 | usgsuucccuUfUfUfcaaguugaguL96 | 2251 | asdCsucdAadCuugadAaAfgggaacascsu | 2573 | AGUGUUCCCUUUUCAAGUUGAGA | 1425 |
| AD-1659372.1 | gsusucccuuUfUfCfaaguugagauL96 | 2252 | asdTscudCadAcuugdAaAfagggaacsasc | 2574 | GUGUUCCCUUUUCAAGUUGAGAA | 1426 |
| AD-1659373.1 | ususcccuuuUfCfAfaguugagaauL96 | 2253 | asdTsucdTcdAacuudGaAfaagggaascsa | 2575 | UGUUCCCUUUUCAAGUUGAGAAC | 2837 |
| AD-1659382.1 | csasaguugaGfAfAfcaaaaauuguL96 | 2254 | asdCsaadTudTuugudTcUfcaacuugsasa | 2576 | UUCAAGUUGAGAACAAAAAUUGG | 1427 |
| AD-1659383.1 | asasguugagAfAfCfaaaaauugguL96 | 2255 | asdCscadAudTuuugdTuCfucaacuusgsa | 2577 | UCAAGUUGAGAACAAAAAUUGGG | 1428 |
| AD-1659384.1 | asgsuugagaAfCfAfaaaauuggguL96 | 2256 | asdCsccdAadTuuuudGuUfcucaacususg | 2578 | CAAGUUGAGAACAAAAAUUGGGU | 1529 |
| AD-1659385.1 | gsusugagaaCfAfAfaaauuggguuL96 | 2257 | asdAsccdCadAuuuudTgUfucucaacsusu | 2579 | AAGUUGAGAACAAAAAUUGGGUU | 1429 |
| AD-1659386.1 | ususgagaacAfAfAfaauuggguuuL96 | 2258 | asdAsacdCcdAauuudTuGfuucucaascsu | 2580 | AGUUGAGAACAAAAAUUGGGUUU | 1430 |
| AD-1659387.1 | usgsagaacaAfAfAfauuggguuuuL96 | 2259 | asdAsaadCcdCaauudTuUfguucucasasc | 2581 | GUUGAGAACAAAAAUUGGGUUUU | 1431 |
| AD-1659388.1 | gsasgaacaaAfAfAfuuggguuuuuL96 | 2260 | asdAsaadAcdCcaaudTuUfuguucucsasa | 2582 | UUGAGAACAAAAAUUGGGUUUUA | 1432 |
| AD-1659389.1 | asgsaacaaaAfAfUfuggguuuuauL96 | 2261 | asdTsaadAadCccaadTuUfuuguucuscsa | 2583 | UGAGAACAAAAAUUGGGUUUUAA | 1433 |
| AD-1659390.1 | gsasacaaaaAfUfUfggguuuuaauL96 | 2262 | asdTsuadAadAcccadAuUfuuuguucsusc | 2584 | GAGAACAAAAAUUGGGUUUUAAA | 1434 |
| AD-1659399.1 | asgsuauacaUfUfUfuugcauugcuL96 | 2264 | asdGscadAudGcaaadAaUfguauacususu | 2586 | AAAGUAUACAUUUUUGCAUUGCC | 2839 |
| AD-1659400.1 | gsusauacauUfUfUfugcauugccuL96 | 2265 | asdGsgcdAadTgcaadAaAfuguauacsusu | 2587 | AAGUAUACAUUUUUGCAUUGCCU | 1435 |
| AD-1659401.1 | usasuacauuUfUfUfgcauugccuuL96 | 2266 | asdAsggdCadAugcadAaAfauguauascsu | 2588 | AGUAUACAUUUUUGCAUUGCCUU | 2840 |
| AD-1659402.1 | asusacauuuUfUfGfcauugccuuuL96 | 2267 | asdAsagdGcdAaugcdAaAfaauguausasc | 2589 | GUAUACAUUUUUGCAUUGCCUUC | 1436 |
| AD-1659406.1 | asusuuuugcAfUfUfgccuucgguuL96 | 2269 | asdAsccdGadAggcadAuGfcaaaaausgsu | 2591 | ACAUUUUUGCAUUGCCUUCGGUU | 1438 |
| AD-1659407.1 | ususuuugcaUfUfGfccuucgguuuL96 | 2270 | asdAsacdCgdAaggcdAaUfgcaaaaasusg | 2592 | CAUUUUUGCAUUGCCUUCGGUUU | 1439 |
| AD-1659408.1 | ususuugcauUfGfCfcuucgguuuuL96 | 2271 | asdAsaadCcdGaaggdCaAfugcaaaasasu | 2593 | AUUUUUGCAUUGCCUUCGGUUUG | 1440 |
| AD-1659409.1 | ususugcauuGfCfCfuucgguuuguL96 | 2272 | asdCsaadAcdCgaagdGcAfaugcaaasasa | 2594 | UUUUUGCAUUGCCUUCGGUUUGU | 1441 |
| AD-1659410.1 | ususgcauugCfCfUfucgguuuguuL96 | 2273 | asdAscadAadCcgaadGgCfaaugcaasasa | 2595 | UUUUGCAUUGCCUUCGGUUUGUA | 1442 |
| AD-1659411.1 | usgscauugcCfUfUfcgguuuguauL96 | 2274 | asdTsacdAadAccgadAgGfcaaugcasasa | 2596 | UUUGCAUUGCCUUCGGUUUGUAU | 1443 |
| AD-1659412.1 | gscsauugccUfUfCfgguuuguauuL96 | 2275 | asdAsuadCadAaccgdAaGfgcaaugcsasa | 2597 | UUGCAUUGCCUUCGGUUUGUAUU | 1444 |
| AD-1659413.1 | csasuugccuUfCfGfguuuguauuuL96 | 2276 | asdAsaudAcdAaaccdGaAfggcaaugscsa | 2598 | UGCAUUGCCUUCGGUUUGUAUUU | 1445 |
| AD-1659414.1 | asusugccuuCfGfGfuuuguauuuuL96 | 2277 | asdAsaadTadCaaacdCgAfaggcaausgsc | 2599 | GCAUUGCCUUCGGUUUGUAUUUA | 1446 |
| AD-1659415.1 | ususgccuucGfGfUfuuguauuuauL96 | 2278 | asdTsaadAudAcaaadCcGfaaggcaasusg | 2600 | CAUUGCCUUCGGUUUGUAUUUAG | 1447 |
| AD-1659416.1 | usgsccuucgGfUfUfuguauuuaguL96 | 2279 | asdCsuadAadTacaadAcCfgaaggcasasu | 2601 | AUUGCCUUCGGUUUGUAUUUAGU | 1448 |
| AD-1659417.1 | gscscuucggUfUfUfguauuuaguuL96 | 2280 | asdAscudAadAuacadAaCfcgaaggcsasa | 2602 | UUGCCUUCGGUUUGUAUUUAGUG | 1449 |
| AD-1659418.1 | cscsuucgguUfUfGfuauuuaguguL96 | 2281 | asdCsacdTadAauacdAaAfccgaaggscsa | 2603 | UGCCUUCGGUUUGUAUUUAGUGU | 1450 |
| AD-1659419.1 | csusucgguuUfGfUfauuuaguguuL96 | 2282 | asdAscadCudAaauadCaAfaccgaagsgsc | 2604 | GCCUUCGGUUUGUAUUUAGUGUC | 1451 |
| AD-1659420.1 | ususcgguuuGfUfAfuuuagugucuL96 | 2283 | asdGsacdAcdTaaaudAcAfaaccgaasgsg | 2605 | CCUUCGGUUUGUAUUUAGUGUCU | 2841 |
| AD-1659421.1 | uscsgguuugUfAfUfuuagugucuuL96 | 2284 | asdAsgadCadCuaaadTaCfaaaccgasasg | 2606 | CUUCGGUUUGUAUUUAGUGUCUU | 2842 |
| AD-1659422.1 | csgsguuuguAfUfUfuagugucuuuL96 | 2285 | asdAsagdAcdAcuaadAuAfcaaaccgsasa | 2607 | UUCGGUUUGUAUUUAGUGUCUUG | 2843 |
| AD-1659423.1 | gsgsuuuguaUfUfUfagugucuuguL96 | 2286 | asdCsaadGadCacuadAaUfacaaaccsgsa | 2608 | UCGGUUUGUAUUUAGUGUCUUGA | 1452 |
| AD-1659424.1 | gsusuuguauUfUfAfgugucuugauL96 | 2287 | asdTscadAgdAcacudAaAfuacaaacscsg | 2609 | CGGUUUGUAUUUAGUGUCUUGAA | 2844 |
| AD-1659425.1 | ususuguauuUfAfGfugucuugaauL96 | 2288 | asdTsucdAadGacacdTaAfauacaaascsc | 2610 | GGUUUGUAUUUAGUGUCUUGAAU | 2845 |
| AD-1659426.1 | ususguauuuAfGfUfgucuugaauuL96 | 2289 | asdAsuudCadAgacadCuAfaauacaasasc | 2611 | GUUUGUAUUUAGUGUCUUGAAUG | 2846 |
| AD-1659427.1 | usgsuauuuaGfUfGfucuugaauguL96 | 2290 | asdCsaudTcdAagacdAcUfaaauacasasa | 2612 | UUUGUAUUUAGUGUCUUGAAUGU | 1453 |
| AD-1659428.1 | gsusauuuagUfGfUfcuugaauguuL96 | 2291 | asdAscadTudCaagadCaCfuaaauacsasa | 2613 | UUGUAUUUAGUGUCUUGAAUGUA | 2847 |
| AD-1659429.1 | usasuuuaguGfUfCfuugaauguauL96 | 2292 | asdTsacdAudTcaagdAcAfcuaaauascsa | 2614 | UGUAUUUAGUGUCUUGAAUGUAA | 1454 |
| AD-1659430.1 | asusuuagugUfCfUfugaauguaauL96 | 2293 | asdTsuadCadTucaadGaCfacuaaausasc | 2615 | GUAUUUAGUGUCUUGAAUGUAAG | 2848 |
| AD-1659431.1 | ususuaguguCfUfUfgaauguaaguL96 | 2294 | asdCsuudAcdAuucadAgAfcacuaaasusa | 2616 | UAUUUAGUGUCUUGAAUGUAAGA | 1455 |
| AD-1659432.1 | ususagugucUfUfGfaauguaagauL96 | 2295 | asdTscudTadCauucdAaGfacacuaasasu | 2617 | AUUUAGUGUCUUGAAUGUAAGAA | 2849 |
| AD-1659433.1 | usasgugucuUfGfAfauguaagaauL96 | 2296 | asdTsucdTudAcauudCaAfgacacuasasa | 2618 | UUUAGUGUCUUGAAUGUAAGAAC | 2850 |
| AD-1659434.1 | asgsugucuuGfAfAfuguaagaacuL96 | 2297 | asdGsuudCudTacaudTcAfagacacusasa | 2619 | UUAGUGUCUUGAAUGUAAGAACA | 2851 |
| AD-1659436.1 | usgsucuugaAfUfGfuaagaacauuL96 | 2298 | asdAsugdTudCuuacdAuUfcaagacascsu | 2620 | AGUGUCUUGAAUGUAAGAACAUG | 2852 |
| AD-1659437.1 | gsuscuugaaUfGfUfaagaacauguL96 | 2299 | asdCsaudGudTcuuadCaUfucaagacsasc | 2621 | GUGUCUUGAAUGUAAGAACAUGA | 1456 |
| AD-1659440.1 | ususgaauguAfAfGfaacaugaccuL96 | 2300 | asdGsgudCadTguucdTuAfcauucaasgsa | 2622 | UCUUGAAUGUAAGAACAUGACCU | 2853 |
| AD-1659446.1 | gsusaagaacAfUfGfaccuccguguL96 | 2301 | asdCsacdGgdAggucdAuGfuucuuacsasu | 2623 | AUGUAAGAACAUGACCUCCGUGU | 1457 |
| AD-1659447.1 | usasagaacaUfGfAfccuccguguuL96 | 2302 | asdAscadCgdGaggudCaUfguucuuascsa | 2624 | UGUAAGAACAUGACCUCCGUGUA | 1458 |
| AD-1659448.1 | asasgaacauGfAfCfcuccguguauL96 | 2303 | asdTsacdAcdGgaggdTcAfuguucuusasc | 2625 | GUAAGAACAUGACCUCCGUGUAG | 1459 |
| AD-1659449.1 | asgsaacaugAfCfCfuccguguaguL96 | 2304 | asdCsuadCadCggagdGuCfauguucususa | 2626 | UAAGAACAUGACCUCCGUGUAGU | 1460 |
| AD-1659450.1 | gsasacaugaCfCfUfccguguaguuL96 | 2305 | asdAscudAcdAcggadGgUfcauguucsusu | 2627 | AAGAACAUGACCUCCGUGUAGUG | 1461 |
| AD-1659451.1 | asascaugacCfUfCfcguguaguguL96 | 2306 | asdCsacdTadCacggdAgGfucauguuscsu | 2628 | AGAACAUGACCUCCGUGUAGUGU | 1462 |
| AD-1659452.1 | ascsaugaccUfCfCfguguaguguuL96 | 2307 | asdAscadCudAcacgdGaGfgucaugususc | 2629 | GAACAUGACCUCCGUGUAGUGUC | 1463 |
| AD-1659453.1 | csasugaccuCfCfGfuguagugucuL96 | 2308 | asdGsacdAcdTacacdGgAfggucaugsusu | 2630 | AACAUGACCUCCGUGUAGUGUCU | 2854 |
| AD-1659454.1 | asusgaccucCfGfUfguagugucuuL96 | 2309 | asdAsgadCadCuacadCgGfaggucausgsu | 2631 | ACAUGACCUCCGUGUAGUGUCUG | 2855 |
| AD-1659481.1 | csusuaguuuUfUfUfccacagauguL96 | 2310 | asdCsaudCudGuggadAaAfaacuaagsgsu | 2632 | ACCUUAGUUUUUUCCACAGAUGC | 2856 |
| AD-1659482.1 | ususaguuuuUfUfCfcacagaugcuL96 | 2311 | asdGscadTcdTguggdAaAfaaacuaasgsg | 2633 | CCUUAGUUUUUUCCACAGAUGCU | 2857 |
| AD-1659483.1 | usasguuuuuUfCfCfacagaugcuuL96 | 2312 | asdAsgcdAudCugugdGaAfaaaacuasasg | 2634 | CUUAGUUUUUUCCACAGAUGCUU | 2858 |
| AD-1659485.1 | gsusuuuuucCfAfCfagaugcuuguL96 | 2314 | asdCsaadGcdAucugdTgGfaaaaaacsusa | 2636 | UAGUUUUUUCCACAGAUGCUUGU | 2860 |
| AD-1659487.1 | ususuuuccaCfAfGfaugcuuguguL96 | 2315 | asdCsacdAadGcaucdTgUfggaaaaasasc | 2637 | GUUUUUUCCACAGAUGCUUGUGA | 2861 |
| AD-1659488.1 | ususuuccacAfGfAfugcuugugauL96 | 2316 | asdTscadCadAgcaudCuGfuggaaaasasa | 2638 | UUUUUUCCACAGAUGCUUGUGAU | 2862 |
| AD-1659489.1 | ususuccacaGfAfUfgcuugugauuL96 | 2317 | asdAsucdAcdAagcadTcUfguggaaasasa | 2639 | UUUUUCCACAGAUGCUUGUGAUU | 1473 |
| AD-1659490.1 | ususccacagAfUfGfcuugugauuuL96 | 2318 | asdAsaudCadCaagcdAuCfuguggaasasa | 2640 | UUUUCCACAGAUGCUUGUGAUUU | 2863 |
| AD-1659491.1 | uscscacagaUfGfCfuugugauuuuL96 | 2319 | asdAsaadTcdAcaagdCaUfcuguggasasa | 2641 | UUUCCACAGAUGCUUGUGAUUUU | 2864 |
| AD-1659492.1 | cscsacagauGfCfUfugugauuuuuL96 | 2320 | asdAsaadAudCacaadGcAfucuguggsasa | 2642 | UUCCACAGAUGCUUGUGAUUUUU | 2865 |
| AD-1659493.1 | csascagaugCfUfUfgugauuuuuuL96 | 2321 | asdAsaadAadTcacadAgCfaucugugsgsa | 2643 | UCCACAGAUGCUUGUGAUUUUUG | 1474 |
| AD-1659537.1 | ascscugaauUfUfCfuguuugaauuL96 | 2322 | asdAsuudCadAacagdAaAfuucaggusgsc | 2644 | GCACCUGAAUUUCUGUUUGAAUG | 1494 |
| AD-1659538.1 | cscsugaauuUfCfUfguuugaauguL96 | 2323 | asdCsaudTcdAaacadGaAfauucaggsusg | 2645 | CACCUGAAUUUCUGUUUGAAUGC | 1495 |
| AD-1659559.1 | gsgsaaccauAfGfCfugguuauuuuL96 | 2324 | asdAsaadTadAccagdCuAfugguuccsgsc | 2646 | GCGGAACCAUAGCUGGUUAUUUC | 1503 |
| AD-1659560.1 | gsasaccauaGfCfUfgguuauuucuL96 | 2325 | asdGsaadAudAaccadGcUfaugguucscsg | 2647 | CGGAACCAUAGCUGGUUAUUUCU | 1504 |
| AD-1659561.1 | asasccauagCfUfGfguuauuucuuL96 | 2326 | asdAsgadAadTaaccdAgCfuaugguuscsc | 2648 | GGAACCAUAGCUGGUUAUUUCUC | 1505 |
| AD-1659562.1 | ascscauagcUfGfGfuuauuucucuL96 | 2327 | asdGsagdAadAuaacdCaGfcuauggususc | 2649 | GAACCAUAGCUGGUUAUUUCUCC | 1506 |
| AD-1659563.1 | cscsauagcuGfGfUfuauuucuccuL96 | 2328 | asdGsgadGadAauaadCcAfgcuauggsusu | 2650 | AACCAUAGCUGGUUAUUUCUCCC | 1507 |
| AD-1659582.1 | cscsuuguguUfAfGfuaauaaacguL96 | 2329 | asdCsgudTudAuuacdTaAfcacaaggsgsa | 2651 | UCCCUUGUGUUAGUAAUAAACGU | 1518 |
| AD-1659583.1 | csusuguguuAfGfUfaauaaacguuL96 | 2330 | asdAscgdTudTauuadCuAfacacaagsgsg | 2652 | CCCUUGUGUUAGUAAUAAACGUC | 1519 |
| AD-1659584.1 | ususguguuaGfUfAfauaaacgucuL96 | 2331 | asdGsacdGudTuauudAcUfaacacaasgsg | 2653 | CCUUGUGUUAGUAAUAAACGUCU | 1520 |
| AD-1659585.1 | usgsuguuagUfAfAfuaaacgucuuL96 | 2332 | asdAsgadCgdTuuaudTaCfuaacacasasg | 2654 | CUUGUGUUAGUAAUAAACGUCUU | 1521 |
| AD-1659586.1 | gsusguuaguAfAfUfaaacgucuuuL96 | 2333 | asdAsagdAcdGuuuadTuAfcuaacacsasa | 2655 | UUGUGUUAGUAAUAAACGUCUUG | 1522 |
| AD-1659587.1 | usgsuuaguaAfUfAfaacgucuuguL96 | 2334 | asdCsaadGadCguuudAuUfacuaacascsa | 2656 | UGUGUUAGUAAUAAACGUCUUGC | 1523 |
| AD-1659588.1 | gsusuaguaaUfAfAfacgucuugcuL96 | 2335 | asdGscadAgdAcguudTaUfuacuaacsasc | 2657 | GUGUUAGUAAUAAACGUCUUGCC | 1524 |
| AD-1684490.1 | cscsggguGfuAfCfAfuacaccccuuL96 | 3291 | asAfsgggGfuGfUfauguAfcAfcccggsusc | 3565 | GACCGGGUGUACAUACACCCCUU | 3660 |
| AD-1684491.1 | cscsggguguAfCfAfuacaccccuuL96 | 3292 | asdAsggdGgdTguaudGuAfcacccggsusc | 3566 | GACCGGGUGUACAUACACCCCUU | 3660 |
| AD-1684492.1 | csgsggugUfaCfAfUfacaccccuuuL96 | 3293 | asAfsaggGfgUfGfuaugUfaCfacccgsgsu | 3567 | ACCGGGUGUACAUACACCCCUUC | 3661 |
| AD-1684493.1 | csgsgguguaCfAfUfacaccccuuuL96 | 3294 | asdAsagdGgdGuguadTgUfacacccgsgsu | 3568 | ACCGGGUGUACAUACACCCCUUC | 3661 |
| AD-1684494.1 | gsgsguguAfcAfUfAfcaccccuucuL96 | 3295 | asGfsaagGfgGfUfguauGfuAfcacccsgsg | 3569 | CCGGGUGUACAUACACCCCUUCC | 3662 |
| AD-1684495.1 | gsgsguguacAfUfAfcaccccuucuL96 | 3296 | asdGsaadGgdGgugudAuGfuacacccsgsg | 3570 | CCGGGUGUACAUACACCCCUUCC | 3662 |
| AD-1684496.1 | gsgsuguaCfaUfAfCfaccccuuccuL96 | 3297 | asGfsgaaGfgGfGfuguaUfgUfacaccscsg | 3571 | CGGGUGUACAUACACCCCUUCCA | 3663 |
| AD-1684497.1 | gsgsuguacaUfAfCfaccccuuccuL96 | 3298 | asdGsgadAgdGggugdTaUfguacaccscsg | 3572 | CGGGUGUACAUACACCCCUUCCA | 3663 |
| AD-1684498.1 | gsusguacAfuAfCfAfccccuuccauL96 | 3299 | asUfsggaAfgGfGfguguAfuGfuacacscsc | 3573 | GGGUGUACAUACACCCCUUCCAC | 3664 |
| AD-1684499.1 | gsusguacauAfCfAfccccuuccauL96 | 3300 | asdTsggdAadGgggudGuAfuguacacscsc | 3574 | GGGUGUACAUACACCCCUUCCAC | 3664 |
| AD-1684500.1 | usgsuacaUfaCfAfCfcccuuccacuL96 | 3301 | asGfsuggAfaGfGfggugUfaUfguacascsc | 3575 | GGUGUACAUACACCCCUUCCACC | 3665 |
| AD-1684501.1 | usgsuacauaCfAfCfcccuuccacuL96 | 3302 | asdGsugdGadAggggdTgUfauguacascsc | 3576 | GGUGUACAUACACCCCUUCCACC | 3665 |
| AD-1684502.1 | gsusacauAfcAfCfCfccuuccaccuL96 | 3303 | asGfsgugGfaAfGfggguGfuAfuguacsasc | 3577 | GUGUACAUACACCCCUUCCACCU | 3666 |
| AD-1684503.1 | gsusacauacAfCfCfccuuccaccuL96 | 3304 | asdGsgudGgdAagggdGuGfuauguacsasc | 3578 | GUGUACAUACACCCCUUCCACCU | 3666 |
| AD-1684504.1 | usascauaCfaCfCfCfcuuccaccuuL96 | 3305 | asAfsgguGfgAfAfggggUfgUfauguascsa | 3579 | UGUACAUACACCCCUUCCACCUC | 3667 |
| AD-1684505.1 | usascauacaCfCfCfcuuccaccuuL96 | 3306 | asdAsggdTgdGaaggdGgUfguauguascsa | 3580 | UGUACAUACACCCCUUCCACCUC | 3667 |
| AD-1684506.1 | ascsauacAfcCfCfCfuuccaccucuL96 | 3307 | asGfsaggUfgGfAfagggGfuGfuaugusasc | 3581 | GUACAUACACCCCUUCCACCUCG | 3668 |
| AD-1684507.1 | ascsauacacCfCfCfuuccaccucuL96 | 3308 | asdGsagdGudGgaagdGgGfuguaugusasc | 3582 | GUACAUACACCCCUUCCACCUCG | 3668 |
| AD-1684508.1 | csasuacaCfcCfCfUfuccaccucguL96 | 3309 | asCfsgagGfuGfGfaaggGfgUfguaugsusa | 3583 | UACAUACACCCCUUCCACCUCGU | 3669 |
| AD-1684509.1 | csasuacaccCfCfUfuccaccucguL96 | 3310 | asdCsgadGgdTggaadGgGfguguaugsusa | 3584 | UACAUACACCCCUUCCACCUCGU | 3669 |
| AD-1684510.1 | asusacacCfcCfUfUfccaccucguuL96 | 3311 | asAfscgaGfgUfGfgaagGfgGfuguausgsu | 3585 | ACAUACACCCCUUCCACCUCGUC | 3670 |
| AD-1684511.1 | asusacacccCfUfUfccaccucguuL96 | 3312 | asdAscgdAgdGuggadAgGfgguguausgsu | 3586 | ACAUACACCCCUUCCACCUCGUC | 3670 |
| AD-1684512.1 | cscscuucCfaCfCfUfcgucauccauL96 | 3313 | asUfsggaUfgAfCfgaggUfgGfaagggsgsu | 3587 | ACCCCUUCCACCUCGUCAUCCAC | 3671 |
| AD-1684513.1 | cscscuuccaCfCfUfcgucauccauL96 | 3314 | asdTsggdAudGacgadGgUfggaagggsgsu | 3588 | ACCCCUUCCACCUCGUCAUCCAC | 3671 |
| AD-1684514.1 | cscsuuccAfcCfUfCfgucauccacuL96 | 3315 | asGfsuggAfuGfAfcgagGfuGfgaaggsgsg | 3589 | CCCCUUCCACCUCGUCAUCCACA | 3672 |
| AD-1684515.1 | cscsuuccacCfUfCfgucauccacuL96 | 3316 | asdGsugdGadTgacgdAgGfuggaaggsgsg | 3590 | CCCCUUCCACCUCGUCAUCCACA | 3672 |
| AD-1684516.1 | csasugcaCfaGfUfGfagcuauggguL96 | 3317 | asCfsccaUfaGfCfucacUfgUfgcaugscsc | 3591 | GGCAUGCACAGUGAGCUAUGGGG | 3673 |
| AD-1684517.1 | csasugcacaGfUfGfagcuauggguL96 | 3318 | asdCsccdAudAgcucdAcUfgugcaugscsc | 3592 | GGCAUGCACAGUGAGCUAUGGGG | 3673 |
| AD-1684518.1 | asusgcacAfgUfGfAfgcuaugggguL96 | 3319 | asCfscccAfuAfGfcucaCfuGfugcausgsc | 3593 | GCAUGCACAGUGAGCUAUGGGGC | 3674 |
| AD-1684519.1 | asusgcacagUfGfAfgcuaugggguL96 | 3320 | asdCsccdCadTagcudCaCfugugcausgsc | 3594 | GCAUGCACAGUGAGCUAUGGGGC | 3674 |
| AD-1684520.1 | cscsucucCfcCfAfAfcggcugucuuL96 | 3321 | asAfsgacAfgCfCfguugGfgGfagaggsasc | 3595 | GUCCUCUCCCCAACGGCUGUCUU | 3675 |
| AD-1684521.1 | cscsucucccCfAfAfcggcugucuuL96 | 3322 | asdAsgadCadGccgudTgGfggagaggsasc | 3596 | GUCCUCUCCCCAACGGCUGUCUU | 3675 |
| AD-1684522.1 | asgsgugcUfgAfAfCfagcauuuuuuL96 | 3323 | asAfsaaaAfuGfCfuguuCfaGfcaccuscsc | 3597 | GGAGGUGCUGAACAGCAUUUUUU | 2775 |
| AD-1684523.1 | gsgsugcuGfaAfCfAfgcauuuuuuuL96 | 3324 | asAfsaaaAfaUfGfcuguUfcAfgcaccsusc | 3598 | GAGGUGCUGAACAGCAUUUUUUU | 2776 |
| AD-1684524.1 | gsusgcugAfaCfAfGfcauuuuuuuuL96 | 3325 | asAfsaaaAfaAfUfgcugUfuCfagcacscsu | 3599 | AGGUGCUGAACAGCAUUUUUUUU | 2777 |
| AD-1684525.1 | usgscugaAfcAfGfCfauuuuuuuuuL96 | 3326 | asAfsaaaAfaAfAfugcuGfuUfcagcascsc | 3600 | GGUGCUGAACAGCAUUUUUUUUG | 2778 |
| AD-1684526.1 | gscsugaaCfaGfCfAfuuuuuuuuguL96 | 3327 | asCfsaaaAfaAfAfaugcUfgUfucagcsasc | 3601 | GUGCUGAACAGCAUUUUUUUUGA | 2779 |
| AD-1684527.1 | csusgaacAfgCfAfUfuuuuuuugauL96 | 3328 | asUfscaaAfaAfAfaaugCfuGfuucagscsa | 3602 | UGCUGAACAGCAUUUUUUUUGAG | 2780 |
| AD-1684528.1 | cscsccagUfcUfCfCfcaccuuuucuL96 | 3329 | asGfsaaaAfgGfUfgggaGfaCfuggggsgsu | 3603 | ACCCCCAGUCUCCCACCUUUUCU | 3676 |
| AD-1684529.1 | cscsccagucUfCfCfcaccuuuucuL96 | 3330 | asdGsaadAadGguggdGaGfacuggggsgsu | 3604 | ACCCCCAGUCUCCCACCUUUUCU | 3676 |
| AD-1684530.1 | cscscaguCfuCfCfCfaccuuuucuuL96 | 3331 | asAfsgaaAfaGfGfugggAfgAfcugggsgsg | 3605 | CCCCCAGUCUCCCACCUUUUCUU | 3677 |
| AD-1684531.1 | cscscagucuCfCfCfaccuuuucuuL96 | 3332 | asdAsgadAadAggugdGgAfgacugggsgsg | 3606 | CCCCCAGUCUCCCACCUUUUCUU | 3677 |
| AD-1684532.1 | cscsagucUfcCfCfAfccuuuucuuuL96 | 3333 | asAfsagaAfaAfGfguggGfaGfacuggsgsg | 3607 | CCCCAGUCUCCCACCUUUUCUUC | 3678 |
| AD-1684533.1 | cscsagucucCfCfAfccuuuucuuuL96 | 3334 | asdAsagdAadAaggudGgGfagacuggsgsg | 3608 | CCCCAGUCUCCCACCUUUUCUUC | 3678 |
| AD-1684534.1 | asgsucucCfcAfCfCfuuuucuucuuL96 | 3335 | asAfsgaaGfaAfAfagguGfgGfagacusgsg | 3609 | CCAGUCUCCCACCUUUUCUUCUA | 3679 |
| AD-1684535.1 | asgsucucccAfCfCfuuuucuucuuL96 | 3336 | asdAsgadAgdAaaagdGuGfggagacusgsg | 3610 | CCAGUCUCCCACCUUUUCUUCUA | 3679 |
| AD-1684536.1 | gsgsuuuaUfuUfUfAfgagaauggguL96 | 3337 | asCfsccaUfuCfUfcuaaAfaUfaaaccscsa | 3611 | UGGGUUUAUUUUAGAGAAUGGGG | 3680 |
| AD-1684537.1 | gsgsuuuauuUfUfAfgagaauggguL96 | 3338 | asdCsccdAudTcucudAaAfauaaaccscsa | 3612 | UGGGUUUAUUUUAGAGAAUGGGG | 3680 |
| AD-1684538.1 | gsusuuauUfuUfAfGfagaaugggguL96 | 3339 | asCfscccAfuUfCfucuaAfaAfuaaacscsc | 3613 | GGGUUUAUUUUAGAGAAUGGGGG | 3681 |
| AD-1684539.1 | gsusuuauuuUfAfGfagaaugggguL96 | 3340 | asdCsccdCadTucucdTaAfaauaaacscsc | 3614 | GGGUUUAUUUUAGAGAAUGGGGG | 3681 |
| AD-1684540.1 | ususuauuUfuAfGfAfgaauggggguL96 | 3341 | asCfscccCfaUfUfcucuAfaAfauaaascsc | 3615 | GGUUUAUUUUAGAGAAUGGGGGU | 3682 |
| AD-1684541.1 | ususuauuuuAfGfAfgaauggggguL96 | 3342 | asdCsccdCcdAuucudCuAfaaauaaascsc | 3616 | GGUUUAUUUUAGAGAAUGGGGGU | 3682 |
| AD-1684542.1 | asgsaaugGfgGfGfUfggggaggcauL96 | 3343 | asUfsgccUfcCfCfcaccCfcCfauucuscsu | 3617 | AGAGAAUGGGGGUGGGGAGGCAA | 3683 |
| AD-1684543.1 | asgsaaugggGfGfUfggggaggcauL96 | 3344 | asdTsgcdCudCcccadCcCfccauucuscsu | 3618 | AGAGAAUGGGGGUGGGGAGGCAA | 3683 |
| AD-1684544.1 | gsasauggGfgGfUfGfgggaggcaauL96 | 3345 | asUfsugcCfuCfCfccacCfcCfcauucsusc | 3619 | GAGAAUGGGGGUGGGGAGGCAAG | 3684 |
| AD-1684545.1 | gsasauggggGfUfGfgggaggcaauL96 | 3346 | asdTsugdCcdTccccdAcCfcccauucsusc | 3620 | GAGAAUGGGGGUGGGGAGGCAAG | 3684 |
| AD-1684546.1 | asasugggGfgUfGfGfggaggcaaguL96 | 3347 | asCfsuugCfcUfCfcccaCfcCfccauuscsu | 3621 | AGAAUGGGGGUGGGGAGGCAAGA | 3685 |
| AD-1684547.1 | asasugggggUfGfGfggaggcaaguL96 | 3348 | asdCsuudGcdCucccdCaCfccccauuscsu | 3622 | AGAAUGGGGGUGGGGAGGCAAGA | 3685 |
| AD-1684548.1 | asusggggGfuGfGfGfgaggcaagauL96 | 3349 | asUfscuuGfcCfUfccccAfcCfcccaususc | 3623 | GAAUGGGGGUGGGGAGGCAAGAA | 3686 |
| AD-1684549.1 | asusggggguGfGfGfgaggcaagauL96 | 3350 | asdTscudTgdCcuccdCcAfcccccaususc | 3624 | GAAUGGGGGUGGGGAGGCAAGAA | 3686 |
| AD-1684550.1 | usgsggggUfgGfGfGfaggcaagaauL96 | 3351 | asUfsucuUfgCfCfucccCfaCfccccasusu | 3625 | AAUGGGGGUGGGGAGGCAAGAAC | 3687 |
| AD-1684551.1 | usgsggggugGfGfGfaggcaagaauL96 | 3352 | asdTsucdTudGccucdCcCfacccccasusu | 3626 | AAUGGGGGUGGGGAGGCAAGAAC | 3687 |
| AD-1684552.1 | gsgsggguGfgGfGfAfggcaagaacuL96 | 3353 | asGfsuucUfuGfCfcuccCfcAfcccccsasu | 3627 | AUGGGGGUGGGGAGGCAAGAACC | 3688 |
| AD-1684553.1 | gsgsggguggGfGfAfggcaagaacuL96 | 3354 | asdGsuudCudTgccudCcCfcacccccsasu | 3628 | AUGGGGGUGGGGAGGCAAGAACC | 3688 |
| AD-1684554.1 | gsusggggAfgGfCfAfagaaccaguuL96 | 3355 | asAfscugGfuUfCfuugcCfuCfcccacscsc | 3629 | GGGUGGGGAGGCAAGAACCAGUG | 3689 |
| AD-1684555.1 | gsusggggagGfCfAfagaaccaguuL96 | 3356 | asdAscudGgdTucuudGcCfuccccacscsc | 3630 | GGGUGGGGAGGCAAGAACCAGUG | 3689 |
| AD-1684556.1 | usgsgggaGfgCfAfAfgaaccaguguL96 | 3357 | asCfsacuGfgUfUfcuugCfcUfccccascsc | 3631 | GGUGGGGAGGCAAGAACCAGUGU | 3690 |
| AD-1684557.1 | usgsgggaggCfAfAfgaaccaguguL96 | 3358 | asdCsacdTgdGuucudTgCfcuccccascsc | 3632 | GGUGGGGAGGCAAGAACCAGUGU | 3690 |
| AD-1684558.1 | gsgsggagGfcAfAfGfaaccaguguuL96 | 3359 | asAfscacUfgGfUfucuuGfcCfuccccsasc | 3633 | GUGGGGAGGCAAGAACCAGUGUU | 3691 |
| AD-1684559.1 | gsgsggaggcAfAfGfaaccaguguuL96 | 3360 | asdAscadCudGguucdTuGfccuccccsasc | 3634 | GUGGGGAGGCAAGAACCAGUGUU | 3691 |
| AD-1684560.1 | gsgsgaggcaAfGfAfaccaguguuuL96 | 3361 | asdAsacdAcdTgguudCuUfgccucccscsa | 3635 | UGGGGAGGCAAGAACCAGUGUUU | 1412 |
| AD-1684561.1 | gsgsaggcaaGfAfAfccaguguuuuL96 | 3362 | asdAsaadCadCuggudTcUfugccuccscsc | 3636 | GGGGAGGCAAGAACCAGUGUUUA | 1413 |
| AD-1684562.1 | gscsuuguUfuGfUfGfaaacaaaaauL96 | 3363 | asUfsuuuUfgUfUfucacAfaAfcaagcsusg | 3637 | CAGCUUGUUUGUGAAACAAAAAA | 3659 |
| AD-1684563.1 | csusuguuUfgUfGfAfaacaaaaaauL96 | 3364 | asUfsuuuUfuGfUfuucaCfaAfacaagscsu | 3638 | AGCUUGUUUGUGAAACAAAAAAG | 2835 |
| AD-1684564.1 | ususguuuGfuGfAfAfacaaaaaaguL96 | 3365 | asCfsuuuUfuUfGfuuucAfcAfaacaasgsc | 3639 | GCUUGUUUGUGAAACAAAAAAGU | 2836 |
| AD-1684565.1 | csusuaguUfuUfUfUfccacagauguL96 | 3366 | asCfsaucUfgUfGfgaaaAfaAfcuaagsgsu | 3640 | ACCUUAGUUUUUUCCACAGAUGC | 2856 |
| AD-1684566.1 | ususaguuUfuUfUfCfcacagaugcuL96 | 3367 | asGfscauCfuGfUfggaaAfaAfacuaasgsg | 3641 | CCUUAGUUUUUUCCACAGAUGCU | 2857 |
| AD-1684567.1 | usasguuuUfuUfCfCfacagaugcuuL96 | 3368 | asAfsgcaUfcUfGfuggaAfaAfaacuasasg | 3642 | CUUAGUUUUUUCCACAGAUGCUU | 2858 |
| AD-1684568.1 | gsusuuuuUfcCfAfCfagaugcuuguL96 | 3369 | asCfsaagCfaUfCfugugGfaAfaaaacsusa | 3643 | UAGUUUUUUCCACAGAUGCUUGU | 2860 |
| AD-1684569.1 | ususuuucCfaCfAfGfaugcuuguguL96 | 3370 | asCfsacaAfgCfAfucugUfgGfaaaaasasc | 3644 | GUUUUUUCCACAGAUGCUUGUGA | 2861 |
| AD-1684570.1 | ususuuccAfcAfGfAfugcuugugauL96 | 3371 | asUfscacAfaGfCfaucuGfuGfgaaaasasa | 3645 | UUUUUUCCACAGAUGCUUGUGAU | 2862 |
| AD-67328.2 | uscsucccAfcCfUfUfuucuucuaauL96 | 3372 | asUfsuagAfaGfAfaaagGfuGfggagascsu | 3646 | AGUCUCCCACCUUUUCUUCUAAU | 2866 |
| AD-68579.2 | ususccaaCfcGfAfCfcagcuuguuuL96 | 3373 | asAfsacaAfgCfUfggucGfgUfuggaasusu | 3647 | AAUUCCAACCGACCAGCUUGUUU | 2823 |
| AD-68585.2 | asgsuugaGfaAfCfAfaaaauuggguL96 | 925 | asCfsccaAfuUfUfuuguUfcUfcaacususg | 1227 | CAAGUUGAGAACAAAAAUUGGGU | 1529 |
| AD-84700.2 | cscsaccuUfuUfCfUfucuaaugaguL96 | 3374 | asCfsucaUfuAfGfaagaAfaAfgguggsgsa | 3648 | UCCCACCUUUUCUUCUAAUGAGU | 2797 |
| AD-84707.2 | cscsucaaCfuGfGfAfugaagaaacuL96 | 3375 | asGfsuuuCfuUfCfauccAfgUfugaggsgsa | 3649 | UCCCUCAACUGGAUGAAGAAACU | 2867 |
| AD-84712.2 | cscsauucCfuGfUfUfugcuguguauL96 | 3376 | asUfsacaCfaGfCfaaacAfgGfaauggsgsc | 3650 | GCCCAUUCCUGUUUGCUGUGUAU | 2787 |
| AD-84724.2 | asgsaauuCfcAfAfCfcgaccagcuuL96 | 3377 | asAfsgcuGfgUfCfgguuGfgAfauucususu | 3651 | AAAGAAUUCCAACCGACCAGCUU | 2819 |
| AD-84730.2 | gscsugggUfuUfAfUfuuuagagaauL96 | 3378 | asUfsucuCfuAfAfaauaAfaCfccagcsasa | 3652 | UUGCUGGGUUUAUUUUAGAGAAU | 2801 |
| AD-84731.2 | asusggcaUfgCfAfCfagugagcuauL96 | 3379 | asUfsagcUfcAfCfugugCfaUfgccausasu | 3653 | AUAUGGCAUGCACAGUGAGCUAU | 2713 |
| AD-84739.5 | usgsagaaGfaUfUfGfacagguucauL96 | 3380 | asUfsgaaCfcUfGfucaaUfcUfucucasgsc | 3654 | GCUGAGAAGAUUGACAGGUUCAU | 2729 |

TABLE 8
AGT Single Dose Screen in Hep3b Cells

| | Avg % message | | | | Avg % message | | |
|---|---|---|---|---|---|---|---|
| | remaining ± STDEV | | | | remaining ± STDEV | | |
| Duplex ID | 10 nM | 1 nM | 10 nM | Duplex ID | 10 nM | 1 nM | 10 nM |
| AD-1632799.1 | 88 ± 15 | 105 ± 23 | 90 ± 21 | AD-1657992.1 | 55 ± 11 | 91 ± 9 | 73 ± 8 |
| AD-1632801.1 | 6 ± 1 | 23 ± 4 | 33 ± 3 | AD-1657994.1 | 2 ± 1 | 12 ± 3 | 15 ± 4 |
| AD-1632805.1 | 82 ± 7 | 95 ± 7 | 83 ± 12 | AD-1657998.1 | 43 ± 4 | 65 ± 16 | 66 ± 6 |
| AD-1632838.1 | 58 ± 5 | 94 ± 7 | 92 ± 10 | AD-1658030.1 | 64 ± 5 | 84 ± 7 | 82 ± 8 |
| AD-1684490.1 | 50 ± 11 | 83 ± 26 | 80 ± 18 | AD-1684491.1 | 38 ± 12 | 67 ± 14 | 73 ± 17 |
| AD-1684492.1 | 28 ± 4 | 68 ± 7 | 71 ± 20 | AD-1684493.1 | 19 ± 2 | 47 ± 12 | 70 ± 11 |
| AD-1684494.1 | 92 ± 19 | 101 ± 10 | 116 ± 6 | AD-1684495.1 | 18 ± 4 | 54 ± 9 | 60 ± 6 |
| AD-1684496.1 | 24 ± 5 | 72 ± 8 | 99 ± 10 | AD-1684497.1 | 4 ± 1 | 15 ± 3 | 42 ± 7 |
| AD-1684498.1 | 8 ± 2 | 31 ± 9 | 66 ± 9 | AD-1684499.1 | 34 ± 8 | 53 ± 10 | 79 ± 8 |
| AD-1684500.1 | 4 ± 1 | 16 ± 5 | 33 ± 6 | AD-1684501.1 | 2 ± 0 | 7 ± 2 | 24 ± 2 |
| AD-1684502.1 | 98 ± 12 | 107 ± 8 | 98 ± 3 | AD-1684503.1 | 78 ± 15 | 102 ± 10 | 112 ± 14 |
| AD-1684504.1 | 12 ± 2 | 56 ± 6 | 78 ± 10 | AD-1684505.1 | 1 ± 0 | 7 ± 3 | 18 ± 5 |
| AD-1684506.1 | 16 ± 5 | 53 ± 12 | 58 ± 11 | AD-1684507.1 | 10 ± 3 | 46 ± 9 | 54 ± 6 |
| AD-1684508.1 | 31 ± 8 | 87 ± 10 | 101 ± 15 | AD-1684509.1 | 5 ± 1 | 17 ± 2 | 52 ± 3 |
| AD-1684510.1 | 95 ± 8 | 119 ± 9 | 131 ± 11 | AD-1684511.1 | 30 ± 6 | 67 ± 5 | 96 ± 13 |
| AD-1684512.1 | 2 ± 1 | 9 ± 3 | 24 ± 3 | AD-1684513.1 | 4 ± 2 | 28 ± 3 | 49 ± 9 |
| AD-1684514.1 | 39 ± 12 | 67 ± 8 | 82 ± 10 | AD-1684515.1 | 44 ± 9 | 88 ± 10 | 100 ± 4 |
| AD-1632840.1 | 17 ± 4 | 62 ± 5 | 77 ± 7 | AD-1658032.1 | 7 ± 2 | 34 ± 3 | 52 ± 3 |
| AD-1632841.1 | 9 ± 2 | 45 ± 8 | 70 ± 7 | AD-1658033.1 | 2 ± 0 | 21 ± 4 | 32 ± 6 |
| AD-1632842.1 | 62 ± 11 | 60 ± 4 | 67 ± 13 | AD-1658034.1 | 29 ± 6 | 77 ± 17 | 72 ± 12 |
| AD-1632843.1 | 6 ± 3 | 38 ± 6 | 45 ± 5 | AD-1658035.1 | 3 ± 1 | 9 ± 1 | 18 ± 3 |
| AD-1632844.1 | 7 ± 1 | 28 ± 5 | 45 ± 6 | AD-1658036.1 | 3 ± 0 | 12 ± 2 | 20 ± 4 |
| AD-1632846.1 | 7 ± 3 | 30 ± 7 | 54 ± 10 | AD-1658038.1 | 5 ± 2 | 18 ± 2 | 38 ± 1 |
| AD-1632847.1 | 9 ± 4 | 35 ± 7 | 47 ± 4 | AD-1658039.1 | 2 ± 0 | 5 ± 1 | 15 ± 7 |
| AD-1632848.1 | 67 ± 11 | 92 ± 8 | 108 ± 8 | AD-1658040.1 | 5 ± 1 | 18 ± 2 | 34 ± 5 |
| AD-1632849.1 | 4 ± 1 | 13 ± 2 | 22 ± 1 | AD-1658041.1 | 7 ± 2 | 16 ± 0 | 31 ± 4 |
| AD-1632836.1 | 1 ± 0 | 3 ± 2 | 7 ± 1 | AD-1658042.1 | 1 ± 0 | 1 ± 0 | 3 ± 1 |
| AD-1632850.1 | 26 ± 2 | 62 ± 7 | 70 ± 9 | AD-1658043.1 | 2 ± 0 | 7 ± 1 | 14 ± 2 |
| AD-1632851.1 | 17 ± 5 | 53 ± 8 | 74 ± 5 | AD-1658044.1 | 1 ± 0 | 6 ± 2 | 12 ± 2 |
| AD-1632852.1 | 4 ± 2 | 23 ± 4 | 46 ± 10 | AD-1658045.1 | 2 ± 1 | 6 ± 2 | 16 ± 2 |
| AD-1632853.1 | 16 ± 7 | 55 ± 14 | 62 ± 7 | AD-1658046.1 | 2 ± 1 | 6 ± 1 | 19 ± 5 |
| AD-1632854.1 | 40 ± 12 | 68 ± 11 | 74 ± 9 | AD-1658047.1 | 6 ± 3 | 17 ± 1 | 30 ± 7 |
| AD-1632855.1 | 2 ± 1 | 9 ± 1 | 13 ± 1 | AD-1658048.1 | 3 ± 1 | 9 ± 3 | 18 ± 4 |
| AD-1632856.1 | 21 ± 6 | 47 ± 8 | 75 ± 9 | AD-1658049.1 | 1 ± 0 | 7 ± 1 | 16 ± 3 |
| AD-1632857.1 | 8 ± 3 | 40 ± 5 | 43 ± 11 | AD-1658050.1 | 5 ± 1 | 20 ± 5 | 29 ± 4 |
| AD-1632858.1 | 6 ± 1 | 23 ± 6 | 48 ± 4 | AD-1658051.1 | 6 ± 2 | 14 ± 1 | 31 ± 2 |
| AD-1632859.1 | 3 ± 2 | 12 ± 3 | 43 ± 8 | AD-1658052.1 | 2 ± 0 | 6 ± 0 | 17 ± 3 |
| AD-1632860.1 | 9 ± 3 | 27 ± 4 | 57 ± 5 | AD-1658053.1 | 6 ± 1 | 22 ± 2 | 51 ± 4 |
| AD-1632861.1 | 10 ± 2 | 38 ± 5 | 63 ± 8 | AD-1658054.1 | 2 ± 1 | 8 ± 4 | 22 ± 3 |
| AD-1632862.1 | 53 ± 10 | 69 ± 10 | 100 ± 11 | AD-1658055.1 | 12 ± 4 | 40 ± 5 | 69 ± 6 |
| AD-1632863.1 | 13 ± 2 | 29 ± 5 | 75 ± 14 | AD-1658056.1 | 18 ± 5 | 51 ± 1 | 80 ± 5 |
| AD-1632864.1 | 61 ± 11 | 74 ± 9 | 113 ± 24 | AD-1658057.1 | 67 ± 6 | 66 ± 16 | 96 ± 18 |
| AD-1632865.1 | 37 ± 4 | 63 ± 10 | 86 ± 17 | AD-1658058.1 | 19 ± 5 | 40 ± 6 | 56 ± 12 |
| AD-1632866.1 | 17 ± 1 | 42 ± 8 | 62 ± 8 | AD-1658059.1 | 12 ± 4 | 27 ± 6 | 41 ± 7 |
| AD-1632991.1 | 18 ± 5 | 50 ± 2 | 74 ± 10 | AD-1658184.1 | 10 ± 2 | 38 ± 9 | 58 ± 9 |
| AD-1632992.1 | 63 ± 9 | 100 ± 20 | 90 ± 11 | AD-1658185.1 | 38 ± 6 | 67 ± 12 | 86 ± 13 |
| AD-1632993.1 | 50 ± 4 | 87 ± 8 | 102 ± 20 | AD-1658186.1 | 5 ± 1 | 29 ± 1 | 55 ± 9 |
| AD-1632994.1 | 6 ± 1 | 28 ± 2 | 65 ± 14 | AD-1658187.1 | 3 ± 0 | 11 ± 1 | 32 ± 4 |
| AD-1632995.1 | 35 ± 9 | 47 ± 4 | 75 ± 17 | AD-1658188.1 | 4 ± 2 | 11 ± 3 | 26 ± 4 |
| AD-1632996.1 | 13 ± 2 | 42 ± 8 | 76 ± 6 | AD-1658189.1 | 7 ± 2 | 27 ± 4 | 56 ± 12 |
| AD-1632997.1 | 5 ± 1 | 23 ± 4 | 50 ± 6 | AD-1658190.1 | 4 ± 1 | 19 ± 6 | 31 ± 6 |
| AD-1632998.1 | 8 ± 2 | 23 ± 2 | 58 ± 4 | AD-1658191.1 | 13 ± 4 | 23 ± 3 | 48 ± 11 |
| AD-1632999.1 | 41 ± 5 | 75 ± 4 | 83 ± 16 | AD-1658192.1 | 21 ± 6 | 46 ± 10 | 77 ± 9 |
| AD-1633000.1 | 106 ± 9 | 126 ± 8 | 96 ± 10 | AD-1658193.1 | 25 ± 3 | 60 ± 5 | 83 ± 11 |
| AD-1633003.1 | 4 ± 1 | 33 ± 7 | 64 ± 9 | AD-1658196.1 | 2 ± 0 | 6 ± 2 | 22 ± 6 |
| AD-1633004.1 | 55 ± 10 | 83 ± 11 | 122 ± 18 | AD-1658197.1 | 8 ± 1 | 24 ± 5 | 32 ± 3 |
| AD-1633007.1 | 6 ± 1 | 19 ± 2 | 69 ± 8 | AD-1658200.1 | 2 ± 0 | 7 ± 1 | 22 ± 4 |
| AD-1633008.1 | 26 ± 7 | 53 ± 8 | 53 ± 3 | AD-1658201.1 | 19 ± 3 | 63 ± 12 | 89 ± 9 |
| AD-1633009.1 | 5 ± 1 | 12 ± 3 | 30 ± 5 | AD-1658202.1 | 10 ± 1 | 25 ± 5 | 50 ± 9 |
| AD-1633010.1 | 5 ± 0 | 9 ± 3 | 13 ± 2 | AD-1658203.1 | 1 ± 0 | 1 ± 0 | 4 ± 1 |
| AD-1633011.1 | 3 ± 1 | 10 ± 2 | 26 ± 1 | AD-1658204.1 | 1 ± 0 | 5 ± 1 | 16 ± 3 |
| AD-1633012.1 | 5 ± 1 | 33 ± 4 | 64 ± 9 | AD-1658205.1 | 2 ± 0 | 4 ± 1 | 10 ± 2 |
| AD-1633013.1 | 3 ± 1 | 10 ± 3 | 25 ± 5 | AD-1658206.1 | 1 ± 0 | 5 ± 1 | 14 ± 3 |
| AD-1633014.1 | 3 ± 1 | 23 ± 4 | 35 ± 5 | AD-1658207.1 | 4 ± 1 | 12 ± 3 | 22 ± 5 |
| AD-1633015.1 | 16 ± 4 | 58 ± 5 | 72 ± 7 | AD-1658208.1 | 4 ± 0 | 26 ± 6 | 39 ± 6 |
| AD-1633016.1 | 21 ± 5 | 90 ± 5 | 104 ± 13 | AD-1658209.1 | 14 ± 3 | 51 ± 4 | 71 ± 4 |
| AD-1633018.1 | 84 ± 5 | 118 ± 17 | 109 ± 7 | AD-1658211.1 | 84 ± 18 | 105 ± 10 | 102 ± 18 |
| AD-1633019.1 | 8 ± 1 | 28 ± 0 | 50 ± 5 | AD-1658212.1 | 2 ± 0 | 4 ± 1 | 8 ± 3 |
| AD-1633020.1 | 27 ± 5 | 70 ± 6 | 96 ± 13 | AD-1658213.1 | 9 ± 2 | 28 ± 6 | 56 ± 6 |
| AD-1633027.1 | 17 ± 2 | 46 ± 7 | 65 ± 12 | AD-1658220.1 | 4 ± 1 | 6 ± 1 | 15 ± 4 |
| AD-1633028.1 | 15 ± 2 | 49 ± 8 | 63 ± 7 | AD-1658221.1 | 5 ± 1 | 28 ± 4 | 49 ± 7 |
| AD-1633029.1 | 113 ± 4 | 120 ± 14 | 108 ± 15 | AD-1658222.1 | 28 ± 2 | 47 ± 4 | 58 ± 9 |
| AD-1633030.1 | 19 ± 3 | 70 ± 13 | 86 ± 7 | AD-1658223.1 | 4 ± 1 | 25 ± 7 | 36 ± 3 |
| AD-1633031.1 | 6 ± 3 | 14 ± 2 | 40 ± 7 | AD-1658224.1 | 4 ± 1 | 4 ± 0 | 10 ± 2 |
| AD-84731.2 | 8 ± 1 | 16 ± 1 | 28 ± 7 | AD-1658225.1 | 3 ± 1 | 6 ± 1 | 12 ± 2 |
| AD-1633032.1 | 6 ± 2 | 14 ± 4 | 29 ± 7 | AD-1658226.1 | 4 ± 1 | 6 ± 1 | 19 ± 4 |
| AD-1633033.1 | 6 ± 1 | 12 ± 2 | 29 ± 3 | AD-1658227.1 | 3 ± 1 | 5 ± 1 | 10 ± 3 |
| AD-1633034.1 | 82 ± 12 | 92 ± 11 | 95 ± 16 | AD-1658228.1 | 42 ± 8 | 75 ± 17 | 95 ± 13 |
| AD-1684516.1 | 42 ± 11 | 83 ± 18 | 77 ± 23 | AD-1684517.1 | 10 ± 2 | 30 ± 9 | 70 ± 6 |
| AD-1684518.1 | 80 ± 10 | 107 ± 22 | 108 ± 20 | AD-1684519.1 | 100 ± 7 | 107 ± 21 | 111 ± 21 |
| AD-1684520.1 | 24 ± 6 | 75 ± 13 | 87 ± 8 | AD-1684521.1 | 6 ± 1 | 15 ± 5 | 21 ± 2 |
| AD-1633048.1 | 46 ± 9 | 82 ± 8 | 98 ± 10 | AD-1658242.1 | 20 ± 6 | 43 ± 6 | 65 ± 10 |
| AD-1633049.1 | 10 ± 2 | 28 ± 6 | 39 ± 10 | AD-1658243.1 | 9 ± 1 | 19 ± 2 | 45 ± 4 |
| AD-1633094.1 | 19 ± 7 | 31 ± 3 | 56 ± 7 | AD-1658288.1 | 24 ± 4 | 53 ± 10 | 63 ± 13 |
| AD-1633095.1 | 48 ± 15 | 63 ± 13 | 66 ± 11 | AD-1658289.1 | 16 ± 5 | 36 ± 7 | 55 ± 7 |
| AD-1633119.1 | 43 ± 8 | 72 ± 17 | 96 ± 16 | AD-1658313.1 | 25 ± 3 | 49 ± 8 | 54 ± 5 |
| AD-1633121.1 | 18 ± 5 | 53 ± 10 | 74 ± 13 | AD-1658315.1 | 3 ± 1 | 11 ± 2 | 34 ± 9 |
| AD-1633122.1 | 66 ± 18 | 85 ± 17 | 96 ± 15 | AD-1658316.1 | 13 ± 4 | 40 ± 8 | 63 ± 8 |
| AD-1633254.2 | 11 ± 4 | 21 ± 6 | 32 ± 5 | AD-1658448.2 | 7 ± 1 | 16 ± 4 | 21 ± 9 |
| AD-1633257.2 | 10 ± 2 | 27 ± 4 | 39 ± 7 | AD-1658451.2 | 9 ± 1 | 23 ± 3 | 28 ± 3 |
| AD-1633269.2 | 10 ± 0 | 18 ± 4 | 22 ± 2 | AD-1658463.2 | 7 ± 1 | 9 ± 2 | 11 ± 1 |
| AD-1633270.2 | 47 ± 3 | 68 ± 2 | 75 ± 12 | AD-1658464.2 | 48 ± 4 | 69 ± 8 | 81 ± 13 |
| AD-1633271.2 | 12 ± 3 | 29 ± 8 | 44 ± 10 | AD-1658465.2 | 8 ± 3 | 17 ± 3 | 22 ± 4 |
| AD-1633272.2 | 27 ± 6 | 35 ± 6 | 57 ± 4 | AD-1658466.2 | 20 ± 3 | 27 ± 4 | 43 ± 7 |
| AD-1633273.2 | 76 ± 2 | 78 ± 2 | 98 ± 17 | AD-1658467.2 | 83 ± 6 | 76 ± 11 | 101 ± 11 |
| AD-1633290.2 | 42 ± 4 | 68 ± 11 | 75 ± 9 | AD-1658484.2 | 5 ± 1 | 16 ± 6 | 28 ± 3 |
| AD-1633291.2 | 30 ± 5 | 50 ± 13 | 64 ± 11 | AD-1658485.2 | 73 ± 15 | 97 ± 8 | 93 ± 20 |
| AD-1633324.2 | 6 ± 2 | 14 ± 3 | 22 ± 5 | AD-1658519.2 | 2 ± 0 | 4 ± 2 | 4 ± 1 |
| AD-84739.5 | 2 ± 0 | 3 ± 1 | 3 ± 1 | AD-1658520.2 | 2 ± 0 | 4 ± 1 | 8 ± 1 |
| AD-1633325.2 | 2 ± 0 | 3 ± 1 | 5 ± 2 | AD-1658521.2 | 1 ± 1 | 4 ± 1 | 5 ± 1 |
| AD-1633326.2 | 3 ± 1 | 7 ± 1 | 17 ± 1 | AD-1658522.2 | 1 ± 0 | 2 ± 0 | 3 ± 1 |
| AD-1633327.2 | 20 ± 4 | 38 ± 5 | 49 ± 3 | AD-1658523.2 | 12 ± 1 | 29 ± 6 | 58 ± 3 |
| AD-1633328.2 | 7 ± 1 | 16 ± 2 | 27 ± 3 | AD-1658524.2 | 4 ± 1 | 11 ± 1 | 28 ± 2 |
| AD-1633329.2 | 7 ± 1 | 21 ± 4 | 44 ± 7 | AD-1658525.2 | 2 ± 1 | 6 ± 1 | 12 ± 4 |
| AD-1633330.2 | 14 ± 3 | 34 ± 2 | 58 ± 1 | AD-1658526.2 | 6 ± 1 | 24 ± 7 | 33 ± 6 |
| AD-1633331.2 | 112 ± 5 | 115 ± 6 | 123 ± 19 | AD-1658527.2 | 31 ± 2 | 59 ± 5 | 80 ± 9 |
| AD-1633332.2 | 12 ± 3 | 40 ± 8 | 61 ± 6 | AD-1658528.2 | 8 ± 2 | 25 ± 3 | 33 ± 3 |
| AD-1633333.2 | 2 ± 0 | 8 ± 2 | 15 ± 1 | AD-1658529.2 | 3 ± 0 | 6 ± 1 | 12 ± 2 |
| AD-1633334.2 | 9 ± 1 | 24 ± 4 | 50 ± 3 | AD-1658530.2 | 6 ± 1 | 11 ± 2 | 18 ± 4 |
| AD-1633335.2 | 105 ± 18 | 127 ± 10 | 140 ± 12 | AD-1658531.2 | 27 ± 2 | 50 ± 5 | 73 ± 8 |
| AD-1633343.2 | 63 ± 5 | 87 ± 7 | 100 ± 14 | AD-1658539.2 | 32 ± 4 | 44 ± 5 | 69 ± 4 |
| AD-1633345.2 | 29 ± 3 | 56 ± 5 | 87 ± 11 | AD-1658541.2 | 13 ± 3 | 27 ± 3 | 49 ± 5 |
| AD-1633346.2 | 5 ± 1 | 13 ± 3 | 27 ± 6 | AD-1658542.2 | 5 ± 1 | 16 ± 5 | 20 ± 4 |
| AD-1633409.2 | 4 ± 0 | 12 ± 4 | 21 ± 4 | AD-1658605.2 | 4 ± 1 | 13 ± 5 | 23 ± 1 |
| AD-1633453.2 | 67 ± 7 | 81 ± 13 | 102 ± 6 | AD-1658650.2 | 25 ± 1 | 53 ± 3 | 82 ± 6 |
| AD-1633464.2 | 14 ± 1 | 38 ± 4 | 67 ± 3 | AD-1658661.2 | 5 ± 1 | 14 ± 2 | 27 ± 3 |
| AD-1633465.2 | 5 ± 1 | 15 ± 3 | 39 ± 3 | AD-1658662.2 | 4 ± 3 | 10 ± 6 | 12 ± 2 |
| AD-1633466.2 | 11 ± 2 | 34 ± 10 | 61 ± 5 | AD-1658663.2 | 3 ± 1 | 10 ± 1 | 19 ± 0 |
| AD-1633467.2 | 6 ± 2 | 22 ± 1 | 39 ± 6 | AD-1658664.2 | 3 ± 1 | 8 ± 2 | 13 ± 2 |
| AD-1633468.2 | 85 ± 8 | 104 ± 9 | 114 ± 3 | AD-1658665.2 | 52 ± 6 | 67 ± 5 | 89 ± 7 |
| AD-1633604.2 | 82 ± 13 | 103 ± 14 | 118 ± 17 | AD-1658801.2 | 51 ± 6 | 75 ± 6 | 106 ± 12 |
| AD-1633621.2 | 4 ± 1 | 8 ± 1 | 21 ± 2 | AD-1658818.2 | 3 ± 1 | 7 ± 2 | 16 ± 2 |
| AD-1633622.2 | 24 ± 5 | 53 ± 5 | 84 ± 10 | AD-1658819.2 | 25 ± 4 | 48 ± 13 | 75 ± 7 |
| AD-1633623.2 | 46 ± 4 | 75 ± 9 | 118 ± 6 | AD-1658820.2 | 10 ± 2 | 35 ± 4 | 58 ± 6 |
| AD-1633627.2 | 6 ± 1 | 20 ± 4 | 34 ± 1 | AD-1658824.2 | 4 ± 1 | 8 ± 2 | 19 ± 3 |
| AD-1633628.2 | 4 ± 1 | 11 ± 2 | 19 ± 2 | AD-1658825.2 | 2 ± 1 | 7 ± 1 | 14 ± 3 |
| AD-1633630.2 | 41 ± 7 | 56 ± 5 | 67 ± 15 | AD-1658827.2 | 15 ± 2 | 20 ± 5 | 53 ± 9 |
| AD-1633631.2 | 5 ± 1 | 11 ± 2 | 22 ± 4 | AD-1658828.2 | 3 ± 1 | 6 ± 1 | 10 ± 2 |
| AD-1633632.2 | 3 ± 1 | 8 ± 1 | 17 ± 2 | AD-1658829.2 | 3 ± 1 | 9 ± 3 | 17 ± 5 |
| AD-1633633.1 | 4 ± 1 | 9 ± 1 | 33 ± 9 | AD-1658830.1 | 3 ± 1 | 9 ± 2 | 20 ± 6 |
| AD-1633634.1 | 3 ± 1 | 5 ± 1 | 19 ± 4 | AD-1658831.1 | 1 ± 0 | 2 ± 0 | 6 ± 2 |
| AD-1633635.1 | 20 ± 3 | 36 ± 6 | 71 ± 8 | AD-1658832.1 | 4 ± 1 | 10 ± 2 | 29 ± 4 |
| AD-1633636.1 | 1 ± 0 | 2 ± 0 | 6 ± 1 | AD-1658833.1 | 1 ± 0 | 1 ± 0 | 4 ± 1 |
| AD-1633637.1 | 9 ± 1 | 25 ± 7 | 54 ± 17 | AD-1658834.1 | 2 ± 1 | 2 ± 0 | 5 ± 2 |
| AD-1633638.1 | 24 ± 5 | 36 ± 9 | 71 ± 10 | AD-1658835.1 | 7 ± 1 | 13 ± 1 | 30 ± 6 |
| AD-1633639.1 | 1 ± 0 | 2 ± 0 | 5 ± 1 | AD-1658836.1 | 3 ± 1 | 5 ± 2 | 12 ± 4 |
| AD-1633640.1 | 4 ± 1 | 6 ± 1 | 17 ± 1 | AD-1658837.1 | 3 ± 0 | 5 ± 1 | 18 ± 5 |
| AD-1633641.1 | 7 ± 3 | 17 ± 3 | 31 ± 8 | AD-1658838.1 | 2 ± 0 | 3 ± 1 | 8 ± 1 |
| AD-1633642.1 | 39 ± 7 | 65 ± 11 | 71 ± 12 | AD-1658839.1 | 2 ± 1 | 4 ± 1 | 10 ± 2 |
| AD-1633643.1 | 23 ± 1 | 39 ± 9 | 70 ± 14 | AD-1658840.1 | 8 ± 2 | 10 ± 2 | 34 ± 8 |
| AD-1633644.1 | 3 ± 0 | 8 ± 2 | 25 ± 4 | AD-1658841.1 | 2 ± 1 | 8 ± 1 | 16 ± 4 |
| AD-1633645.1 | 9 ± 2 | 20 ± 3 | 37 ± 5 | AD-1658842.1 | 2 ± 1 | 3 ± 1 | 8 ± 2 |
| AD-1633646.1 | 42 ± 6 | 48 ± 8 | 55 ± 8 | AD-1658843.1 | 19 ± 5 | 28 ± 3 | 48 ± 4 |
| AD-1633647.1 | 87 ± 9 | 78 ± 10 | 89 ± 9 | AD-1658844.1 | 66 ± 12 | 81 ± 11 | 93 ± 8 |
| AD-1633648.1 | 8 ± 3 | 13 ± 3 | 32 ± 4 | AD-1658845.1 | 2 ± 0 | 5 ± 0 | 14 ± 1 |
| AD-1633649.1 | 27 ± 3 | 48 ± 8 | 87 ± 3 | AD-1658846.1 | 2 ± 1 | 7 ± 3 | 19 ± 5 |
| AD-1633650.1 | 31 ± 8 | 54 ± 7 | 82 ± 8 | AD-1658847.1 | 17 ± 8 | 30 ± 5 | 53 ± 4 |
| AD-1633651.1 | 44 ± 6 | 63 ± 4 | 75 ± 8 | AD-1658848.1 | 19 ± 3 | 32 ± 5 | 53 ± 4 |
| AD-1633652.1 | 10 ± 1 | 18 ± 5 | 28 ± 3 | AD-1658849.1 | 17 ± 3 | 25 ± 4 | 46 ± 6 |
| AD-84707.2 | 2 ± 1 | 5 ± 2 | 12 ± 2 | AD-1321390.2 | 2 ± 0 | 3 ± 1 | 8 ± 2 |
| AD-1633653.1 | 6 ± 1 | 15 ± 3 | 28 ± 7 | AD-1658850.1 | 5 ± 1 | 10 ± 3 | 16 ± 4 |
| AD-1633678.1 | 113 ± 6 | 99 ± 13 | 96 ± 9 | AD-1658875.1 | 67 ± 7 | 103 ± 12 | 95 ± 2 |
| AD-1633683.1 | 114 ± 14 | 118 ± 4 | 110 ± 8 | AD-1658880.1 | 88 ± 8 | 96 ± 11 | 98 ± 10 |
| AD-1633732.1 | 1 ± 0 | 3 ± 1 | 5 ± 2 | AD-1658929.1 | 2 ± 1 | 5 ± 1 | 6 ± 2 |
| AD-1633733.1 | 6 ± 2 | 10 ± 2 | 20 ± 2 | AD-1658930.1 | 4 ± 1 | 8 ± 3 | 15 ± 2 |
| AD-1633734.1 | 20 ± 3 | 32 ± 4 | 51 ± 6 | AD-1658931.1 | 2 ± 0 | 3 ± 0 | 5 ± 2 |
| AD-1633735.1 | 12 ± 4 | 21 ± 1 | 38 ± 6 | AD-1658932.1 | 3 ± 1 | 9 ± 1 | 21 ± 5 |
| AD-1633736.1 | 5 ± 1 | 8 ± 1 | 20 ± 2 | AD-1658933.1 | 1 ± 0 | 2 ± 1 | 4 ± 1 |
| AD-1633737.1 | 27 ± 3 | 41 ± 2 | 63 ± 5 | AD-1658934.1 | 3 ± 1 | 8 ± 2 | 19 ± 3 |
| AD-1633738.1 | 36 ± 3 | 47 ± 2 | 66 ± 3 | AD-1658935.1 | 9 ± 2 | 15 ± 2 | 31 ± 5 |
| AD-1633739.1 | 2 ± 1 | 4 ± 1 | 8 ± 2 | AD-1658936.1 | 1 ± 0 | 2 ± 1 | 4 ± 1 |
| AD-1633740.1 | 1 ± 0 | 2 ± 0 | 4 ± 1 | AD-1658937.1 | 2 ± 0 | 2 ± 0 | 3 ± 1 |
| AD-1633741.1 | 5 ± 1 | 10 ± 2 | 22 ± 2 | AD-1658938.1 | 2 ± 0 | 4 ± 0 | 6 ± 1 |
| AD-1633742.1 | 12 ± 1 | 22 ± 2 | 37 ± 8 | AD-1658939.1 | 5 ± 1 | 8 ± 1 | 16 ± 1 |
| AD-1633743.1 | 5 ± 2 | 6 ± 2 | 14 ± 3 | AD-1658940.1 | 4 ± 1 | 6 ± 1 | 8 ± 2 |
| AD-1633759.1 | 1 ± 0 | 2 ± 1 | 4 ± 1 | AD-1658954.1 | 1 ± 0 | 2 ± 1 | 3 ± 2 |
| AD-1684522.1 | 4 ± 2 | 7 ± 2 | 13 ± 3 | AD-1658955.1 | 3 ± 1 | 6 ± 1 | 9 ± 2 |
| AD-1684523.1 | 3 ± 1 | 6 ± 1 | 7 ± 2 | AD-1658956.1 | 3 ± 1 | 5 ± 1 | 7 ± 1 |
| AD-1684524.1 | 2 ± 1 | 3 ± 1 | 8 ± 2 | AD-1658957.1 | 2 ± 0 | 3 ± 1 | 5 ± 1 |
| AD-1684525.1 | 15 ± 5 | 18 ± 4 | 34 ± 5 | AD-1658958.1 | 2 ± 1 | 4 ± 2 | 5 ± 3 |
| AD-1684526.1 | 2 ± 1 | 3 ± 1 | 7 ± 1 | AD-1658959.1 | 1 ± 0 | 1 ± 0 | 2 ± 1 |
| AD-1684527.1 | 1 ± 1 | 3 ± 1 | 4 ± 1 | AD-1658960.1 | 1 ± 1 | 2 ± 1 | 3 ± 1 |
| AD-1633777.1 | 14 ± 3 | 18 ± 3 | 38 ± 5 | AD-1658992.1 | 2 ± 1 | 5 ± 1 | 16 ± 2 |
| AD-1633779.1 | 11 ± 4 | 27 ± 7 | 41 ± 7 | AD-1658994.1 | 3 ± 1 | 6 ± 1 | 19 ± 4 |
| AD-1633780.1 | 30 ± 5 | 52 ± 8 | 61 ± 11 | AD-1658995.1 | 51 ± 6 | 52 ± 7 | 55 ± 9 |
| AD-1633840.1 | 66 ± 13 | 91 ± 7 | 99 ± 13 | AD-1659055.1 | 7 ± 1 | 19 ± 3 | 25 ± 3 |
| AD-1633841.1 | 96 ± 13 | 99 ± 25 | 88 ± 9 | AD-1659056.1 | 93 ± 10 | 103 ± 9 | 92 ± 11 |
| AD-1633842.1 | 4 ± 2 | 22 ± 6 | 49 ± 10 | AD-1659057.1 | 2 ± 1 | 13 ± 3 | 31 ± 5 |
| AD-1633843.1 | 6 ± 1 | 36 ± 2 | 55 ± 13 | AD-1659058.1 | 3 ± 1 | 12 ± 2 | 37 ± 7 |
| AD-1633844.1 | 22 ± 3 | 47 ± 10 | 81 ± 9 | AD-1659059.1 | 5 ± 1 | 27 ± 6 | 54 ± 8 |
| AD-1633845.1 | 28 ± 4 | 83 ± 9 | 71 ± 7 | AD-1659060.1 | 14 ± 2 | 41 ± 5 | 65 ± 13 |
| AD-1633846.1 | 10 ± 2 | 32 ± 6 | 58 ± 14 | AD-1659061.1 | 1 ± 0 | 12 ± 3 | 22 ± 8 |
| AD-84712.2 | 2 ± 0 | 8 ± 1 | 17 ± 4 | AD-1659062.1 | 1 ± 0 | 6 ± 2 | 12 ± 3 |
| AD-1633847.1 | 14 ± 3 | 69 ± 10 | 86 ± 5 | AD-1659063.1 | 5 ± 1 | 28 ± 8 | 54 ± 4 |
| AD-1633848.1 | 12 ± 4 | 40 ± 2 | 80 ± 20 | AD-1659064.1 | 3 ± 1 | 22 ± 6 | 31 ± 1 |
| AD-1633849.1 | 8 ± 1 | 34 ± 3 | 64 ± 6 | AD-1659065.1 | 6 ± 2 | 21 ± 5 | 50 ± 12 |
| AD-1633850.1 | 2 ± 0 | 12 ± 3 | 23 ± 1 | AD-1659066.1 | 2 ± 1 | 9 ± 1 | 27 ± 2 |
| AD-1633851.1 | 6 ± 2 | 37 ± 5 | 52 ± 7 | AD-1659067.1 | 3 ± 0 | 24 ± 5 | 46 ± 8 |
| AD-1633852.1 | 8 ± 2 | 39 ± 5 | 62 ± 8 | AD-1659068.1 | 7 ± 1 | 20 ± 6 | 39 ± 4 |
| AD-1633853.1 | 1 ± 0 | 7 ± 2 | 17 ± 4 | AD-1659069.1 | 1 ± 0 | 3 ± 1 | 14 ± 3 |
| AD-1633854.1 | 22 ± 3 | 59 ± 9 | 85 ± 9 | AD-1659070.1 | 7 ± 2 | 27 ± 4 | 52 ± 12 |
| AD-1633855.1 | 21 ± 3 | 82 ± 14 | 91 ± 12 | AD-1659071.1 | 2 ± 0 | 13 ± 3 | 35 ± 5 |
| AD-1684528.1 | 7 ± 2 | 30 ± 5 | 61 ± 8 | AD-1684529.1 | 3 ± 0 | 12 ± 3 | 34 ± 7 |
| AD-1684530.1 | 3 ± 1 | 18 ± 1 | 45 ± 4 | AD-1684531.1 | 2 ± 0 | 9 ± 1 | 33 ± 5 |
| AD-1684532.1 | 7 ± 1 | 28 ± 3 | 44 ± 5 | AD-1684533.1 | 3 ± 1 | 19 ± 8 | 47 ± 11 |
| AD-1684534.1 | 3 ± 1 | 15 ± 1 | 30 ± 3 | AD-1684535.1 | 4 ± 3 | 4 ± 0 | 12 ± 2 |
| AD-1633946.1 | 3 ± 1 | 10 ± 3 | 22 ± 3 | AD-1659162.1 | 1 ± 0 | 6 ± 2 | 19 ± 4 |
| AD-67328.2 | 1 ± 0 | 7 ± 1 | 20 ± 3 | AD-1321384.2 | 3 ± 0 | 9 ± 1 | 22 ± 4 |
| AD-1633947.1 | 3 ± 1 | 10 ± 2 | 23 ± 1 | AD-1659163.1 | 2 ± 1 | 10 ± 1 | 22 ± 3 |
| AD-1633948.1 | 2 ± 1 | 17 ± 9 | 32 ± 5 | AD-1659164.1 | 1 ± 0 | 4 ± 1 | 11 ± 3 |
| AD-1633949.1 | 3 ± 1 | 21 ± 1 | 51 ± 8 | AD-1659165.1 | 3 ± 0 | 12 ± 2 | 23 ± 2 |
| AD-84700.2 | 11 ± 2 | 37 ± 3 | 66 ± 4 | AD-1659166.1 | 2 ± 0 | 12 ± 1 | 25 ± 4 |
| AD-1633950.1 | 1 ± 0 | 9 ± 2 | 29 ± 5 | AD-1659167.1 | 1 ± 0 | 6 ± 2 | 18 ± 2 |
| AD-1633951.1 | 5 ± 1 | 29 ± 6 | 60 ± 10 | AD-1659168.1 | 4 ± 1 | 15 ± 1 | 33 ± 7 |
| AD-1633991.1 | 3 ± 1 | 19 ± 3 | 46 ± 4 | AD-1659208.1 | 2 ± 0 | 11 ± 2 | 26 ± 4 |
| AD-1633992.1 | 14 ± 1 | 45 ± 5 | 77 ± 9 | AD-1659209.1 | 3 ± 1 | 8 ± 2 | 23 ± 5 |
| AD-1633993.1 | 27 ± 5 | 57 ± 10 | 73 ± 3 | AD-1659210.1 | 11 ± 1 | 43 ± 5 | 70 ± 8 |
| AD-1634065.1 | 13 ± 3 | 48 ± 6 | 79 ± 1 | AD-1659282.1 | 4 ± 1 | 18 ± 4 | 44 ± 6 |
| AD-1634066.1 | 45 ± 5 | 77 ± 9 | 98 ± 12 | AD-1659283.1 | 30 ± 2 | 69 ± 14 | 80 ± 11 |
| AD-1634067.1 | 25 ± 5 | 68 ± 6 | 87 ± 11 | AD-1659284.1 | 24 ± 4 | 60 ± 2 | 71 ± 3 |
| AD-1634068.1 | 10 ± 2 | 38 ± 4 | 58 ± 3 | AD-1659285.1 | 11 ± 1 | 38 ± 2 | 64 ± 5 |
| AD-84730.2 | 7 ± 1 | 19 ± 4 | 30 ± 8 | AD-1659286.1 | 5 ± 1 | 21 ± 7 | 41 ± 6 |
| AD-1634069.1 | 5 ± 1 | 19 ± 4 | 34 ± 6 | AD-1659287.1 | 2 ± 1 | 12 ± 2 | 22 ± 5 |
| AD-1634070.1 | 2 ± 1 | 12 ± 4 | 24 ± 4 | AD-1659288.1 | 3 ± 1 | 13 ± 3 | 22 ± 2 |
| AD-1634071.1 | 29 ± 3 | 65 ± 6 | 98 ± 16 | AD-1659289.1 | 24 ± 6 | 55 ± 8 | 79 ± 12 |
| AD-1684536.1 | 54 ± 6 | 83 ± 5 | 84 ± 5 | AD-1684537.1 | 75 ± 4 | 105 ± 5 | 109 ± 19 |
| AD-1684538.1 | 64 ± 6 | 103 ± 6 | 102 ± 20 | AD-1684539.1 | 61 ± 5 | 105 ± 8 | 83 ± 8 |
| AD-1684540.1 | 73 ± 5 | 65 ± 4 | 87 ± 9 | AD-1684541.1 | 57 ± 9 | 67 ± 10 | 96 ± 15 |
| AD-1684542.1 | 89 ± 22 | 65 ± 5 | 97 ± 9 | AD-1684543.1 | 85 ± 10 | 78 ± 1 | 104 ± 19 |
| AD-1684544.1 | 98 ± 15 | 87 ± 8 | 117 ± 19 | AD-1684545.1 | 56 ± 9 | 56 ± 6 | 94 ± 6 |
| AD-1684546.1 | 79 ± 9 | 84 ± 9 | 94 ± 12 | AD-1684547.1 | 23 ± 3 | 45 ± 3 | 64 ± 8 |
| AD-1684548.1 | 58 ± 9 | 62 ± 12 | 86 ± 18 | AD-1684549.1 | 16 ± 1 | 44 ± 8 | 57 ± 8 |
| AD-1684550.1 | 47 ± 7 | 63 ± 15 | 100 ± 17 | AD-1684551.1 | 37 ± 3 | 50 ± 7 | 80 ± 3 |
| AD-1684552.1 | 55 ± 5 | 74 ± 14 | 112 ± 20 | AD-1684553.1 | 31 ± 5 | 54 ± 7 | 76 ± 9 |
| AD-1684554.1 | 75 ± 8 | 98 ± 17 | 107 ± 18 | AD-1684555.1 | 25 ± 2 | 50 ± 9 | 53 ± 5 |
| AD-1684556.1 | 76 ± 10 | 82 ± 12 | 115 ± 26 | AD-1684557.1 | 26 ± 7 | 45 ± 8 | 75 ± 20 |
| AD-1684558.1 | 57 ± 9 | 65 ± 7 | 101 ± 14 | AD-1684559.1 | 21 ± 6 | 41 ± 5 | 69 ± 6 |
| AD-1634072.1 | 8 ± 1 | 19 ± 3 | 32 ± 8 | AD-1684560.1 | 6 ± 0 | 15 ± 3 | 25 ± 4 |
| AD-1634073.1 | 5 ± 1 | 13 ± 3 | 18 ± 3 | AD-1684561.1 | 3 ± 1 | 10 ± 1 | 11 ± 3 |
| AD-1634074.1 | 3 ± 0 | 8 ± 1 | 15 ± 3 | AD-1659290.1 | 3 ± 1 | 9 ± 1 | 15 ± 1 |
| AD-1634075.1 | 5 ± 1 | 15 ± 2 | 32 ± 9 | AD-1659291.1 | 5 ± 1 | 15 ± 2 | 19 ± 3 |
| AD-1634076.1 | 11 ± 2 | 36 ± 5 | 45 ± 4 | AD-1659292.1 | 9 ± 1 | 25 ± 5 | 37 ± 9 |
| AD-1634077.1 | 12 ± 2 | 30 ± 5 | 59 ± 8 | AD-1659293.1 | 3 ± 2 | 10 ± 2 | 16 ± 1 |
| AD-1634078.1 | 11 ± 3 | 29 ± 7 | 55 ± 8 | AD-1659294.1 | 5 ± 1 | 13 ± 3 | 24 ± 4 |
| AD-1634079.1 | 3 ± 1 | 10 ± 3 | 21 ± 4 | AD-1659295.1 | 2 ± 0 | 4 ± 0 | 11 ± 1 |
| AD-1634080.1 | 10 ± 3 | 34 ± 2 | 48 ± 7 | AD-1659296.1 | 6 ± 2 | 15 ± 2 | 35 ± 7 |
| AD-1634081.1 | 5 ± 1 | 20 ± 2 | 38 ± 8 | AD-1659297.1 | 14 ± 2 | 26 ± 2 | 52 ± 7 |
| AD-1634082.1 | 27 ± 3 | 60 ± 4 | 79 ± 11 | AD-1659298.1 | 17 ± 3 | 34 ± 6 | 60 ± 10 |
| AD-1634105.1 | 2 ± 0 | 4 ± 1 | 12 ± 2 | AD-1659321.1 | 2 ± 1 | 5 ± 0 | 15 ± 2 |
| AD-1634107.1 | 6 ± 2 | 21 ± 2 | 37 ± 9 | AD-1659323.1 | 6 ± 1 | 13 ± 3 | 25 ± 2 |
| AD-1634109.1 | 17 ± 2 | 40 ± 5 | 66 ± 8 | AD-1659325.1 | 7 ± 2 | 17 ± 3 | 39 ± 6 |
| AD-1634110.1 | 9 ± 2 | 26 ± 5 | 42 ± 2 | AD-1659326.1 | 6 ± 1 | 19 ± 1 | 41 ± 6 |
| AD-1634111.1 | 5 ± 2 | 11 ± 3 | 25 ± 3 | AD-1659327.1 | 3 ± 1 | 14 ± 1 | 18 ± 2 |
| AD-1634112.1 | 10 ± 1 | 32 ± 2 | 50 ± 9 | AD-1659328.1 | 3 ± 1 | 10 ± 1 | 24 ± 6 |
| AD-1634113.1 | 7 ± 2 | 17 ± 3 | 37 ± 4 | AD-1659329.1 | 4 ± 1 | 15 ± 1 | 29 ± 6 |
| AD-1634114.1 | 17 ± 5 | 33 ± 1 | 68 ± 8 | AD-1659330.1 | 2 ± 1 | 5 ± 1 | 11 ± 2 |
| AD-1634115.1 | 35 ± 5 | 63 ± 11 | 110 ± 7 | AD-1659331.1 | 7 ± 1 | 24 ± 4 | 43 ± 7 |
| AD-84724.2 | 24 ± 2 | 45 ± 6 | 61 ± 8 | AD-1659332.1 | 5 ± 1 | 11 ± 1 | 24 ± 2 |
| AD-1634116.1 | 5 ± 2 | 15 ± 3 | 33 ± 5 | AD-1659333.1 | 3 ± 2 | 9 ± 1 | 17 ± 3 |
| AD-1634117.1 | 9 ± 1 | 32 ± 3 | 45 ± 6 | AD-1659334.1 | 10 ± 3 | 29 ± 1 | 42 ± 6 |
| AD-1634118.1 | 25 ± 4 | 46 ± 5 | 79 ± 4 | AD-1659335.1 | 6 ± 1 | 20 ± 3 | 31 ± 4 |
| AD-68579.2 | 17 ± 5 | 41 ± 5 | 69 ± 6 | AD-1659336.1 | 3 ± 1 | 10 ± 2 | 17 ± 3 |
| AD-1634119.1 | 4 ± 1 | 14 ± 1 | 33 ± 4 | AD-1659337.1 | 3 ± 0 | 10 ± 2 | 21 ± 2 |
| AD-1634120.1 | 11 ± 3 | 33 ± 6 | 80 ± 5 | AD-1659338.1 | 3 ± 1 | 8 ± 3 | 20 ± 1 |
| AD-1634121.1 | 8 ± 2 | 22 ± 6 | 44 ± 4 | AD-1659339.1 | 2 ± 1 | 6 ± 1 | 18 ± 3 |
| AD-1634122.1 | 18 ± 13 | 29 ± 2 | 60 ± 7 | AD-1659340.1 | 2 ± 0 | 15 ± 3 | 24 ± 4 |
| AD-1634123.1 | 4 ± 1 | 14 ± 3 | 41 ± 1 | AD-1659341.1 | 6 ± 1 | 23 ± 3 | 46 ± 8 |
| AD-1634124.1 | 5 ± 1 | 17 ± 6 | 32 ± 5 | AD-1659342.1 | 3 ± 0 | 12 ± 2 | 19 ± 3 |
| AD-1634125.1 | 4 ± 1 | 11 ± 2 | 22 ± 2 | AD-1659343.1 | 4 ± 1 | 10 ± 3 | 26 ± 5 |
| AD-1634126.1 | 6 ± 1 | 16 ± 4 | 30 ± 4 | AD-1659344.1 | 2 ± 0 | 8 ± 1 | 16 ± 3 |
| AD-1634127.1 | 3 ± 0 | 7 ± 2 | 16 ± 1 | AD-1659345.1 | 3 ± 0 | 6 ± 1 | 12 ± 2 |
| AD-1634128.1 | 1 ± 0 | 1 ± 1 | 3 ± 2 | AD-1659346.1 | 1 ± 0 | 2 ± 1 | 5 ± 1 |
| AD-1634129.1 | 2 ± 1 | 6 ± 3 | 15 ± 2 | AD-1659347.1 | 1 ± 0 | 1 ± 0 | 5 ± 2 |
| AD-1634130.1 | 4 ± 1 | 13 ± 1 | 24 ± 4 | AD-1659348.1 | 1 ± 1 | 1 ± 0 | 3 ± 1 |
| AD-1684562.1 | 16 ± 4 | 33 ± 3 | 54 ± 7 | AD-1659349.1 | 9 ± 2 | 23 ± 2 | 40 ± 1 |
| AD-1684563.1 | 1 ± 0 | 1 ± 1 | 3 ± 0 | AD-1659350.1 | 1 ± 0 | 1 ± 1 | 2 ± 1 |
| AD-1684564.1 | 1 ± 0 | 2 ± 1 | 2 ± 1 | AD-1659351.1 | 1 ± 0 | 1 ± 0 | 1 ± 0 |
| AD-1634135.1 | 2 ± 1 | 7 ± 1 | 13 ± 4 | AD-1659371.1 | 1 ± 0 | 2 ± 1 | 4 ± 1 |
| AD-1634136.1 | 2 ± 1 | 7 ± 3 | 12 ± 1 | AD-1659372.1 | 3 ± 1 | 9 ± 1 | 21 ± 4 |
| AD-1634137.1 | 1 ± 0 | 2 ± 0 | 2 ± 1 | AD-1659373.1 | 1 ± 1 | 2 ± 1 | 3 ± 1 |
| AD-1634146.1 | 1 ± 0 | 2 ± 0 | 3 ± 1 | AD-1659382.1 | 1 ± 0 | 1 ± 0 | 1 ± 0 |
| AD-1634147.1 | 1 ± 0 | 4 ± 1 | 10 ± 3 | AD-1659383.1 | 1 ± 1 | 2 ± 0 | 2 ± 0 |
| AD-68585.2 | 5 ± 2 | 20 ± 2 | 29 ± 4 | AD-1659384.1 | 2 ± 1 | 7 ± 1 | 11 ± 5 |
| AD-1634148.1 | 2 ± 0 | 5 ± 1 | 9 ± 2 | AD-1659385.1 | 1 ± 0 | 1 ± 0 | 1 ± 0 |
| AD-1634149.1 | 1 ± 0 | 1 ± 0 | 3 ± 1 | AD-1659386.1 | 1 ± 0 | 1 ± 0 | 3 ± 0 |
| AD-1634150.1 | 1 ± 0 | 1 ± 0 | 4 ± 1 | AD-1659387.1 | 1 ± 0 | 1 ± 0 | 2 ± 1 |
| AD-1634151.1 | 0 ± 0 | 1 ± 0 | 2 ± 0 | AD-1659388.1 | 0 ± 0 | 1 ± 0 | 1 ± 0 |
| AD-1634152.1 | 1 ± 0 | 1 ± 0 | 2 ± 1 | AD-1659389.1 | 1 ± 0 | 1 ± 0 | 2 ± 0 |
| AD-1634153.1 | 2 ± 1 | 2 ± 1 | 5 ± 1 | AD-1659390.1 | 1 ± 0 | 2 ± 0 | 5 ± 2 |
| AD-1634162.1 | 3 ± 0 | 5 ± 2 | 12 ± 2 | AD-1659399.1 | 3 ± 1 | 5 ± 1 | 8 ± 1 |
| AD-1634163.1 | 4 ± 0 | 11 ± 2 | 18 ± 3 | AD-1659400.1 | 9 ± 2 | 18 ± 5 | 30 ± 3 |
| AD-1634164.1 | 29 ± 6 | 35 ± 3 | 48 ± 7 | AD-1659401.1 | 26 ± 1 | 23 ± 3 | 33 ± 4 |
| AD-1634165.1 | 19 ± 3 | 19 ± 2 | 30 ± 5 | AD-1659402.1 | 20 ± 3 | 20 ± 5 | 24 ± 3 |
| AD-1634169.1 | 65 ± 4 | 70 ± 7 | 79 ± 5 | AD-1659406.1 | 63 ± 18 | 59 ± 11 | 53 ± 6 |
| AD-1634170.1 | 84 ± 13 | 74 ± 9 | 72 ± 1 | AD-1659407.1 | 58 ± 5 | 69 ± 8 | 68 ± 6 |
| AD-1634171.1 | 81 ± 15 | 75 ± 8 | 85 ± 7 | AD-1659408.1 | 86 ± 25 | 91 ± 9 | 81 ± 5 |
| AD-1634172.1 | 50 ± 13 | 53 ± 7 | 67 ± 8 | AD-1659409.1 | 58 ± 4 | 68 ± 6 | 65 ± 7 |
| AD-1634173.1 | 60 ± 5 | 61 ± 5 | 56 ± 7 | AD-1659410.1 | 49 ± 6 | 49 ± 2 | 52 ± 7 |
| AD-1634174.1 | 69 ± 2 | 73 ± 5 | 77 ± 9 | AD-1659411.1 | 36 ± 3 | 37 ± 4 | 39 ± 2 |
| AD-1634175.1 | 61 ± 9 | 70 ± 9 | 81 ± 8 | AD-1659412.1 | 36 ± 4 | 41 ± 7 | 42 ± 5 |
| AD-1634176.1 | 70 ± 5 | 82 ± 5 | 88 ± 7 | AD-1659413.1 | 64 ± 9 | 68 ± 4 | 74 ± 6 |
| AD-1634177.1 | 57 ± 12 | 65 ± 9 | 67 ± 4 | AD-1659414.1 | 52 ± 10 | 67 ± 3 | 67 ± 3 |
| AD-1634178.1 | 63 ± 8 | 76 ± 6 | 74 ± 4 | AD-1659415.1 | 58 ± 5 | 76 ± 4 | 67 ± 9 |
| AD-1634179.1 | 79 ± 11 | 83 ± 18 | 103 ± 9 | AD-1659416.1 | 65 ± 6 | 86 ± 7 | 92 ± 7 |
| AD-1634180.1 | 47 ± 7 | 67 ± 10 | 72 ± 14 | AD-1659417.1 | 58 ± 11 | 74 ± 7 | 73 ± 15 |
| AD-1634181.1 | 71 ± 11 | 79 ± 6 | 72 ± 16 | AD-1659418.1 | 54 ± 9 | 69 ± 7 | 56 ± 13 |
| AD-1634182.1 | 62 ± 5 | 77 ± 3 | 86 ± 4 | AD-1659419.1 | 57 ± 17 | 68 ± 7 | 76 ± 7 |
| AD-1634183.1 | 61 ± 11 | 70 ± 11 | 81 ± 11 | AD-1659420.1 | 63 ± 8 | 79 ± 11 | 86 ± 5 |
| AD-1634184.1 | 64 ± 12 | 74 ± 9 | 80 ± 16 | AD-1659421.1 | 33 ± 3 | 56 ± 8 | 62 ± 10 |
| AD-1634185.1 | 58 ± 9 | 71 ± 9 | 76 ± 12 | AD-1659422.1 | 58 ± 7 | 72 ± 18 | 61 ± 6 |
| AD-1634186.1 | 60 ± 9 | 86 ± 12 | 86 ± 10 | AD-1659423.1 | 62 ± 11 | 81 ± 15 | 82 ± 9 |
| AD-1634187.1 | 43 ± 10 | 51 ± 9 | 42 ± 8 | AD-1659424.1 | 81 ± 9 | 92 ± 11 | 82 ± 27 |
| AD-1634188.1 | 37 ± 5 | 53 ± 8 | 48 ± 10 | AD-1659425.1 | 42 ± 8 | 52 ± 14 | 73 ± 4 |
| AD-1634189.1 | 49 ± 5 | 70 ± 17 | 87 ± 8 | AD-1659426.1 | 47 ± 9 | 51 ± 9 | 67 ± 5 |
| AD-1634190.1 | 50 ± 9 | 56 ± 10 | 72 ± 5 | AD-1659427.1 | 46 ± 6 | 59 ± 16 | 76 ± 9 |
| AD-1634191.1 | 44 ± 3 | 56 ± 7 | 65 ± 7 | AD-1659428.1 | 56 ± 6 | 50 ± 8 | 80 ± 15 |
| AD-1634192.1 | 45 ± 10 | 49 ± 5 | 61 ± 5 | AD-1659429.1 | 34 ± 5 | 42 ± 7 | 50 ± 5 |
| AD-1634193.1 | 47 ± 10 | 42 ± 8 | 62 ± 10 | AD-1659430.1 | 63 ± 6 | 47 ± 7 | 69 ± 11 |
| AD-1634194.1 | 49 ± 2 | 53 ± 2 | 62 ± 7 | AD-1659431.1 | 49 ± 8 | 50 ± 7 | 63 ± 11 |
| AD-1634195.1 | 52 ± 6 | 59 ± 11 | 80 ± 7 | AD-1659432.1 | 59 ± 5 | 73 ± 7 | 82 ± 13 |
| AD-1634196.1 | 57 ± 7 | 49 ± 3 | 71 ± 11 | AD-1659433.1 | 50 ± 12 | 43 ± 7 | 68 ± 11 |
| AD-1634197.1 | 52 ± 3 | 62 ± 4 | 70 ± 11 | AD-1659434.1 | 52 ± 5 | 63 ± 5 | 72 ± 8 |
| AD-1634199.1 | 61 ± 8 | 51 ± 5 | 60 ± 13 | AD-1659436.1 | 65 ± 5 | 53 ± 3 | 78 ± 8 |
| AD-1634200.1 | 62 ± 8 | 50 ± 5 | 73 ± 15 | AD-1659437.1 | 57 ± 4 | 61 ± 3 | 55 ± 5 |
| AD-1634203.1 | 77 ± 3 | 63 ± 7 | 86 ± 6 | AD-1659440.1 | 65 ± 4 | 54 ± 6 | 64 ± 13 |
| AD-1634209.1 | 91 ± 15 | 74 ± 8 | 112 ± 17 | AD-1659446.1 | 78 ± 8 | 69 ± 3 | 88 ± 12 |
| AD-1634210.1 | 73 ± 6 | 65 ± 6 | 85 ± 9 | AD-1659447.1 | 72 ± 5 | 68 ± 6 | 93 ± 10 |
| AD-1634211.1 | 74 ± 13 | 69 ± 8 | 85 ± 8 | AD-1659448.1 | 66 ± 12 | 50 ± 9 | 78 ± 9 |
| AD-1634212.1 | 43 ± 3 | 45 ± 3 | 68 ± 8 | AD-1659449.1 | 68 ± 3 | 61 ± 5 | 91 ± 9 |
| AD-1634213.1 | 71 ± 2 | 77 ± 17 | 98 ± 21 | AD-1659450.1 | 73 ± 2 | 61 ± 6 | 103 ± 10 |
| AD-1634214.1 | 85 ± 7 | 59 ± 5 | 85 ± 15 | AD-1659451.1 | 52 ± 9 | 49 ± 9 | 56 ± 7 |
| AD-1634215.1 | 82 ± 5 | 79 ± 9 | 108 ± 9 | AD-1659452.1 | 67 ± 8 | 59 ± 6 | 83 ± 6 |
| AD-1634216.1 | 76 ± 9 | 70 ± 6 | 113 ± 7 | AD-1659453.1 | 77 ± 10 | 64 ± 3 | 90 ± 12 |
| AD-1634217.1 | 92 ± 6 | 83 ± 1 | 116 ± 15 | AD-1659454.1 | 75 ± 4 | 70 ± 6 | 101 ± 6 |
| AD-1684565.1 | 85 ± 7 | 104 ± 15 | 84 ± 14 | AD-1659481.1 | 49 ± 5 | 49 ± 5 | 61 ± 5 |
| AD-1684566.1 | 122 ± 27 | 74 ± 9 | 98 ± 5 | AD-1659482.1 | 67 ± 6 | 51 ± 4 | 108 ± 15 |
| AD-1684567.1 | 85 ± 10 | 74 ± 7 | 98 ± 7 | AD-1659483.1 | 89 ± 2 | 77 ± 9 | 102 ± 5 |
| AD-1684568.1 | 71 ± 6 | 82 ± 12 | 107 ± 14 | AD-1659485.1 | 67 ± 4 | 60 ± 6 | 91 ± 11 |
| AD-1684569.1 | 68 ± 2 | 80 ± 4 | 100 ± 5 | AD-1659487.1 | 68 ± 7 | 88 ± 15 | 91 ± 13 |
| AD-1684570.1 | 78 ± 7 | 83 ± 6 | 123 ± 12 | AD-1659488.1 | 79 ± 7 | 87 ± 13 | 111 ± 9 |
| AD-1634234.1 | 45 ± 8 | 73 ± 12 | 91 ± 5 | AD-1659489.1 | 81 ± 5 | 75 ± 10 | 97 ± 7 |
| AD-1634235.1 | 65 ± 9 | 72 ± 6 | 91 ± 4 | AD-1659490.1 | 47 ± 2 | 68 ± 4 | 89 ± 15 |
| AD-1634236.1 | 70 ± 8 | 75 ± 9 | 96 ± 15 | AD-1659491.1 | 32 ± 6 | 39 ± 3 | 48 ± 5 |
| AD-1634237.1 | 75 ± 7 | 86 ± 14 | 113 ± 11 | AD-1659492.1 | 36 ± 7 | 40 ± 4 | 48 ± 4 |
| AD-1634238.1 | 79 ± 13 | 91 ± 11 | 96 ± 12 | AD-1659493.1 | 74 ± 3 | 78 ± 4 | 104 ± 5 |
| AD-1634282.1 | 64 ± 7 | 58 ± 8 | 72 ± 6 | AD-1659537.1 | 63 ± 9 | 51 ± 8 | 61 ± 6 |
| AD-1634283.1 | 76 ± 8 | 66 ± 3 | 97 ± 18 | AD-1659538.1 | 59 ± 2 | 55 ± 5 | 71 ± 4 |
| AD-1634304.1 | 69 ± 7 | 68 ± 8 | 102 ± 16 | AD-1659559.1 | 70 ± 7 | 61 ± 11 | 85 ± 14 |
| AD-1634305.1 | 51 ± 3 | 44 ± 4 | 50 ± 12 | AD-1659560.1 | 49 ± 3 | 59 ± 3 | 55 ± 4 |
| AD-1634306.1 | 61 ± 5 | 65 ± 5 | 74 ± 4 | AD-1659561.1 | 51 ± 5 | 39 ± 5 | 73 ± 5 |
| AD-1634307.1 | 83 ± 7 | 80 ± 7 | 103 ± 2 | AD-1659562.1 | 74 ± 5 | 66 ± 8 | 93 ± 7 |
| AD-1634308.1 | 61 ± 4 | 73 ± 7 | 82 ± 7 | AD-1659563.1 | 69 ± 3 | 72 ± 4 | 98 ± 8 |
| AD-1634327.1 | 61 ± 8 | 64 ± 7 | 80 ± 15 | AD-1659582.1 | 49 ± 9 | 52 ± 2 | 74 ± 10 |
| AD-1634328.1 | 64 ± 6 | 64 ± 9 | 91 ± 4 | AD-1659583.1 | 44 ± 3 | 56 ± 4 | 70 ± 5 |
| AD-1634329.1 | 65 ± 3 | 64 ± 7 | 85 ± 5 | AD-1659584.1 | 60 ± 5 | 61 ± 9 | 88 ± 11 |
| AD-1634330.1 | 56 ± 2 | 50 ± 6 | 54 ± 11 | AD-1659585.1 | 72 ± 2 | 65 ± 7 | 81 ± 8 |
| AD-1634331.1 | 44 ± 10 | 31 ± 6 | 49 ± 9 | AD-1659586.1 | 53 ± 7 | 51 ± 9 | 72 ± 7 |
| AD-1634332.1 | 46 ± 10 | 49 ± 13 | 81 ± 3 | AD-1659587.1 | 34 ± 6 | 57 ± 1 | 52 ± 17 |
| AD-1634333.1 | 67 ± 10 | 59 ± 15 | 84 ± 13 | AD-1659588.1 | 64 ± 3 | 62 ± 11 | 97 ± 13 |

### EQUIVALENTS

[0723] Those skilled in the art will recognize, or be able to ascertain using no more than routine experimentation, many equivalents to the specific embodiments and methods described herein. Such equivalents are intended to be encompassed by the scope of the following claims.

We claim:

1. A double stranded ribonucleic acid (dsRNA) agent for inhibiting expression of angiotensinogen (AGT) in a cell, wherein the dsRNA agent comprises a sense strand and an antisense strand forming a double stranded region, wherein the antisense strand comprises a region of complementarity to an mRNA encoding AGT, and wherein the region of complementarity comprises at least 15 contiguous nucleotides differing by no more than 3 nucleotides from any one of the antisense nucleotide sequences in any one of Tables 2-7.

2. The dsRNA agent of claim 1, wherein the dsRNA agent comprises a sense strand comprising at least 15 contiguous nucleotides differing by no more than three nucleotides from any one of the nucleotide sequences of the sense strands in any one of Tables 2-7 and an antisense strand comprising at least 15 contiguous nucleotides differing by no more than three nucleotides from any one of the nucleotide sequences of the antisense strands in any one of Tables 2-7.

3. The dsRNA agent of claim 1, wherein the dsRNA agent comprises a sense strand comprising at least 15 contiguous nucleotides differing by no more than two nucleotides from any one of the nucleotide sequences of the sense strands in any one of Tables 2-7 and an antisense strand comprising at least 15 contiguous nucleotides differing by no more than two nucleotides from any one of the nucleotide sequences of the antisense strands in any one of Tables 2-7.

4. The dsRNA agent of claim 1, wherein the dsRNA agent comprises a sense strand comprising at least 15 contiguous nucleotides differing by no more than one nucleotide from any one of the nucleotide sequences of the sense strands in any one of Tables 2-7 and an antisense strand comprising at least 15 contiguous nucleotides differing by no more than one nucleotide from any one of the nucleotide sequences of the antisense strands in any one of Tables 2-7.

5. The dsRNA agent of claim 1, wherein the dsRNA agent comprises a sense strand comprising a nucleotide sequence selected from the group consisting of any one of the nucleotide sequences of the sense strands in any one of Tables 2-7 and an antisense strand comprising a nucleotide sequence selected from the group consisting of any one of the nucleotide sequences of the antisense strands in any one of Tables 2-7.

6. The dsRNA agent of claim 1, wherein the dsRNA agent comprises at least one modified nucleotide.

7. The dsRNA agent of claim 1 or 6, wherein substantially all of the nucleotides of the sense strand are modified nucleotides; substantially all of the nucleotides of the antisense strand are modified nucleotides; or substantially all of the nucleotides of the sense strand and substantially all of the nucleotides of the antisense strand are modified nucleotides.

8. The dsRNA agent of any one of claim 1, 6 or 7, wherein all of the nucleotides of the sense strand are modified nucleotides; all of the nucleotides of the antisense strand are modified nucleotides; or all of the nucleotides of the sense strand and all of the nucleotides of the antisense strand are modified nucleotides.

9. The dsRNA agent of any one of claims 6-8, wherein at least one of the modified nucleotides is selected from the group consisting of a deoxy-nucleotide, a 3′-terminal deoxythimidine (dT) nucleotide, a 2′-O-methyl modified nucleotide, a 2′-fluoro modified nucleotide, a 2′-deoxy-modified nucleotide, a locked nucleotide, a 2′-5′-linked ribonucleotide (3′-RNA), an unlocked nucleotide, a conformationally restricted nucleotide, a constrained ethyl nucleotide, an abasic nucleotide, a 2′-amino-modified nucleotide, a 2′-O-allyl-modified nucleotide, 2′-C-alkyl-modified nucleotide, 2′-hydroxly-modified nucleotide, a 2′-methoxyethyl modified nucleotide, a 2′-O-alkyl-modified nucleotide, a morpholino nucleotide, a phosphoramidate, a non-natural base comprising nucleotide, a tetrahydropyran modified nucleotide, a 1,5-anhydrohexitol modified nucleotide, a cyclohexenyl modified nucleotide, a nucleotide comprising a phosphorothioate group, a nucleotide comprising a methylphosphonate group, a nucleotide comprising a 5′-phosphate, a nucleotide comprising a 5′-phosphate mimic, a vinyl-phosphonate nucleotide, a thermally destabilizing nucleotide, a glycol modified nucleotide (GNA), a nucleotide comprising a 2′ phosphate, and a 2-O—(N-methylacetamide) modified nucleotide; and combinations thereof.

10. The dsRNA agent of any one of claims 6-8, wherein at least one of the modified nucleotides is selected from the group consisting of LNA, HNA, CeNA, 2′-methoxyethyl, 2′-O-alkyl, 2′-O-allyl, 2′-C-allyl, 2′-fluoro, 2′-deoxy, 2′-hydroxyl, and glycol; and combinations thereof.

11. The dsRNA agent of any one of claims 6-8, wherein at least one of the modified nucleotides is selected from the group consisting of a deoxy-nucleotide, a 2′-O-methyl modified nucleotide, a 2′-fluoro modified nucleotide, a 2′-deoxy-modified nucleotide, a glycol modified nucleotide (GNA), a nucleotide comprising a 2′ phosphate, and a nucleotide comprising a phosphorothioate group; and combinations thereof.

12. The dsRNA agent of any one of claims 6-8, wherein at least one of the modified nucleotides is a nucleotide modified with a thermally destabilizing nucleotide modification.

13. The dsRNA agent of claim 12, wherein the thermally destabilizing nucleotide modification is selected from the group consisting of an abasic modification; a mismatch with the opposing nucleotide in the duplex; a destabilizing sugar modification, a 2′-deoxy modification, an acyclic nucleotide, an unlocked nucleic acid (UNA), and a glycerol nucleic acid (GNA).

14. The dsRNA agent of any one of claims 1-13, wherein the double stranded region is 19-30 nucleotide pairs in length.

15. The dsRNA agent of claim 14, wherein the double stranded region is 19-25 nucleotide pairs in length.

16. The dsRNA agent of claim 14, wherein the double stranded region is 19-23 nucleotide pairs in length.

17. The dsRNA agent of claim 14, wherein the double stranded region is 23-27 nucleotide pairs in length.

18. The dsRNA agent of claim 14, wherein the double stranded region is 21-23 nucleotide pairs in length.

19. The dsRNA agent of any one of claims 1-18, wherein each strand is independently no more than 30 nucleotides in length.

20. The dsRNA agent of any one of claims 1-19, wherein the sense strand is 21 nucleotides in length and the antisense strand is 23 nucleotides in length.

21. The dsRNA agent of any one of claims 1-20, wherein the region of complementarity is at least 17 nucleotides in length.

22. The dsRNA agent of any one of claims 1-21, wherein the region of complementarity is between 19 and 23 nucleotides in length.

23. The dsRNA agent of any one of claims 1-22, wherein the region of complementarity is 19 nucleotides in length.

24. The dsRNA agent of any one of claims 1-23, wherein at least one strand comprises a 3′ overhang of at least 1 nucleotide.

25. The dsRNA agent of any one of claims 1-23, wherein at least one strand comprises a 3′ overhang of at least 2 nucleotides.

26. The dsRNA agent of any one of claims 1-25, further comprising a ligand.

27. The dsRNA agent of claim 26, wherein the ligand is conjugated to the 3′ end of the sense strand of the dsRNA agent.

28. The dsRNA agent of claim 26 or 27, wherein the ligand is an N-acetylgalactosamine (GalNAc) derivative.

29. The dsRNA agent of any one of claims 26-28, wherein the ligand is one or more GalNAc derivatives attached through a monovalent, bivalent, or trivalent branched linker.

30. The dsRNA agent of claim 28 or 29, wherein the ligand is

[chemical structure]

31. The dsRNA agent of claim 30, wherein the dsRNA agent is conjugated to the ligand as shown in the following schematic [chemical structure]
and, wherein X is O or S.

32. The dsRNA agent of claim 31, wherein the X is O.

33. The dsRNA agent of any one of claims 1-32, wherein the dsRNA agent further comprises at least one phosphorothioate or methylphosphonate internucleotide linkage.

34. The dsRNA agent of claim 33, wherein the phosphorothioate or methylphosphonate internucleotide linkage is at the 3′-terminus of one strand.

35. The dsRNA agent of claim 34, wherein the strand is the antisense strand.

36. The dsRNA agent of claim 34, wherein the strand is the sense strand.

37. The dsRNA agent of claim 33, wherein the phosphorothioate or methylphosphonate internucleotide linkage is at the 5′-terminus of one strand.

38. The dsRNA agent of claim 37, wherein the strand is the antisense strand.

39. The dsRNA agent of claim 37, wherein the strand is the sense strand.

40. The dsRNA agent of claim 33, wherein the phosphorothioate or methylphosphonate internucleotide linkage is at both the 5′- and 3′-terminus of one strand.

41. The dsRNA agent of claim 40, wherein the strand is the antisense strand.

42. The dsRNA agent of any one of claims 1-41, wherein the base pair at the 1 position of the 5′-end of the antisense strand of the duplex is an AU base pair.

43. A cell containing the dsRNA agent of any one of claims 1-42.

44. A pharmaceutical composition for inhibiting expression of a gene encoding angiotensinogen (AGT) comprising the dsRNA agent of any one of claims 1-42 and a pharmaceutically acceptable carrier.

45. The pharmaceutical composition of claim 44, wherein dsRNA agent is in an unbuffered solution.

46. The pharmaceutical composition of claim 45, wherein the unbuffered solution is saline or water.

47. The pharmaceutical composition of claim 44, wherein said dsRNA agent is in a buffer solution.

48. The pharmaceutical composition of claim 47, wherein the buffer solution comprises acetate, citrate, prolamine, carbonate, or phosphate or any combination thereof.

49. The pharmaceutical composition of claim 48, wherein the buffer solution is phosphate buffered saline (PBS).

50. A method of inhibiting expression of an angiotensinogen (AGT) gene in a cell, the method comprising contacting the cell with the dsRNA agent of any one of claims 1-42, or the pharmaceutical composition of any one of claims 44-49, thereby inhibiting expression of the AGT gene in the cell.

51. The method of claim 50, wherein the cell is within a subject.

52. The method of claim 51, wherein the subject is a human.

53. The method of claim 51, wherein the subject has an AGT-associated disorder.

54. The method of claim 53, wherein the AGT-associated disorder is selected from the group consisting of high blood pressure, hypertension, borderline hypertension, primary hypertension, secondary hypertension isolated systolic or diastolic hypertension, pregnancy-associated hypertension, diabetic hypertension, resistant hypertension, refractory hypertension, paroxysmal hypertension, renovascular hypertension, Goldblatt hypertension, hypertension associated with low plasma renin activity or plasma renin concentration, ocular hypertension, glaucoma, pulmonary hypertension, portal hypertension, systemic venous hypertension, systolic hypertension, labile hypertension; hypertensive heart disease, hypertensive nephropathy, atherosclerosis, arteriosclerosis, vasculopathy, diabetic nephropathy, diabetic retinopathy, chronic heart failure, cardiomyopathy, diabetic cardiac myopathy, glomerulosclerosis, coarctation of the aorta, aortic aneurism, ventricular fibrosis, heart failure, myocardial infarction, angina, stroke, renal disease, renal failure, systemic sclerosis, intrauterine growth restriction (IUGR), fetal growth restriction, obesity, liver steatosis/fatty liver, non-alcoholic Steatohepatitis (NASH), non-alcoholic fatty liver disease (NAFLD); glucose intolerance, type 2 diabetes (non-insulin dependent diabetes), and metabolic syndrome.

55. The method of claim 54, wherein the subject has a systolic blood pressure of at least 130 mm Hg or a diastolic blood pressure of at least 80 mm Hg.

56. The method of claim 54, wherein the subject has a systolic blood pressure of at least 140 mm Hg and a diastolic blood pressure of at least 80 mm Hg.

57. The method of claim 54, the subject is part of a group susceptible to salt sensitivity, is overweight, is obese, or is pregnant.

58. The method of any one of claims 50-57, wherein contacting the cell with the dsRNA agent inhibits the expression of AGT by at least 50%, 60%, 70%, 80%, 90%, or 95%.

59. The method of any one of claims 50-58, wherein inhibiting expression of AGT decreases AGT protein level in serum of the subject by at least 50%, 60%, 70%, 80%, 90%, or 95%.

60. A method of treating a subject having a disorder that would benefit from reduction in angiotensinogen (AGT) expression, comprising administering to the subject a therapeutically effective amount of the dsRNA agent of any one of claims 1-42, or the pharmaceutical composition of any one of claims 44-49, thereby treating the subject having the disorder that would benefit from reduction in AGT expression.

61. A method of preventing at least one symptom in a subject having a disorder that would benefit from reduction in angiotensinogen (AGT) expression, comprising administering to the subject a prophylactically effective amount of the dsRNA agent of any one of claims 1-42, or the pharmaceutical composition of any one of claims 44-49, thereby preventing at least one symptom in the subject having the disorder that would benefit from reduction in AGT expression.

62. The method of claim 60 or 61, wherein the disorder is an AGT-associated disorder.

63. The method of claim 62, wherein the AGT-associated disorder is selected from the group consisting of high blood pressure, hypertension, borderline hypertension, primary hypertension, secondary hypertension isolated systolic or diastolic hypertension, pregnancy-associated hypertension, diabetic hypertension, resistant hypertension, refractory hypertension, paroxysmal hypertension, renovascular hypertension, Goldblatt hypertension, hypertension associated with low plasma renin activity or plasma renin concentration, ocular hypertension, glaucoma, pulmonary hypertension, portal hypertension, systemic venous hypertension, systolic hypertension, labile hypertension; hypertensive heart disease, hypertensive nephropathy, atherosclerosis, arteriosclerosis, vasculopathy, diabetic nephropathy, diabetic retinopathy, chronic heart failure, cardiomyopathy, diabetic cardiac myopathy, glomerulosclerosis, coarctation of the aorta, aortic aneurism, ventricular fibrosis, heart failure, myocardial infarction, angina, stroke, renal disease, renal failure, systemic sclerosis, intrauterine growth restriction (IUGR), fetal growth restriction, obesity, liver steatosis/fatty liver, non-alcoholic Steatohepatitis (NASH), non-alcoholic fatty liver disease (NAFLD); glucose intolerance, type 2 diabetes (non-insulin dependent diabetes), and metabolic syndrome.

64. The method of claim 63, wherein the subject has a systolic blood pressure of at least 130 mm Hg or a diastolic blood pressure of at least 80 mm Hg.

65. The method of claim 63, wherein the subject has a systolic blood pressure of at least 140 mm Hg and a diastolic blood pressure of at least 80 mm Hg.

66. The method of claim 63, the subject is part of a group susceptible to salt sensitivity, is overweight, is obese, or is pregnant.

67. The method of any one of claims 60-66, wherein the subject is a human.

68. The method of any one of claims 60-67, wherein administration of the dsRNA agent to the subject causes a decrease in AGT protein accumulation in the subject.

69. The method of any one of claims 60-68, wherein the dsRNA agent is administered to the subject at a dose of about 0.01 mg/kg to about 50 mg/kg.

70. The method of any one of claims 60-69, wherein the dsRNA agent is administered to the subject subcutaneously.

71. The method of any one of claims 60-70, further comprising determining the level of AGT in a sample(s) from the subject.

72. The method of claim 71, wherein the level of AGT in the subject sample(s) is an AGT protein level in a blood or serum or urine or liver tissue sample(s).

73. The method of any one of claims 60-72, further comprising determining the level of bradykinin, prekallikrein, or blood pressure in the subject.

74. The method of any one of claims 60-73, further comprising administering to the subject an additional therapeutic agent for treatment of an AGT-associated disorder.

75. The method of claim 74, wherein the additional therapeutic agent is selected from the group consisting of a diuretic, an angiotensin converting enzyme (ACE) inhibitor, an angiotensin II receptor antagonist, a beta-blocker, a vasodialator, a calcium channel blocker, an aldosterone antagonist, an alpha2-agonist, a renin inhibitor, an alpha-blocker, a peripheral acting adrenergic agent, a selective D1 receptor partial agonist, a nonselective alpha-adrenergic antagonist, a synthetic, a steroidal antimineralocorticoid agent, an angiotensin receptor-neprilysin inhibitors (ARNi), Entresto®, sacubitril/valsartan; or an endothelin receptor antagonist (ERA), sitaxentan, ambrisentan, atrasentan, BQ-123, zibotentan, bosentan, macitentan, and tezosentan; a combination of any of the foregoing; and a hypertension therapeutic agent formulated as a combination of agents.

76. The method of claim 74, wherein the additional therapeutic agent comprises an angiotensin II receptor antagonist.

77. The method of claim 76, wherein the angiotensin II receptor antagonist is selected from the group consisting of losartan, valsartan, olmesartan, eprosartan, and azilsartan.

78. A kit comprising the dsRNA agent of any one of claims 1-42 or the pharmaceutical composition of any one of claims 44-49.

79. A vial comprising the dsRNA agent of any one of claims 1-42 or the pharmaceutical composition of any one of claims 44-49.

80. A syringe comprising the dsRNA agent of any one of claims 1-42 or the pharmaceutical composition of any one of claims 44-49.

81. An RNA-induced silencing complex (RISC) comprising an antisense strand of any of the dsRNA agents of claims 1-42.

The application's sequence listing, which the Patent Office published only in electronic form, follows.

SEQUENCE LISTING (3691 sequences)

SEQ ID NO: 1 - DNA, 2587 bp, Homo sapiens
  source 1..2587: mol_type = genomic DNA
atcccatgagcgggcagcagggtcagaagtggcccccgtgttgcctaagcaagactctcccctgccctctgccctctgcacctccggcctgcatgtccctgtggcctcttgggggtacatctcccggggctgggtcagaaggcctgggtggttggcctcaggctgtcacacacctagggagatgctcccgtttctgggaaccttggccccgactcctgcaaacttcggtaaatgtgtaactcgaccctgcaccggctcactctgttcagcagtgaaactctgcatcgatcactaagacttcctggaagaggtcccagcgtgagtgtcgcttctggcatctgtccttctggccagcctgtggtctggccaagtgatgtaaccctcctctccagcctgtgcacaggcagcctgggaacagctccatccccacccctcagctataaatagggcatcgtgacccggccgggggaagaagctgccgttgttctgggtactacagcagaagggtatgcggaagcgagcaccccagtctgagatggctcctgccggtgtgagcctgagggccaccatcctctgcctcctggcctgggctggcctggctgcaggtgaccgggtgtacatacaccccttccacctcgtcatccacaatgagagtacctgtgagcagctggcaaaggccaatgccgggaagcccaaagaccccaccttcatacctgctccaattcaggccaagacatcccctgtggatgaaaaggccctacaggaccagctggtgctagtcgctgcaaaacttgacaccgaagacaagttgagggccgcaatggtcgggatgctggccaacttcttgggcttccgtatatatggcatgcacagtgagctatggggcgtggtccatggggccaccgtcctctccccaacggctgtctttggcaccctggcctctctctatctgggagccttggaccacacagctgacaggctacaggcaatcctgggtgttccttggaaggacaagaactgcacctcccggctggatgcgcacaaggtcctgtctgccctgcaggctgtacagggcctgctagtggcccagggcagggctgatagccaggcccagctgctgctgtccacggtggtgggcgtgttcacagccccaggcctgcacctgaagcagccgtttgtgcagggcctggctctctatacccctgtggtcctcccacgctctctggacttcacagaactggatgttgctgctgagaagattgacaggttcatgcaggctgtgacaggatggaagactggctgctccctgatgggagccagtgtggacagcaccctggctttcaacacctacgtccacttccaagggaagatgaagggcttctccctgctggccgagccccaggagttctgggtggacaacagcacctcagtgtctgttcccatgctctctggcatgggcaccttccagcactggagtgacatccaggacaacttctcggtgactcaagtgcccttcactgagagcgcctgcctgctgctgatccagcctcactatgcctctgacctggacaaggtggagggtctcactttccagcaaaactccctcaactggatgaagaaactatctccccggaccatccacctgaccatgccccaactggtgctgcaaggatcttatgacctgcaggacctgctcgcccaggctgagctgcccgccattctgcacaccgagctgaacctgcaaaaattgagcaatgaccgcatcagggtgggggaggtgctgaacagcattttttttgagcttgaagcggatgagagagagcccacagagtctacccaacagcttaacaagcctgaggtcttggaggtgaccctgaaccgcccattcctgtttgctgtgtatgatcaaagcgccactgccctgcacttcctgggccgcgtggccaacccgctgagcacagcatgaggccagggccccagaacacagtgcctggcaaggcctctgcccctggcctttgaggcaaaggccagcagcagataacaaccccggacaaatcagcgatgtgtcacccccagtctcccaccttttcttctaatgagtcgactttgagctggaaagcagccgtttctccttggtctaagtgtgctgcatggagtgagcagtagaagcctgcagcggcacaaatgcacctcccagtttgctgggtttattttagagaatgggggtggggaggcaagaaccagtgtttagcgcgggactactgttccaaaaagaattccaaccgaccagcttgtttgtgaaacaaaaaagtgttcccttttcaagttgagaacaaaaattgggttttaaaattaaagtatacatttttgcattgccttcggtttgtatttagtgtcttgaatgtaagaacatgacctccgtgtagtgtctgtaataccttagttttttccacagatgcttgtgatttttgaacaatacgtgaaagatgcaagcacctgaatttctgtttgaatgcggaaccatagctggttatttctcccttgtgttagtaataaacgtcttgccacaataagcctccaaaaaaaa

SEQ ID NO: 2 - DNA, 2587 bp, Homo sapiens
  source 1..2587: mol_type = genomic DNA
ttttttttggaggcttattgtggcaagacgtttattactaacacaagggagaaataaccagctatggttccgcattcaaacagaaattcaggtgcttgcatctttcacgtattgttcaaaaatcacaagcatctgtggaaaaaactaaggtattacagacactacacggaggtcatgttcttacattcaagacactaaatacaaaccgaaggcaatgcaaaaatgtatactttaattttaaaacccaatttttgttctcaacttgaaaagggaacacttttttgtttcacaaacaagctggtcggttggaattctttttggaacagtagtcccgcgctaaacactggttcttgcctccccacccccattctctaaaataaacccagcaaactgggaggtgcatttgtgccgctgcaggcttctactgctcactccatgcagcacacttagaccaaggagaaacggctgctttccagctcaaagtcgactcattagaagaaaaggtgggagactgggggtgacacatcgctgatttgtccggggttgttatctgctgctggcctttgcctcaaaggccaggggcagaggccttgccaggcactgtgttctggggccctggcctcatgctgtgctcagcgggttggccacgcggcccaggaagtgcagggcagtggcgctttgatcatacacagcaaacaggaatgggcggttcagggtcacctccaagacctcaggcttgttaagctgttgggtagactctgtgggctctctctcatccgcttcaagctcaaaaaaaatgctgttcagcacctcccccaccctgatgcggtcattgctcaatttttgcaggttcagctcggtgtgcagaatggcgggcagctcagcctgggcgagcaggtcctgcaggtcataagatccttgcagcaccagttggggcatggtcaggtggatggtccggggagatagtttcttcatccagttgagggagttttgctggaaagtgagaccctccaccttgtccaggtcagaggcatagtgaggctggatcagcagcaggcaggcgctctcagtgaagggcacttgagtcaccgagaagttgtcctggatgtcactccagtgctggaaggtgcccatgccagagagcatgggaacagacactgaggtgctgttgtccacccagaactcctggggctcggccagcagggagaagcccttcatcttcccttggaagtggacgtaggtgttgaaagccagggtgctgtccacactggctcccatcagggagcagccagtcttccatcctgtcacagcctgcatgaacctgtcaatcttctcagcagcaacatccagttctgtgaagtccagagagcgtgggaggaccacaggggtatagagagccaggccctgcacaaacggctgcttcaggtgcaggcctggggctgtgaacacgcccaccaccgtggacagcagcagctgggcctggctatcagccctgccctgggccactagcaggccctgtacagcctgcagggcagacaggaccttgtgcgcatccagccgggaggtgcagttcttgtccttccaaggaacacccaggattgcctgtagcctgtcagctgtgtggtccaaggctcccagatagagagaggccagggtgccaaagacagccgttggggagaggacggtggccccatggaccacgccccatagctcactgtgcatgccatatatacggaagcccaagaagttggccagcatcccgaccattgcggccctcaacttgtcttcggtgtcaagttttgcagcgactagcaccagctggtcctgtagggccttttcatccacaggggatgtcttggcctgaattggagcaggtatgaaggtggggtctttgggcttcccggcattggcctttgccagctgctcacaggtactctcattgtggatgacgaggtggaaggggtgtatgtacacccggtcacctgcagccaggccagcccaggccaggaggcagaggatggtggccctcaggctcacaccggcaggagccatctcagactggggtgctcgcttccgcatacccttctgctgtagtacccagaacaacggcagcttcttcccccggccgggtcacgatgccctatttatagctgaggggtggggatggagctgttcccaggctgcctgtgcacaggctggagaggagggttacatcacttggccagaccacaggctggccagaaggacagatgccagaagcgacactcacgctgggacctcttccaggaagtcttagtgatcgatgcagagtttcactgctgaacagagtgagccggtgcagggtcgagttacacatttaccgaagtttgcaggagtcggggccaaggttcccagaaacgggagcatctccctaggtgtgtgacagcctgaggccaaccacccaggccttctgacccagccccgggagatgtacccccaagaggccacagggacatgcaggccggaggtgcagagggcagagggcaggggagagtcttgcttaggcaacacgggggccacttctgaccctgctgcccgctcatgggat

SEQ ID NO: 3 - DNA, 2116 bp, Homo sapiens
  source 1..2116: mol_type = genomic DNA
gaagaagctgccgttgttctgggtactacagcagaagggtatgcggaagcgagcaccccagtctgagatggctcctgccggtgtgagcctgagggccaccatcctctgcctcctggcctgggctggcctggctgcaggtgaccgggtgtacatacaccccttccacctcgtcatccacaatgagagtacctgtgagcagctggcaaaggccaatgccgggaagcccaaagaccccaccttcatacctgctccaattcaggccaagacatcccctgtggatgaaaaggccctacaggaccagctggtgctagtcgctgcaaaacttgacaccgaagacaagttgagggccgcaatggtcgggatgctggccaacttcttgggcttccgtatatatggcatgcacagtgagctatggggcgtggtccatggggccaccgtcctctccccaacggctgtctttggcaccctggcctctctctatctgggagccttggaccacacagctgacaggctacaggcaatcctgggtgttccttggaaggacaagaactgcacctcccggctggatgcgcacaaggtcctgtctgccctgcaggctgtacagggcctgctagtggcccagggcagggctgatagccaggcccagctgctgctgtccacggtggtgggcgtgttcacagccccaggcctgcacctgaagcagccgtttgtgcagggcctggctctctatacccctgtggtcctcccacgctctctggacttcacagaactggatgttgctgctgagaagattgacaggttcatgcaggctgtgacaggatggaagactggctgctccctgatgggagccagtgtggacagcaccctggctttcaacacctacgtccacttccaagggaagatgaagggcttctccctgctggccgagccccaggagttctgggtggacaacagcacctcagtgtctgttcccatgctctctggcatgggcaccttccagcactggagtgacatccaggacaacttctcggtgactcaagtgcccttcactgagagcgcctgcctgctgctgatccagcctcactatgcctctgacctggacaaggtggagggtctcactttccagcaaaactccctcaactggatgaagaaactatctccccggaccatccacctgaccatgccccaactggtgctgcaaggatcttatgacctgcaggacctgctcgcccaggctgagctgcccgccattctgcacaccgagctgaacctgcaaaaattgagcaatgaccgcatcagggtgggggaggtgctgaacagcattttttttgagcttgaagcggatgagagagagcccacagagtctacccaacagcttaacaagcctgaggtcttggaggtgaccctgaaccgcccattcctgtttgctgtgtatgatcaaagcgccactgccctgcacttcctgggccgcgtggccaacccgctgagcacagcatgaggccagggccccagaacacagtgcctggcaaggcctctgcccctggcctttgaggcaaaggccagcagcagataacaaccccggacaaatcagcgatgtgtcacccccagtctcccaccttttcttctaatgagtcgactttgagctggaaagcagccgtttctccttggtctaagtgtgctgcatggagtgagcagtagaagcctgcagcggcacaaatgcacctcccagtttgctgggtttattttagagaatgggggtggggaggcaagaaccagtgtttagcgcgggactactgttccaaaaagaattccaaccgaccagcttgtttgtgaaacaaaaaagtgttcccttttcaagttgagaacaaaaattgggttttaaaattaaagtatacatttttgcattgccttcggtttgtatttagtgtcttgaatgtaagaacatgacctccgtgtagtgtctgtaataccttagttttttccacagatgcttgtgatttttgaacaatacgtgaaagatgcaagcacctgaatttctgtttgaatgcggaaccatagctggttatttctcccttgtgttagtaataaacgtcttgccacaataagcctccaaaaa

SEQ ID NO: 4 - DNA, 2116 bp, Homo sapiens
  source 1..2116: mol_type = genomic DNA
tttttggaggcttattgtggcaagacgtttattactaacacaagggagaaataaccagctatggttccgcattcaaacagaaattcaggtgcttgcatctttcacgtattgttcaaaaatcacaagcatctgtggaaaaaactaaggtattacagacactacacggaggtcatgttcttacattcaagacactaaatacaaaccgaaggcaatgcaaaaatgtatactttaattttaaaacccaatttttgttctcaacttgaaaagggaacacttttttgtttcacaaacaagctggtcggttggaattctttttggaacagtagtcccgcgctaaacactggttcttgcctccccacccccattctctaaaataaacccagcaaactgggaggtgcatttgtgccgctgcaggcttctactgctcactccatgcagcacacttagaccaaggagaaacggctgctttccagctcaaagtcgactcattagaagaaaaggtgggagactgggggtgacacatcgctgatttgtccggggttgttatctgctgctggcctttgcctcaaaggccaggggcagaggccttgccaggcactgtgttctggggccctggcctcatgctgtgctcagcgggttggccacgcggcccaggaagtgcagggcagtggcgctttgatcatacacagcaaacaggaatgggcggttcagggtcacctccaagacctcaggcttgttaagctgttgggtagactctgtgggctctctctcatccgcttcaagctcaaaaaaaatgctgttcagcacctcccccaccctgatgcggtcattgctcaatttttgcaggttcagctcggtgtgcagaatggcgggcagctcagcctgggcgagcaggtcctgcaggtcataagatccttgcagcaccagttggggcatggtcaggtggatggtccggggagatagtttcttcatccagttgagggagttttgctggaaagtgagaccctccaccttgtccaggtcagaggcatagtgaggctggatcagcagcaggcaggcgctctcagtgaagggcacttgagtcaccgagaagttgtcctggatgtcactccagtgctggaaggtgcccatgccagagagcatgggaacagacactgaggtgctgttgtccacccagaactcctggggctcggccagcagggagaagcccttcatcttcccttggaagtggacgtaggtgttgaaagccagggtgctgtccacactggctcccatcagggagcagccagtcttccatcctgtcacagcctgcatgaacctgtcaatcttctcagcagcaacatccagttctgtgaagtccagagagcgtgggaggaccacaggggtatagagagccaggccctgcacaaacggctgcttcaggtgcaggcctggggctgtgaacacgcccaccaccgtggacagcagcagctgggcctggctatcagccctgccctgggccactagcaggccctgtacagcctgcagggcagacaggaccttgtgcgcatccagccgggaggtgcagttcttgtccttccaaggaacacccaggattgcctgtagcctgtcagctgtgtggtccaaggctcccagatagagagaggccagggtgccaaagacagccgttggggagaggacggtggccccatggaccacgccccatagctcactgtgcatgccatatatacggaagcccaagaagttggccagcatcccgaccattgcggccctcaacttgtcttcggtgtcaagttttgcagcgactagcaccagctggtcctgtagggccttttcatccacaggggatgtcttggcctgaattggagcaggtatgaaggtggggtctttgggcttcccggcattggcctttgccagctgctcacaggtactctcattgtggatgacgaggtggaaggggtgtatgtacacccggtcacctgcagccaggccagcccaggccaggaggcagaggatggtggccctcaggctcacaccggcaggagccatctcagactggggtgctcgcttccgcatacccttctgctgtagtacccagaacaacggcagcttcttc

SEQ ID NO: 5 - DNA, 1834 bp, Macaca fascicularis
  source 1..1834: mol_type = genomic DNA
aagaagctgccattgttctgggtactacagcagaagggtatgcagaagcgagcaccccagtccgagatggctcctgccagcgtgagcctgagggccaccatcctctgcctcctggcctgggctggcctggccacaggtgaccgggtgtacatacaccccttccacctcgtcatccacaatgagagtacctgtgagcagctggcaaaggccgatgctgggaagcccaaagatcccaccttcacacctgttccgatacaggccaagacgtctcctgtggatgaaaaggccctgcaggaccagctagtgctggttgccgcaaaactcgacaccgaggacaagttgagagccgcgatggtcgggatgctggccaacttcttgggcttccgtatatatggcatgcacagtgagctatggggcgtggtccatggggccaccatcctctccccaacggctgtctttggcaccctggcctctctctacctgggagcgttggaccacacagccgacaggctacaggcaatcctgggcgtcccttggaaggacaagaactgcacctcccggctggatgcgcacaaggtcctctctgccctgcaggctgtacagggcctgctggtggcccagggcagggctgacggccagtcccagctgctgttgtccacagtggtgggtctcttcacagccccagatctgcacctgaagcagccgtttgtgcagggcctggctctctatgcccctgtggtcctcccacgctctctggacttcacagacctggaagtcgctgctgagaagattgacaggttcatgcaggctgtgacaggatggaagattagcagccccctgacgggagccagtgcggacagcaccctggttttcaacacctacgtccatttccaagggaagatgagggacttcttcctgctggctgagccccaggagttctgggtggacaacagcacctcagtgtctgtccccatgctgtctggcgtgggcaccttccagcactggagcgacgcccaggacaacttctcagtgactcaagtgccctttactgagagcgcctgcttgctgctgattcagcctcactacgcctctgacctggacaaggtggagggtctcactttccagcaaaactccctcaactggatgaagaaactgtctccccgggccatccacctgaccatgccccgactggtgctgcgaggatcttatgacctgcaggacctgcttgcccaggctgagctgcccgccattctgggcaccgagctgaacctgcaaaaattgagcaatgacaacctcagggtggggaaggtgctgaacagcattctttttgaactcgaagcggatgagagagagcccacagagtctacccgacagctgaacaggcctgagttcttggaggtgaccctggaccgcccattcctgtttgctgtgtatgatcaaagtgccactgccctgcacttcctgggccgtgtggccaacccgctgagcccagcatgaggccagggccccagaacacagcgcctggcaaggcctctgcccctggcctttgaggcgaaggccagcagcagatatgtaactctggaaaaaccagcgatttgtcacccccagtctcccaccttttcttctaatgagtcaacttcgagctggaaagcagtcgtttctccttggtctaagtggtgctgcgtgagcagtaagaaacctgtggcagcacaaatgcgcctcccaggttgctgggtttattttagagaatgggggtggggaggcaagaaccagtgtttagcgcgggaccaccgttccaaaaagaattccaaccgaccagcttgtttgtgaaaca

SEQ ID NO: 6 - DNA, 1834 bp, Macaca fascicularis
  source 1..1834: mol_type = genomic DNA
tgtttcacaaacaagctggtcggttggaattctttttggaacggtggtcccgcgctaaacactggttcttgcctccccacccccattctctaaaataaacccagcaacctgggaggcgcatttgtgctgccacaggtttcttactgctcacgcagcaccacttagaccaaggagaaacgactgctttccagctcgaagttgactcattagaagaaaaggtgggagactgggggtgacaaatcgctggtttttccagagttacatatctgctgctggccttcgcctcaaaggccaggggcagaggccttgccaggcgctgtgttctggggccctggcctcatgctgggctcagcgggttggccacacggcccaggaagtgcagggcagtggcactttgatcatacacagcaaacaggaatgggcggtccagggtcacctccaagaactcaggcctgttcagctgtcgggtagactctgtgggctctctctcatccgcttcgagttcaaaaagaatgctgttcagcaccttccccaccctgaggttgtcattgctcaatttttgcaggttcagctcggtgcccagaatggcgggcagctcagcctgggcaagcaggtcctgcaggtcataagatcctcgcagcaccagtcggggcatggtcaggtggatggcccggggagacagtttcttcatccagttgagggagttttgctggaaagtgagaccctccaccttgtccaggtcagaggcgtagtgaggctgaatcagcagcaagcaggcgctctcagtaaagggcacttgagtcactgagaagttgtcctgggcgtcgctccagtgctggaaggtgcccacgccagacagcatggggacagacactgaggtgctgttgtccacccagaactcctggggctcagccagcaggaagaagtccctcatcttcccttggaaatggacgtaggtgttgaaaaccagggtgctgtccgcactggctcccgtcagggggctgctaatcttccatcctgtcacagcctgcatgaacctgtcaatcttctcagcagcgacttccaggtctgtgaagtccagagagcgtgggaggaccacaggggcatagagagccaggccctgcacaaacggctgcttcaggtgcagatctggggctgtgaagagacccaccactgtggacaacagcagctgggactggccgtcagccctgccctgggccaccagcaggccctgtacagcctgcagggcagagaggaccttgtgcgcatccagccgggaggtgcagttcttgtccttccaagggacgcccaggattgcctgtagcctgtcggctgtgtggtccaacgctcccaggtagagagaggccagggtgccaaagacagccgttggggagaggatggtggccccatggaccacgccccatagctcactgtgcatgccatatatacggaagcccaagaagttggccagcatcccgaccatcgcggctctcaacttgtcctcggtgtcgagttttgcggcaaccagcactagctggtcctgcagggccttttcatccacaggagacgtcttggcctgtatcggaacaggtgtgaaggtgggatctttgggcttcccagcatcggcctttgccagctgctcacaggtactctcattgtggatgacgaggtggaaggggtgtatgtacacccggtcacctgtggccaggccagcccaggccaggaggcagaggatggtggccctcaggctcacgctggcaggagccatctcggactggggtgctcgcttctgcatacccttctgctgtagtacccagaacaatggcagcttctt

SEQ ID NO: 7 - DNA, 1856 bp, Mus musculus
  source 1..1856: mol_type = genomic DNA
gatagctgtgcttgtctaggttggcgctgaaggatacacagaagcaaatgcacagatcggagatgactcccacgggggcaggcctgaaggccaccatcttctgcatcttgacctgggtcagcctgacggctggggaccgcgtatacatccaccccttccatctcctttaccacaacaagagcacctgcgcccagctggagaaccccagtgtggagacactcccagagtcaacgttcgagcctgtgcccattcaggccaagacctcccctgtgaatgagaagaccctgcatgatcagctcgtgctggccgccgagaagctagaggatgaggaccggaagcgggctgcccaggtcgcaatgatcgccaacttcgtgggcttccgcatgtacaagatgctgaatgaggcaggaagtggggccagtggggccatcctctcaccaccagctctctttggcaccctggtctctttctaccttggatccttagatcccacggccagccagctgcagacgctgctggatgtccctgtgaaggagggagactgcacctcccgactagatggacacaaggtcctcgctgccctgcgggccattcagggcttgctggtcacccagggtgggagcagcagccagacacccctgctacagtccattgtggtggggctcttcactgctccaggctttcgtctaaagcactcatttgttcagagcctggctctctttacccctgccctcttcccacgctctctggatttatccactgacccagttcttgccactgagaaaatcaacaggttcataaaggctgtgacagggtggaagatgaacttgccactggagggggtcagtacagacagcaccctacttttcaacacctacgttcacttccaaggaacgatgagaggtttctctcagctgcctggagtccatgaattctgggtggacaacagcatctcggtgtctgtgcccatgatctccggcactggcaacttccagcactggagtgacacccagaacaacttctccgtgacgtgcgtgcccctaggtgagagagccaccctgctgctcatccagccccactgcacctcagatctcgacagggtggaggccctcatcttccggaacgacctcctgacttggatagagaacccgcctcctcgggccatccgcctgactctgccccagctggaaatccgaggatcctacaatctgcaggacctgctggctgaggacaagctgcccacccttttgggtgcggaggcaaatctgaacaacattggtgacaccaacccccgagtgggagaggttctcaatagcatcctcctcgaactcaaagcaggagaggaggaacagccgaccacgtctgtccagcagcctggctcaccggaggcactggatgtgaccctgagcagccccttcctgttcgccatctacgagcaggactcaggcacgctgcactttctgggcagagtgaataacccccagagtgtggtgtgaggccttgtgcctagccatggagacaaggccggtgtcggagaaccgttctgggcaaaactcagtgctgtcacccctggctccccatcacgccttgtagcgcggcagaggccgtctccttggagactgcgctgaccgagaataaatgatgagcagcagagcctcctgggatgtgggtttgtttggatactggggtgacagccagaagctggcactctgcacaggactgccactctggaagaaatttggaccaaaaaactgtttgtgacaccaaaaagcacccccccttttttttatttgaggacagaaattgggttttaacattaaaatgcacattatccccttaaaaaaaaaaaaaaaaaa

SEQ ID NO: 8 - DNA, 1856 bp, Mus musculus
  source 1..1856: mol_type = genomic DNA
ttttttttttttttttttaaggggataatgtgcattttaatgttaaaacccaatttctgtcctcaaataaaaaaaagggggggtgctttttggtgtcacaaacagttttttggtccaaatttcttccagagtggcagtcctgtgcagagtgccagcttctggctgtcaccccagtatccaaacaaacccacatcccaggaggctctgctgctcatcatttattctcggtcagcgcagtctccaaggagacggcctctgccgcgctacaaggcgtgatggggagccaggggtgacagcactgagttttgcccagaacggttctccgacaccggccttgtctccatggctaggcacaaggcctcacaccacactctgggggttattcactctgcccagaaagtgcagcgtgcctgagtcctgctcgtagatggcgaacaggaaggggctgctcagggtcacatccagtgcctccggtgagccaggctgctggacagacgtggtcggctgttcctcctctcctgctttgagttcgaggaggatgctattgagaacctctcccactcgggggttggtgtcaccaatgttgttcagatttgcctccgcacccaaaagggtgggcagcttgtcctcagccagcaggtcctgcagattgtaggatcctcggatttccagctggggcagagtcaggcggatggcccgaggaggcgggttctctatccaagtcaggaggtcgttccggaagatgagggcctccaccctgtcgagatctgaggtgcagtggggctggatgagcagcagggtggctctctcacctaggggcacgcacgtcacggagaagttgttctgggtgtcactccagtgctggaagttgccagtgccggagatcatgggcacagacaccgagatgctgttgtccacccagaattcatggactccaggcagctgagagaaacctctcatcgttccttggaagtgaacgtaggtgttgaaaagtagggtgctgtctgtactgaccccctccagtggcaagttcatcttccaccctgtcacagcctttatgaacctgttgattttctcagtggcaagaactgggtcagtggataaatccagagagcgtgggaagagggcaggggtaaagagagccaggctctgaacaaatgagtgctttagacgaaagcctggagcagtgaagagccccaccacaatggactgtagcaggggtgtctggctgctgctcccaccctgggtgaccagcaagccctgaatggcccgcagggcagcgaggaccttgtgtccatctagtcgggaggtgcagtctccctccttcacagggacatccagcagcgtctgcagctggctggccgtgggatctaaggatccaaggtagaaagagaccagggtgccaaagagagctggtggtgagaggatggccccactggccccacttcctgcctcattcagcatcttgtacatgcggaagcccacgaagttggcgatcattgcgacctgggcagcccgcttccggtcctcatcctctagcttctcggcggccagcacgagctgatcatgcagggtcttctcattcacaggggaggtcttggcctgaatgggcacaggctcgaacgttgactctgggagtgtctccacactggggttctccagctgggcgcaggtgctcttgttgtggtaaaggagatggaaggggtggatgtatacgcggtccccagccgtcaggctgacccaggtcaagatgcagaagatggtggccttcaggcctgcccccgtgggagtcatctccgatctgtgcatttgcttctgtgtatccttcagcgccaacctagacaagcacagctatc

SEQ ID NO: 9 - DNA, 1958 bp, Rattus norvegicus
  source 1..1958: mol_type = genomic DNA
ccttgctccatcttggctaagcctggattcccatggtcccccgacctgggtcctcccccagcctctgtacagagtagcctgggaatagatccatcttcaccccctcgagtataaataaggctgcttggttcaccaggggatagctgtgcttgtctgggctggagctaaaggacacacagaagcaagtccacagatccgtgatgactcccacgggggcaggcctgaaggccaccatcttctgcatcctgacctgggtcagcctgacagctggggaccgcgtatacatccacccctttcatctcctctactacagcaagagcacctgcgcccagctggagaaccccagtgtggagacgctcccagagccaacctttgagcctgtgcccattcaggccaagacctcccccgtggatgagaagaccctgcgagataagctcgtgctggccactgagaagctagaggctgaggatcggcagcgagctgcccaggtcgcgatgattgccaacttcatgggtttccgcatgtacaagatgctgagtgaggcaagaggtgtagccagtggggccgtcctctctccaccggccctctttggcaccctggtctctttctaccttggatcgttggatcccacggccagccagttgcaggtgctgctgggcgtccctgtgaaggagggagactgcacctcccggctggacggacataaggtcctcactgccctgcaggctgttcagggcttgctggtcacccagggtggaagcagcagccagacacccctgctacagtccaccgtggtgggcctcttcactgccccaggcttgcgcctaaaacagccatttgttgagagcttgggtcccttcacccccgccatcttccctcgctctctggacttatccactgacccagttcttgctgcccagaaaatcaacaggtttgtgcaggctgtgacagggtggaagatgaacttgccactagagggggtcagcacggacagcaccctatttttcaacacctacgttcacttccaagggaagatgagaggcttctcccagctgactgggctccatgagttctgggtggacaacagcacctcagtgtctgtgcccatgctctcgggcactggcaacttccagcactggagtgacgcccagaacaacttctccgtgacacgcgtgcccctgggtgagagtgtcaccctgctgctgatccagccccagtgcgcctcagatctcgacagggtggaggtcctcgtcttccagcacgacttcctgacttggataaagaacccgcctcctcgggccatccgtctgaccctgccgcagctggaaattcggggatcctacaacctgcaggacctgctggctcaggccaagctgtctacccttttgggtgctgaggcaaatctgggcaagatgggtgacaccaacccccgagtgggagaggttctcaacagcatcctccttgaactccaagcaggcgaggaggagcagcccacagagtctgcccagcagcctggctcacccgaggtgctggacgtgaccctgagcagtccgttcctgttcgccatctacgagcgggactcaggtgcgctgcactttctgggcagagtggataacccccaaaatgtggtgtgatgcctcctgtgtagccatggagacaaggccagcgtcagagagctatcctgggcaaaaatcagtgccttcacccctggcttcccgtcactccttccagcaaggcagaggccgtctccttggagatggcgctaactgagaataaatgatgagcagcagcctcctggggtgtgggtttgtttggacactggggtgagagccaggagctggcactctgtataggaggactgccatcctggaaaaaaaaaatggaccaaacaactgtttgtgaaataaaaaaaaaaaaattccctttttatttgaaaaaaaaaaaaaaaaaaaaaaaaa

SEQ ID NO: 10 - DNA, 1958 bp, Rattus norvegicus
  source 1..1958: mol_type = genomic DNA
tttttttttttttttttttttttttcaaataaaaagggaatttttttttttttatttcacaaacagttgtttggtccattttttttttccaggatggcagtcctcctatacagagtgccagctcctggctctcaccccagtgtccaaacaaacccacaccccaggaggctgctgctcatcatttattctcagttagcgccatctccaaggagacggcctctgccttgctggaaggagtgacgggaagccaggggtgaaggcactgatttttgcccaggatagctctctgacgctggccttgtctccatggctacacaggaggcatcacaccacattttgggggttatccactctgcccagaaagtgcagcgcacctgagtcccgctcgtagatggcgaacaggaacggactgctcagggtcacgtccagcacctcgggtgagccaggctgctgggcagactctgtgggctgctcctcctcgcctgcttggagttcaaggaggatgctgttgagaacctctcccactcgggggttggtgtcacccatcttgcccagatttgcctcagcacccaaaagggtagacagcttggcctgagccagcaggtcctgcaggttgtaggatccccgaatttccagctgcggcagggtcagacggatggcccgaggaggcgggttctttatccaagtcaggaagtcgtgctggaagacgaggacctccaccctgtcgagatctgaggcgcactggggctggatcagcagcagggtgacactctcacccaggggcacgcgtgtcacggagaagttgttctgggcgtcactccagtgctggaagttgccagtgcccgagagcatgggcacagacactgaggtgctgttgtccacccagaactcatggagcccagtcagctgggagaagcctctcatcttcccttggaagtgaacgtaggtgttgaaaaatagggtgctgtccgtgctgaccccctctagtggcaagttcatcttccaccctgtcacagcctgcacaaacctgttgattttctgggcagcaagaactgggtcagtggataagtccagagagcgagggaagatggcgggggtgaagggacccaagctctcaacaaatggctgttttaggcgcaagcctggggcagtgaagaggcccaccacggtggactgtagcaggggtgtctggctgctgcttccaccctgggtgaccagcaagccctgaacagcctgcagggcagtgaggaccttatgtccgtccagccgggaggtgcagtctccctccttcacagggacgcccagcagcacctgcaactggctggccgtgggatccaacgatccaaggtagaaagagaccagggtgccaaagagggccggtggagagaggacggccccactggctacacctcttgcctcactcagcatcttgtacatgcggaaacccatgaagttggcaatcatcgcgacctgggcagctcgctgccgatcctcagcctctagcttctcagtggccagcacgagcttatctcgcagggtcttctcatccacgggggaggtcttggcctgaatgggcacaggctcaaaggttggctctgggagcgtctccacactggggttctccagctgggcgcaggtgctcttgctgtagtagaggagatgaaaggggtggatgtatacgcggtccccagctgtcaggctgacccaggtcaggatgcagaagatggtggccttcaggcctgcccccgtgggagtcatcacggatctgtggacttgcttctgtgtgtcctttagctccagcccagacaagcacagctatcccctggtgaaccaagcagccttatttatactcgagggggtgaagatggatctattcccaggctactctgtacagaggctgggggaggacccaggtcgggggaccatgggaatccaggcttagccaagatggagcaagg

SEQ ID NO: 11 - DNA, 2236 bp, Macaca mulatta
  source 1..2236: mol_type = genomic DNA
agaagctgccattgttctgggtactacagcagaagacatgaatggacttattctgggctaaatggtgacagagaatattgagacaatgaaaaatctggttagatggcacttaacgatcagttaatagtaatcacctttcaccctttgcaaaatgatatttcagggtatgcagaagcgagcaccccagtccgagatggctcctgccagcgtgagcctgagggccaccatcctctgcctcctggcctgggctggcctggccacaggtgaccgggtgtacatacaccccttccacctcgtcatccacaatgagagtacctgtgagcagctggcaaaggccaatgctgggaagcccaaagatcccaccttcacacctgttccgatacaggccaagacgtcccctgtggatgaaaaggccctgcaggaccagctagtgctggtcgctgcaaaactcgacaccgaggacaagttgagagccgcgatggtcgggatgctggccaacttcttgggcttccgtatatatggcatgcacagtgagctatggggcgtggtccatggggccaccatcctctccccaacggctgtctttggcaccctggcctctctctacctgggagcgttggaccacacagccgacaggctacaggcaatcctgggcgtcccttggaaggacaagaactgcacctcccggctggatgcgcacaaggtcctctctgccctgcaggctgtacagggcctgctggtggcccagggcagggctgacggccagtcccagctgctgttgtccacagtggtgggtctcttcacagccccagatctgcacctgaagcagccgtttgtgcagggcctggctctctatgcccctgtggtcctcccacgctctctggacttcacagacctggaagtcgctgctgagaagattgacaggttcatgcaggctgtgacaggatggaagattagcagccccctgacgggagccagtgcggacagcaccctggttttcaacacctacgtccatttccaagggaagatgagggacttcttcctgctggctgagccccaggagttctgggtggacaacagcacctcagtgtctgtccccatgctgtctggcgtgggcaccttccagcactggagcgacgcccaggacaacttctcagtgactcaagtgccctttactgagagcgcctgcttgctgctgattcagcctcactacgcctctgacctggacaaggtggagggtctcactttccagcaaaactccctcaactggatgaagaaactgtctccccgggccatccacctgaccatgccccgactggtgctgcgaggatcttatgacctgcaggacctgcttgcccaggctgagctgcccgccattctgggcaccgagctgaacctgcaaaaattgagcaatgacgacctcagggtggggaaggtgctgaacagcattttttttgaactcgaagcggatgagagagagcccacagagtctacccgacagctgaacaggcctgagttcttggaggtgaccctggaccgcccattcctgtttgctgtgtatgatcaaagtgccactgccctgcacttcctgggccgtgtggccaacccgctgagcccagcatgaggccagggccccagaacacagcgcctggcaaggcctctgcccctggcctttgaggcgaaggccagcggcagatagtaactctggacaaaccagcgatttgtcacccccagtctcccaccttttcttctaatgagtcaacttcgagctggaaagcagtcgtttctccttggtctaagtggtgctgcgtggagtgagcagtaagaaacctgtggcagcacaaatgcgcctcccaggttgctgggtttattttagagaatgggggtggggaggcaagaaccagtgtttagcgcgggaccaccgttccaaaaagaattccaaccgaccagcttgtttgtgaaacaaaaaagtgttcccttttcaagttgagaacaaaaattgggttttaaaattaaagtatacatttttgcattgccttcggtttgtatttagtgtcttgaatgtaagaacatgacctccgtgtagtgtctacagtagcttagttttttccacagatgcttgtgatttttttgaacaacacgtgaaagatgcaagcatctgaatttctgtttgaatgtggaaaccatagctggttatttctcttttgtgttagtaataaacgtcttgcaacaataa

SEQ ID NO: 12 - DNA, 2236 bp, Macaca mulatta
  source 1..2236: mol_type = genomic DNA
ttattgttgcaagacgtttattactaacacaaaagagaaataaccagctatggtttccacattcaaacagaaattcagatgcttgcatctttcacgtgttgttcaaaaaaatcacaagcatctgtggaaaaaactaagctactgtagacactacacggaggtcatgttcttacattcaagacactaaatacaaaccgaaggcaatgcaaaaatgtatactttaattttaaaacccaatttttgttctcaacttgaaaagggaacacttttttgtttcacaaacaagctggtcggttggaattctttttggaacggtggtcccgcgctaaacactggttcttgcctccccacccccattctctaaaataaacccagcaacctgggaggcgcatttgtgctgccacaggtttcttactgctcactccacgcagcaccacttagaccaaggagaaacgactgctttccagctcgaagttgactcattagaagaaaaggtgggagactgggggtgacaaatcgctggtttgtccagagttactatctgccgctggccttcgcctcaaaggccaggggcagaggccttgccaggcgctgtgttctggggccctggcctcatgctgggctcagcgggttggccacacggcccaggaagtgcagggcagtggcactttgatcatacacagcaaacaggaatgggcggtccagggtcacctccaagaactcaggcctgttcagctgtcgggtagactctgtgggctctctctcatccgcttcgagttcaaaaaaaatgctgttcagcaccttccccaccctgaggtcgtcattgctcaatttttgcaggttcagctcggtgcccagaatggcgggcagctcagcctgggcaagcaggtcctgcaggtcataagatcctcgcagcaccagtcggggcatggtcaggtggatggcccggggagacagtttcttcatccagttgagggagttttgctggaaagtgagaccctccaccttgtccaggtcagaggcgtagtgaggctgaatcagcagcaagcaggcgctctcagtaaagggcacttgagtcactgagaagttgtcctgggcgtcgctccagtgctggaaggtgcccacgccagacagcatggggacagacactgaggtgctgttgtccacccagaactcctggggctcagccagcaggaagaagtccctcatcttcccttggaaatggacgtaggtgttgaaaaccagggtgctgtccgcactggctcccgtcagggggctgctaatcttccatcctgtcacagcctgcatgaacctgtcaatcttctcagcagcgacttccaggtctgtgaagtccagagagcgtgggaggaccacaggggcatagagagccaggccctgcacaaacggctgcttcaggtgcagatctggggctgtgaagagacccaccactgtggacaacagcagctgggactggccgtcagccctgccctgggccaccagcaggccctgtacagcctgcagggcagagaggaccttgtgcgcatccagccgggaggtgcagttcttgtccttccaagggacgcccaggattgcctgtagcctgtcggctgtgtggtccaacgctcccaggtagagagaggccagggtgccaaagacagccgttggggagaggatggtggccccatggaccacgccccatagctcactgtgcatgccatatatacggaagcccaagaagttggccagcatcccgaccatcgcggctctcaacttgtcctcggtgtcgagttttgcagcgaccagcactagctggtcctgcagggccttttcatccacaggggacgtcttggcctgtatcggaacaggtgtgaaggtgggatctttgggcttcccagcattggcctttgccagctgctcacaggtactctcattgtggatgacgaggtggaaggggtgtatgtacacccggtcacctgtggccaggccagcccaggccaggaggcagaggatggtggccctcaggctcacgctggcaggagccatctcggactggggtgctcgcttctgcataccctgaaatatcattttgcaaagggtgaaaggtgattactattaactgatcgttaagtgccatctaaccagatttttcattgtctcaatattctctgtcaccatttagcccagaataagtccattcatgtcttctgctgtagtacccagaacaatggcagcttct

SEQ ID NO: 13 - skipped

SEQ ID NO: 14 - protein, 16 aa, unidentified
AAVALLPAVLLALLAP

SEQ ID NO: 15 - protein, 11 aa, unidentified
AALLPVLLAAP

SEQ ID NO: 16 - protein, 13 aa, Human immunodeficiency virus
GRKKRRQRRRPPQ

SEQ ID NO: 17 - protein, 16 aa, Drosophila sp.
RQIKIWFQNRRMKWKK

SEQ ID NO: 18 - DNA, 21 bp, synthetic construct
  source 1..21: mol_type = other DNA
  modified_base 1: mod_base = OTHER; note = 2'-O-methylcytidine-3'-phosphate
  modified_base 2: mod_base = OTHER; note = 2'-O-methyluridine-3'-phosphate
  modified_base 3: mod_base = OTHER; note = 2'-O-methyluridine-3'-phosphate
  modified_base 5: mod_base = OTHER; note = 2'-O-methylcytidine-3'-phosphate
  modified_base 7: mod_base = OTHER; note = 2'-O-methylcytidine-3'-phosphate
  modified_base 8: mod_base = OTHER; note = 2'-O-methyluridine-3'-phosphate
  modified_base 12: mod_base = OTHER; note = 2'-O-methyluridine-3'-phosphate
  modified_base 14: mod_base = OTHER; note = 2'-O-methylcytidine-3'-phosphate
  modified_base 15: mod_base = OTHER; note = 2'-O-methyluridine-3'-phosphate
  modified_base 16: mod_base = OTHER; note = 2'-O-methyluridine-3'-phosphate
  modified_base 17: mod_base = OTHER; note = 2'-O-methylcytidine-3'-phosphate
  modified_base 20: mod_base = OTHER; note = 2'-deoxythimidine-3'-phosphorothioate
  misc_feature 1..19: note = RNA
  misc_feature 20..21: note = DNA
cttacgctgagtacttcgatt

SEQ ID NO: 19 - DNA, 21 bp, synthetic construct
  source 1..21: mol_type = other DNA
  modified_base 7: mod_base = OTHER; note = 2'-O-methyluridine-3'-phosphate
  modified_base 11: mod_base = OTHER; note = 2'-O-methylcytidine-3'-phosphate
  modified_base 16: mod_base = OTHER; note = 2'-O-methyluridine-3'-phosphate
  modified_base 20: mod_base = OTHER; note = 2'-deoxythimidine-3'-phosphorothioate
  misc_feature 1..19: note = RNA
  misc_feature 20..21: note = DNA
tcgaagtactcagcgtaagtt

SEQ ID NO: 20 - RNA, 21 nt, synthetic construct
  source 1..21: mol_type = other RNA
agaagctgccgttgttctggt

SEQ ID NO: 21 - RNA, 21 nt, synthetic construct
  source 1..21: mol_type = other RNA
gaagctgccgttgttctgggt

SEQ ID NO: 22 - RNA, 21 nt, synthetic construct
  source 1..21: mol_type = other RNA
aagctgccgttgttctgggtt

SEQ ID NO: 23 - RNA, 21 nt, synthetic construct
  source 1..21: mol_type = other RNA
ctgccgttgttctgggtactt

SEQ ID NO: 24 - RNA, 21 nt, synthetic construct
  source 1..21: mol_type = other RNA
cgttgttctgggtactacagt

SEQ ID NO: 25 - RNA, 21 nt, synthetic construct
  source 1..21: mol_type = other RNA
ctgggtactacagcagaaggt

SEQ ID NO: 26 - RNA, 21 nt, synthetic construct
  source 1..21: mol_type = other RNA
tactacagcagaagggtatgt

SEQ ID NO: 27 - RNA, 21 nt, synthetic construct
  source 1..21: mol_type = other RNA
actacagcagaagggtatgct

SEQ ID NO: 28 - RNA, 21 nt, synthetic construct
  source 1..21: mol_type = other RNA
ctacagcagaagggtatgcgt

SEQ ID NO: 29 - RNA, 21 nt, synthetic construct
  source 1..21: mol_type = other RNA
tacagcagaagggtatgcggt

SEQ ID NO: 30 - RNA, 21 nt, synthetic construct
  source 1..21: mol_type = other RNA
acagcagaagggtatgcggat

SEQ ID NO: 31 - RNA, 21 nt, synthetic construct
  source 1..21: mol_type = other RNA
agcagaagggtatgcggaagt

SEQ ID NO: 32 - RNA, 21 nt, synthetic construct
  source 1..21: mol_type = other RNA
atccacaatgagagtacctgt

SEQ ID NO: 33 - RNA, 21 nt, synthetic construct
  source 1..21: mol_type = other RNA
acaatgagagtacctgtgagt

SEQ ID NO: 34 - RNA, 21 nt, synthetic construct
  source 1..21: mol_type = other RNA
ttcatacctgctccaattcat

SEQ ID NO: 35 - RNA, 21 nt, synthetic construct
  source 1..21: mol_type = other RNA
tcatacctgctccaattcagt

SEQ ID NO: 36 - RNA, 21 nt, synthetic construct
  source 1..21: mol_type = other RNA
catacctgctccaattcaggt

SEQ ID NO: 37 - RNA, 21 nt, synthetic construct
  source 1..21: mol_type = other RNA
tggatgaaaaggccctacagt

SEQ ID NO: 38 - RNA, 21 nt, synthetic construct
  source 1..21: mol_type = other RNA
ggatgaaaaggccctacaggt

SEQ ID NO: 39 - RNA, 21 nt, synthetic construct
  source 1..21: mol_type = other RNA
gtgctagtcgctgcaaaactt

SEQ ID NO: 40 - RNA, 21 nt, synthetic construct
  source 1..21: mol_type = other RNA
tgctagtcgctgcaaaacttt

SEQ ID NO: 41 - RNA, 21 nt, synthetic construct
  source 1..21: mol_type = other RNA
gctagtcgctgcaaaacttgt

SEQ ID NO: 42 - RNA, 21 nt, synthetic construct
  source 1..21: mol_type = other RNA
tgcaaaacttgacaccgaagt

SEQ ID NO: 43 - RNA, 21 nt, synthetic construct
  source 1..21: mol_type = other RNA
gcaaaacttgacaccgaagat

SEQ ID NO: 44 - RNA, 21 nt, synthetic construct
  source 1..21: mol_type = other RNA
ttgacaccgaagacaagttgt

SEQ ID NO: 45 - RNA, 21 nt, synthetic construct
  source 1..21: mol_type = other RNA
tgacaccgaagacaagttgat

SEQ ID NO: 46 - RNA, 21 nt, synthetic construct
  source 1..21: mol_type = other RNA
acaccgaagacaagttgaggt

SEQ ID NO: 47 - RNA, 21 nt, synthetic construct
  source 1..21: mol_type = other RNA
caccgaagacaagttgagggt

SEQ ID NO: 48 - RNA, 21 nt, synthetic construct
  source 1..21: mol_type = other RNA
aagttgagggccgcaatggtt

SEQ ID NO: 49 - RNA, 21 nt, synthetic construct
  source 1..21: mol_type = other RNA
gggatgctggccaacttcttt

SEQ ID NO: 50 - RNA, 21 nt, synthetic construct
  source 1..21: mol_type = other RNA
gctggccaacttcttgggctt

SEQ ID NO: 51 - RNA, 21 nt, synthetic construct
  source 1..21: mol_type = other RNA
caacttcttgggcttccgtat

SEQ ID NO: 52 - RNA, 21 nt, synthetic construct
  source 1..21: mol_type = other RNA
aacttcttgggcttccgtatt

SEQ ID NO: 53 - RNA, 21 nt, synthetic construct
  source 1..21: mol_type = other RNA
acttcttgggcttccgtatat

SEQ ID NO: 54 - RNA, 21 nt, synthetic construct
  source 1..21: mol_type = other RNA
tcttgggcttccgtatatatt

SEQ ID NO: 55 - RNA, 21 nt, synthetic construct
  source 1..21: mol_type = other RNA
ttgggcttccgtatatatggt

SEQ ID NO: 56 - RNA, 21 nt, synthetic construct
  source 1..21: mol_type = other RNA
tatatggcatgcacagtgagt

SEQ ID NO: 57 - RNA, 21 nt, synthetic construct
  source 1..21: mol_type = other RNA
gcatgcacagtgagctatggt

SEQ ID NO: 58 - RNA, 21 nt, synthetic construct
  source 1..21: mol_type = other RNA
ctctatctgggagccttggat

SEQ ID NO: 59 - RNA, 21 nt, synthetic construct
  source 1..21: mol_type = other RNA
gacaggctacaggcaatcctt

SEQ ID NO: 60 - RNA, 21 nt, synthetic construct
  source 1..21: mol_type = other RNA
acaggctacaggcaatcctgt

SEQ ID NO: 61 - RNA, 21 nt, synthetic construct
  source 1..21: mol_type = other RNA
tacaggcaatcctgggtgttt

SEQ ID NO: 62 - RNA, 21 nt, synthetic construct
  source 1..21: mol_type = other RNA
acaggcaatcctgggtgttct

SEQ ID NO: 63 - RNA, 21 nt, synthetic construct
  source 1..21: mol_type = other RNA
ggcaatcctgggtgttccttt

SEQ ID NO: 64 - RNA, 21 nt, synthetic construct
  source 1..21: mol_type = other RNA
gcaatcctgggtgttccttgt

SEQ ID NO: 65 - RNA, 21 nt, synthetic construct
  source 1..21: mol_type = other RNA
aatcctgggtgttccttggat

SEQ ID NO: 66 - RNA, 21 nt, synthetic construct
  source 1..21: mol_type = other RNA
tcctgggtgttccttggaagt

SEQ ID NO: 67 - RNA, 21 nt, synthetic construct
  source 1..21: mol_type = other RNA
ccttggaaggacaagaactgt

SEQ ID NO: 68 - RNA, 21 nt, synthetic construct
  source 1..21: mol_type = other RNA
cacctgaagcagccgtttgtt

SEQ ID NO: 69 - RNA, 21 nt, synthetic construct
  source 1..21: mol_type = other RNA
ctctggacttcacagaactgt

SEQ ID NO: 70 - RNA, 21 nt, synthetic construct
  source 1..21: mol_type = other RNA
tctggacttcacagaactggt

SEQ ID NO: 71 - RNA, 21 nt, synthetic construct
  source 1..21: mol_type = other RNA
ggacttcacagaactggatgt

SEQ ID NO: 72 - RNA, 21 nt, synthetic construct
  source 1..21: mol_type = other RNA
acttcacagaactggatgttt

SEQ ID NO: 73 - RNA, 21 nt, synthetic construct
  source 1..21: mol_type = other RNA
cttcacagaactggatgttgt

SEQ ID NO: 74 - RNA, 21 nt, synthetic construct
  source 1..21: mol_type = other RNA
cacagaactggatgttgctgt

SEQ ID NO: 75 - RNA, 21 nt, synthetic construct
  source 1..21: mol_type = other RNA
acagaactggatgttgctgct

SEQ ID NO: 76 - RNA, 21 nt, synthetic construct
  source 1..21: mol_type = other RNA
tgttgctgctgagaagattgt

SEQ ID NO: 77 - RNA, 21 nt, synthetic construct
  source 1..21: mol_type = other RNA
ttgctgctgagaagattgact

SEQ ID NO: 78 - RNA, 21 nt, synthetic construct
  source 1..21: mol_type = other RNA
gctgctgagaagattgacagt

SEQ ID NO: 79 - RNA, 21 nt, synthetic construct
  source 1..21: mol_type = other RNA
acaggttcatgcaggctgtgt

SEQ ID NO: 80 - RNA, 21 nt, synthetic construct
  source 1..21: mol_type = other RNA
atgcaggctgtgacaggatgt

SEQ ID NO: 81 - RNA, 21 nt, synthetic construct
  source 1..21: mol_type = other RNA
gcaggctgtgacaggatggat

SEQ ID NO: 82 - RNA, 21 nt, synthetic construct
  source 1..21: mol_type = other RNA
gacagcaccctggctttcaat

SEQ ID NO: 83 - RNA, 21 nt, synthetic construct
  source 1..21: mol_type = other RNA
ctggctttcaacacctacgtt

SEQ ID NO: 84 - RNA, 21 nt, synthetic construct
  source 1..21: mol_type = other RNA
gctttcaacacctacgtccat

SEQ ID NO: 85 - RNA, 21 nt, synthetic construct
  source 1..21: mol_type = other RNA
cacctacgtccacttccaagt

SEQ ID NO: 86 - RNA, 21 nt, synthetic construct
  source 1..21: mol_type = other RNA
tccacttccaagggaagatgt

SEQ ID NO: 87 - RNA, 21 nt, synthetic construct
  source 1..21: mol_type = other RNA
acttccaagggaagatgaagt

SEQ ID NO: 88 - RNA, 21 nt, synthetic construct
  source 1..21: mol_type = other RNA
cttccaagggaagatgaaggt

SEQ ID NO: 89 - RNA, 21 nt, synthetic construct
  source 1..21: mol_type = other RNA
tccaagggaagatgaagggct

SEQ ID NO: 90 - RNA, 21 nt, synthetic construct
  source 1..21: mol_type = other RNA
agatgaagggcttctccctgt

SEQ ID NO: 91 - RNA, 21 nt, synthetic construct
  source 1..21: mol_type = other RNA
ggacaacagcacctcagtgtt

SEQ ID NO: 92 - RNA, 21 nt, synthetic construct
  source 1..21: mol_type = other RNA
gacaacagcacctcagtgtct

SEQ ID NO: 93 - RNA, 21 nt, synthetic construct
  source 1..21: mol_type = other RNA
caacagcacctcagtgtctgt

SEQ ID NO: 94 - RNA, 21 nt, synthetic construct
  source 1..21: mol_type = other RNA
acctcagtgtctgttcccatt

SEQ ID NO: 95 - RNA, 21 nt, synthetic construct
  source 1..21: mol_type = other RNA
cagtgtctgttcccatgctct

SEQ ID NO: 96 - RNA, 21 nt, synthetic construct
  source 1..21: mol_type = other RNA
gtctgttcccatgctctctgt

SEQ ID NO: 97 - RNA, 21 nt, synthetic construct
  source 1..21: mol_type = other RNA
tctgttcccatgctctctggt

SEQ ID NO: 98 - RNA, 21 nt, synthetic construct
  source 1..21: mol_type = other RNA
gacatccaggacaacttctct

SEQ ID NO: 99 - RNA, 21 nt, synthetic construct
  source 1..21: mol_type = other RNA
acatccaggacaacttctcgt

SEQ ID NO: 100 - RNA, 21 nt, synthetic construct
  source 1..21: mol_type = other RNA
catccaggacaacttctcggt

SEQ ID NO: 101 - RNA, 21 nt, synthetic construct
  source 1..21: mol_type = other RNA
atccaggacaacttctcggtt

SEQ ID NO: 102 - RNA, 21 nt, synthetic construct
  source 1..21: mol_type = other RNA
tccaggacaacttctcggtgt

SEQ ID NO: 103 - RNA, 21 nt, synthetic construct
  source 1..21: mol_type = other RNA
ccaggacaacttctcggtgat

SEQ ID NO: 104 - RNA, 21 nt, synthetic construct
  source 1..21: mol_type = other RNA
caggacaacttctcggtgact

SEQ ID NO: 105 - RNA, 21 nt, synthetic construct
  source 1..21: mol_type = other RNA
acttctcggtgactcaagtgt

SEQ ID NO: 106 - RNA, 21 nt, synthetic construct
  source 1..21: mol_type = other RNA
cttctcggtgactcaagtgct

SEQ ID NO: 107 - RNA, 21 nt, synthetic construct
  source 1..21: mol_type = other RNA
gactcaagtgcccttcactgt

SEQ ID NO: 108 - RNA, 21 nt, synthetic construct
  source 1..21: mol_type = other RNA
ctcaagtgcccttcactgagt

SEQ ID NO: 109 - RNA, 21 nt, synthetic construct
  source 1..21: mol_type = other RNA
gctgatccagcctcactatgt

SEQ ID NO: 110 - RNA, 21 nt, synthetic construct
  source 1..21: mol_type = other RNA
gtggagggtctcactttccat

SEQ ID NO: 111 - RNA, 21 nt, synthetic construct
  source 1..21: mol_type = other RNA
ctcactttccagcaaaactct

SEQ ID NO: 112 - RNA, 21 nt, synthetic construct
  source 1..21: mol_type = other RNA
cagcaaaactccctcaactgt

SEQ ID NO: 113 - RNA, 21 nt, synthetic construct
  source 1..21: mol_type = other RNA
agcaaaactccctcaactggt

SEQ ID NO: 114 - RNA, 21 nt, synthetic construct
  source 1..21: mol_type = other RNA
aaaactccctcaactggatgt

SEQ ID NO: 115 - RNA, 21 nt, synthetic construct
  source 1..21: mol_type = other RNA
actccctcaactggatgaagt

SEQ ID NO: 116 - RNA, 21 nt, synthetic construct
  source 1..21: mol_type = other RNA
ctggatgaagaaactatctct

SEQ ID NO: 117 - RNA, 21 nt, synthetic construct
  source 1..21: mol_type = other RNA
actggtgctgcaaggatcttt

SEQ ID NO: 118 - RNA, 21 nt, synthetic construct
  source 1..21: mol_type = other RNA
ggtgctgcaaggatcttatgt

SEQ ID NO: 119 - RNA, 21 nt, synthetic construct
  source 1..21: mol_type = other RNA
gtgctgcaaggatcttatgat

SEQ ID NO: 120 - RNA, 21 nt, synthetic construct
  source 1..21: mol_type = other RNA
tgctgcaaggatcttatgact

SEQ ID NO: 121 - RNA, 21 nt, synthetic construct
  source 1..21: mol_type = other RNA
cttatgacctgcaggacctgt

SEQ ID NO: 122 - RNA, 21 nt, synthetic construct
  source 1..21: mol_type = other RNA
cgagctgaacctgcaaaaatt

SEQ ID NO: 123 - RNA, 21 nt, synthetic construct
  source 1..21: mol_type = other RNA
gagctgaacctgcaaaaattt

SEQ ID NO: 124 - RNA, 21 nt, synthetic construct
  source 1..21: mol_type = other RNA
agctgaacctgcaaaaattgt

SEQ ID NO: 125 - RNA, 21 nt, synthetic construct
  source 1..21: mol_type = other RNA
gctgaacctgcaaaaattgat

SEQ ID NO: 126 - RNA, 21 nt, synthetic construct
  source 1..21: mol_type = other RNA
ctgaacctgcaaaaattgagt

SEQ ID NO: 127 - RNA, 21 nt, synthetic construct
  source 1..21: mol_type = other RNA
tgaacctgcaaaaattgagct

SEQ ID NO: 128 - RNA, 21 nt, synthetic construct
  source 1..21: mol_type = other RNA
tgcaaaaattgagcaatgact

SEQ ID NO: 129 - RNA, 21 nt, synthetic construct
  source 1..21: mol_type = other RNA
caaaaattgagcaatgaccgt

SEQ ID NO: 130 - RNA, 21 nt, synthetic construct
  source 1..21: mol_type = other RNA
ttgagcaatgaccgcatcagt

SEQ ID NO: 131 - RNA, 21 nt, synthetic construct
  source 1..21: mol_type = other RNA
tgagcaatgaccgcatcaggt

SEQ ID NO: 132 - RNA, 21 nt, synthetic construct
  source 1..21: mol_type = other RNA
agcaatgaccgcatcagggtt

SEQ ID NO: 133 - RNA, 21 nt, synthetic construct
  source 1..21: mol_type = other RNA
gaggtgctgaacagcattttt

SEQ ID NO: 134 - RNA, 21 nt, synthetic construct
  source 1..21: mol_type = other RNA
ttgagcttgaagcggatgagt

SEQ ID NO: 135 - RNA, 21 nt, synthetic construct
  source 1..21: mol_type = other RNA
gtctacccaacagcttaacat

SEQ ID NO: 136 - RNA, 21 nt, synthetic construct
  source 1..21: mol_type = other RNA
tctacccaacagcttaacaat

SEQ ID NO: 137 - RNA, 21 nt, synthetic construct
  source 1..21: mol_type = other RNA
ctacccaacagcttaacaagt

SEQ ID NO: 138 - RNA, 21 nt, synthetic construct
  source 1..21: mol_type = other RNA
ccaacagcttaacaagcctgt

SEQ ID NO: 139 - RNA, 21 nt, synthetic construct
  source 1..21: mol_type = other RNA
acagcttaacaagcctgaggt

SEQ ID NO: 140 - RNA, 21 nt, synthetic construct
  source 1..21: mol_type = other RNA
cttaacaagcctgaggtcttt

SEQ ID NO: 141 - RNA, 21 nt, synthetic construct
  source 1..21: mol_type = other RNA
ttaacaagcctgaggtcttgt

SEQ ID NO: 142 - RNA, 21 nt, synthetic construct
  source 1..21: mol_type = other RNA
taacaagcctgaggtcttggt

SEQ ID NO: 143 - RNA, 21 nt, synthetic construct
  source 1..21: mol_type = other RNA
aacaagcctgaggtcttggat

SEQ ID NO: 144 - RNA, 21 nt, synthetic construct
  source 1..21: mol_type = other RNA
acaagcctgaggtcttggagt

SEQ ID NO: 145 - RNA, 21 nt, synthetic construct
  source 1..21: mol_type = other RNA
caagcctgaggtcttggaggt

SEQ ID NO: 146 - RNA, 21 nt, synthetic construct
  source 1..21: mol_type = other RNA
aaccgcccattcctgtttgct

SEQ ID NO: 147 - RNA, 21 nt, synthetic construct
  source 1..21: mol_type = other RNA
accgcccattcctgtttgctt

SEQ ID NO: 148 - RNA, 21 nt, synthetic construct
  source 1..21: mol_type = other RNA
ccgcccattcctgtttgctgt

SEQ ID NO: 149 - RNA, 21 nt, synthetic construct
  source 1..21: mol_type = other RNA
cgcccattcctgtttgctgtt

SEQ ID NO: 150 - RNA, 21 nt, synthetic construct
  source 1..21: mol_type = other RNA
attcctgtttgctgtgtatgt

SEQ ID NO: 151 - RNA, 21 nt, synthetic construct
  source 1..21: mol_type = other RNA
tcctgtttgctgtgtatgatt

SEQ ID NO: 152 - RNA, 21 nt, synthetic construct
  source 1..21: mol_type = other RNA
tgctgtgtatgatcaaagcgt

SEQ ID NO: 153 - RNA, 21 nt, synthetic construct
  source 1..21: mol_type = other RNA
gctgtgtatgatcaaagcgct

SEQ ID NO: 154 - RNA, 21 nt, synthetic construct
  source 1..21: mol_type = other RNA
ctgtgtatgatcaaagcgcct

SEQ ID NO: 155 - RNA, 21 nt, synthetic construct
  source 1..21: mol_type = other RNA
aggccagcagcagataacaat

SEQ ID NO: 156 - RNA, 21 nt, synthetic construct
  source 1..21: mol_type = other RNA
cggacaaatcagcgatgtgtt

SEQ ID NO: 157 - RNA, 21 nt, synthetic construct
  source 1..21: mol_type = other RNA
ggacaaatcagcgatgtgtct

SEQ ID NO: 158 - RNA, 21 nt, synthetic construct
  source 1..21: mol_type = other RNA
ctcccaccttttcttctaatt

SEQ ID NO: 159 - RNA, 21 nt, synthetic construct
  source 1..21: mol_type = other RNA
tcccaccttttcttctaatgt

SEQ ID NO: 160 - RNA, 21 nt, synthetic construct
  source 1..21: mol_type = other RNA
cccaccttttcttctaatgat

SEQ ID NO: 161 - RNA, 21 nt, synthetic construct
  source 1..21: mol_type = other RNA
ttttcttctaatgagtcgact

SEQ ID NO: 162 - RNA, 21 nt, synthetic construct
  source 1..21: mol_type = other RNA
tttcttctaatgagtcgactt

SEQ ID NO: 163 - RNA, 21 nt, synthetic construct
  source 1..21: mol_type = other RNA
ttcttctaatgagtcgacttt

SEQ ID NO: 164 - RNA, 21 nt, synthetic construct
  source 1..21: mol_type = other RNA
cttctaatgagtcgactttgt

SEQ ID NO: 165 - RNA, 21 nt, synthetic construct
  source 1..21: mol_type = other RNA
ttctaatgagtcgactttgat

SEQ ID NO: 166 - RNA, 21 nt, synthetic construct
  source 1..21: mol_type = other RNA
tctaatgagtcgactttgagt

SEQ ID NO: 167 - RNA, 21 nt, synthetic construct
  source 1..21: mol_type = other RNA
ctaatgagtcgactttgagct

SEQ ID NO: 168 - RNA, 21 nt, synthetic construct
  source 1..21: mol_type = other RNA
taatgagtcgactttgagctt

SEQ ID NO: 169 - RNA, 21 nt, synthetic construct
  source 1..21: mol_type = other RNA
gactttgagctggaaagcagt

SEQ ID NO: 170 - RNA, 21 nt, synthetic construct
  source 1..21: mol_type = other RNA
gagctggaaagcagccgtttt

SEQ ID NO: 171 - RNA, 21 nt, synthetic construct
  source 1..21: mol_type = other RNA
agctggaaagcagccgtttct

SEQ ID NO: 172 - RNA, 21 nt, synthetic construct
  source 1..21: mol_type = other RNA
gctggaaagcagccgtttctt

SEQ ID NO: 173 - RNA, 21 nt, synthetic construct
  source 1..21: mol_type = other RNA
ctggaaagcagccgtttctct

SEQ ID NO: 174 - RNA, 21 nt, synthetic construct
  source 1..21: mol_type = other RNA
ggaaagcagccgtttctcctt

SEQ ID NO: 175 - RNA, 21 nt, synthetic construct
  source 1..21: mol_type = other RNA
aaagcagccgtttctccttgt

SEQ ID NO: 176 - RNA, 21 nt, synthetic construct
  source 1..21: mol_type = other RNA
agcagccgtttctccttggtt

SEQ ID NO: 177 - RNA, 21 nt, synthetic construct
  source 1..21: mol_type = other RNA
gcagccgtttctccttggtct

SEQ ID NO: 178 - RNA, 21 nt, synthetic construct
  source 1..21: mol_type = other RNA
cagccgtttctccttggtctt

SEQ ID NO: 179 - RNA, 21 nt, synthetic construct
  source 1..21: mol_type = other RNA
cgtttctccttggtctaagtt

SEQ ID NO: 180 - RNA, 21 nt, synthetic construct
  source 1..21: mol_type = other RNA
gtttctccttggtctaagtgt

SEQ ID NO: 181 - RNA, 21 nt, synthetic construct
  source 1..21: mol_type = other RNA
tttctccttggtctaagtgtt

SEQ ID NO: 182 - RNA, 21 nt, synthetic construct
  source 1..21: mol_type = other RNA
ttctccttggtctaagtgtgt

SEQ ID NO: 183 - RNA, 21 nt, synthetic construct
  source 1..21: mol_type = other RNA
tctccttggtctaagtgtgct

SEQ ID NO: 184 - RNA, 21 nt, synthetic construct
  source 1..21: mol_type = other RNA
tccttggtctaagtgtgctgt

SEQ ID NO: 185 - RNA, 21 nt, synthetic construct
  source 1..21: mol_type = other RNA
tctaagtgtgctgcatggagt

SEQ ID NO: 186 - RNA, 21 nt, synthetic construct
  source 1..21: mol_type = other RNA
agtgtgctgcatggagtgagt

SEQ ID NO: 187 - RNA, 21 nt, synthetic construct
  source 1..21: mol_type = other RNA
catggagtgagcagtagaagt

SEQ ID NO: 188 - RNA, 21 nt, synthetic construct
  source 1..21: mol_type = other RNA
gagtgagcagtagaagcctgt

SEQ ID NO: 189 - RNA, 21 nt, synthetic construct
  source 1..21: mol_type = other RNA
caaatgcacctcccagtttgt

SEQ ID NO: 190 - RNA, 21 nt, synthetic construct
  source 1..21: mol_type = other RNA
aaatgcacctcccagtttgct

SEQ ID NO: 191 - RNA, 21 nt, synthetic construct
  source 1..21: mol_type = other RNA
aatgcacctcccagtttgctt

SEQ ID NO: 192 - RNA, 21 nt, synthetic construct
  source 1..21: mol_type = other RNA
atgcacctcccagtttgctgt

SEQ ID NO: 193 - RNA, 21 nt, synthetic construct
  source 1..21: mol_type = other RNA
tgcacctcccagtttgctggt

SEQ ID NO: 194 - RNA, 21 nt, synthetic construct
  source 1..21: mol_type = other RNA
ctcccagtttgctgggtttat

SEQ ID NO: 195 - RNA, 21 nt, synthetic construct
  source 1..21: mol_type = other RNA
cccagtttgctgggtttattt

SEQ ID NO: 196 - RNA, 21 nt, synthetic construct
  source 1..21: mol_type = other RNA
ccagtttgctgggtttatttt

SEQ ID NO: 197 - RNA, 21 nt, synthetic construct
  source 1..21: mol_type = other RNA
cagtttgctgggtttattttt

SEQ ID NO: 198 - RNA, 21 nt, synthetic construct
  source 1..21: mol_type = other RNA
agtttgctgggtttattttat

SEQ ID NO: 199 - RNA, 21 nt, synthetic construct
  source 1..21: mol_type = other RNA
gtttgctgggtttattttagt

SEQ ID NO: 200 - RNA, 21 nt, synthetic construct
  source 1..21: mol_type = other RNA
tttgctgggtttattttagat

SEQ ID NO: 201 - RNA, 21 nt, synthetic construct
  source 1..21: mol_type = other RNA
ttgctgggtttattttagagt

SEQ ID NO: 202 - RNA, 21 nt, synthetic construct
  source 1..21: mol_type = other RNA
tgctgggtttattttagagat

SEQ ID NO: 203 - RNA, 21 nt, synthetic construct
  source 1..21: mol_type = other RNA
gggtttattttagagaatggt

SEQ ID NO: 204 - RNA, 21 nt, synthetic construct
  source 1..21: mol_type = other RNA
gggaggcaagaaccagtgttt

SEQ ID NO: 205 - RNA, 21 nt, synthetic construct
  source 1..21: mol_type = other RNA
ggaggcaagaaccagtgtttt

SEQ ID NO: 206 - RNA, 21 nt, synthetic construct
  source 1..21: mol_type = other RNA
aggcaagaaccagtgtttagt

SEQ ID NO: 207 - RNA, 21 nt, synthetic construct
  source 1..21: mol_type = other RNA
ggcaagaaccagtgtttagct

SEQ ID NO: 208 - RNA, 21 nt, synthetic construct
  source 1..21: mol_type = other RNA
tgtttagcgcgggactactgt

SEQ ID NO: 209 - RNA, 21 nt, synthetic construct
  source 1..21: mol_type = other RNA
gactactgttccaaaaagaat

SEQ ID NO: 210 - RNA, 21 nt, synthetic construct
  source 1..21: mol_type = other RNA
actgttccaaaaagaattcct

SEQ ID NO: 211 - RNA, 21 nt, synthetic construct
  source 1..21: mol_type = other RNA
ctgttccaaaaagaattccat

SEQ ID NO: 212 - RNA, 21 nt, synthetic construct
  source 1..21: mol_type = other RNA
caaaaagaattccaaccgact

SEQ ID NO: 213 - RNA, 21 nt, synthetic construct
  source 1..21: mol_type = other RNA
accgaccagcttgtttgtgat

SEQ ID NO: 214 - RNA, 21 nt, synthetic construct
  source 1..21: mol_type = other RNA
aaagtgttcccttttcaagtt

SEQ ID NO: 215 - RNA, 21 nt, synthetic construct
  source 1..21: mol_type = other RNA
agtgttcccttttcaagttgt

SEQ ID NO: 216 - RNA, 21 nt, synthetic construct
  source 1..21: mol_type = other RNA
gtgttcccttttcaagttgat

SEQ ID NO: 217 - RNA, 21 nt, synthetic construct
  source 1..21: mol_type = other RNA
tgttcccttttcaagttgagt

SEQ ID NO: 218 - RNA, 21 nt, synthetic construct
  source 1..21: mol_type = other RNA
gttcccttttcaagttgagat

SEQ ID NO: 219 - RNA, 21 nt, synthetic construct
  source 1..21: mol_type = other RNA
caagttgagaacaaaaattgt

SEQ ID NO: 220 - RNA, 21 nt, synthetic construct
  source 1..21: mol_type = other RNA
aagttgagaacaaaaattggt

SEQ ID NO: 221 - RNA, 21 nt, synthetic construct
  source 1..21: mol_type = other RNA
gttgagaacaaaaattgggtt

SEQ ID NO: 222 - RNA, 21 nt, synthetic construct
  source 1..21: mol_type = other RNA
ttgagaacaaaaattgggttt

SEQ ID NO: 223 - RNA, 21 nt, synthetic construct
  source 1..21: mol_type = other RNA
tgagaacaaaaattgggtttt

SEQ ID NO: 224 - RNA, 21 nt, synthetic construct
  source 1..21: mol_type = other RNA
gagaacaaaaattgggttttt

SEQ ID NO: 225 - RNA, 21 nt, synthetic construct
  source 1..21: mol_type = other RNA
agaacaaaaattgggttttat

SEQ ID NO: 226 - RNA, 21 nt, synthetic construct
  source 1..21: mol_type = other RNA
gaacaaaaattgggttttaat

SEQ ID NO: 227 - RNA, 21 nt, synthetic construct
  source 1..21: mol_type = other RNA
gtatacatttttgcattgcct

SEQ ID NO: 228 - RNA, 21 nt, synthetic construct
  source 1..21: mol_type = other RNA
atacatttttgcattgccttt

SEQ ID NO: 229 - RNA, 21 nt, synthetic construct
  source 1..21: mol_type = other RNA
catttttgcattgccttcggt

SEQ ID NO: 230 - RNA, 21 nt, synthetic construct
  source 1..21: mol_type = other RNA
atttttgcattgccttcggtt

SEQ ID NO: 231 - RNA, 21 nt, synthetic construct
  source 1..21: mol_type = other RNA
tttttgcattgccttcggttt

SEQ ID NO: 232 - RNA, 21 nt, synthetic construct
  source 1..21: mol_type = other RNA
ttttgcattgccttcggtttt

SEQ ID NO: 233 - RNA, 21 nt, synthetic construct
  source 1..21: mol_type = other RNA
tttgcattgccttcggtttgt

SEQ ID NO: 234 - RNA, 21 nt, synthetic construct
  source 1..21: mol_type = other RNA
ttgcattgccttcggtttgtt

SEQ ID NO: 235 - RNA, 21 nt, synthetic construct
  source 1..21: mol_type = other RNA
tgcattgccttcggtttgtat

SEQ ID NO: 236 - RNA, 21 nt, synthetic construct
  source 1..21: mol_type = other RNA
gcattgccttcggtttgtatt

SEQ ID NO: 237 - RNA, 21 nt, synthetic construct
  source 1..21: mol_type = other RNA
cattgccttcggtttgtattt

SEQ ID NO: 238 - RNA, 21 nt, synthetic construct
  source 1..21: mol_type = other RNA
attgccttcggtttgtatttt

SEQ ID NO: 239 - RNA, 21 nt, synthetic construct
  source 1..21: mol_type = other RNA
ttgccttcggtttgtatttat

SEQ ID NO: 240 - RNA, 21 nt, synthetic construct
  source 1..21: mol_type = other RNA
tgccttcggtttgtatttagt

SEQ ID NO: 241 - RNA, 21 nt, synthetic construct
  source 1..21: mol_type = other RNA
gccttcggtttgtatttagtt

SEQ ID NO: 242 - RNA, 21 nt, synthetic construct
  source 1..21: mol_type = other RNA
ccttcggtttgtatttagtgt

SEQ ID NO: 243 - RNA, 21 nt, synthetic construct
  source 1..21: mol_type = other RNA
cttcggtttgtatttagtgtt

SEQ ID NO: 244 - RNA, 21 nt, synthetic construct
  source 1..21: mol_type = other RNA
ggtttgtatttagtgtcttgt

SEQ ID NO: 245 - RNA, 21 nt, synthetic construct
  source 1..21: mol_type = other RNA
tgtatttagtgtcttgaatgt

SEQ ID NO: 246 - RNA, 21 nt, synthetic construct
  source 1..21: mol_type = other RNA
tatttagtgtcttgaatgtat

SEQ ID NO: 247 - RNA, 21 nt, synthetic construct
  source 1..21: mol_type = other RNA
tttagtgtcttgaatgtaagt

SEQ ID NO: 248 - RNA, 21 nt, synthetic construct
  source 1..21: mol_type = other RNA
gtcttgaatgtaagaacatgt

SEQ ID NO: 249 - RNA, 21 nt, synthetic construct
  source 1..21: mol_type = other RNA
gtaagaacatgacctccgtgt

SEQ ID NO: 250 - RNA, 21 nt, synthetic construct
  source 1..21: mol_type = other RNA
taagaacatgacctccgtgtt

SEQ ID NO: 251 - RNA, 21 nt, synthetic construct
  source 1..21: mol_type = other RNA
aagaacatgacctccgtgtat

SEQ ID NO: 252 - RNA, 21 nt, synthetic construct
  source 1..21: mol_type = other RNA
agaacatgacctccgtgtagt

SEQ ID NO: 253 - RNA, 21 nt, synthetic construct
  source 1..21: mol_type = other RNA
gaacatgacctccgtgtagtt

SEQ ID NO: 254 - RNA, 21 nt, synthetic construct
  source 1..21: mol_type = other RNA
aacatgacctccgtgtagtgt

SEQ ID NO: 255 - RNA, 21 nt, synthetic construct
  source 1..21: mol_type = other RNA
acatgacctccgtgtagtgtt

SEQ ID NO: 256 - RNA, 21 nt, synthetic construct
  source 1..21: mol_type = other RNA
tgacctccgtgtagtgtctgt

SEQ ID NO: 257 - RNA, 21 nt, synthetic construct
  source 1..21: mol_type = other RNA
ccgtgtagtgtctgtaatact

SEQ ID NO: 258 - RNA, 21 nt, synthetic construct
  source 1..21: mol_type = other RNA
cgtgtagtgtctgtaatacct

SEQ ID NO: 259 - RNA, 21 nt, synthetic construct
  source 1..21: mol_type = other RNA
gtgtagtgtctgtaatacctt

SEQ ID NO: 260 - RNA, 21 nt, synthetic construct
  source 1..21: mol_type = other RNA
tgtagtgtctgtaataccttt

SEQ ID NO: 261 - RNA, 21 nt, synthetic construct
  source 1..21: mol_type = other RNA
agtgtctgtaataccttagtt

SEQ ID NO: 262 - RNA, 21 nt, synthetic construct
  source 1..21: mol_type = other RNA
gtgtctgtaataccttagttt

SEQ ID NO: 263 - RNA, 21 nt, synthetic construct
  source 1..21: mol_type = other RNA
tgtctgtaataccttagtttt

SEQ ID NO: 264 - RNA, 21 nt, synthetic construct
  source 1..21: mol_type = other RNA
gtctgtaataccttagttttt

SEQ ID NO: 265 - RNA, 21 nt, synthetic construct
  source 1..21: mol_type = other RNA
tttccacagatgcttgtgatt

SEQ ID NO: 266 - RNA, 21 nt, synthetic construct
  source 1..21: mol_type = other RNA
cacagatgcttgtgatttttt

SEQ ID NO: 267 - RNA, 21 nt, synthetic construct
  source 1..21: mol_type = other RNA
acagatgcttgtgatttttgt

SEQ ID NO: 268 - RNA, 21 nt, synthetic construct
  source 1..21: mol_type = other RNA
cagatgcttgtgatttttgat

SEQ ID NO: 269 - RNA, 21 nt, synthetic construct
  source 1..21: mol_type = other RNA
agatgcttgtgatttttgaat

SEQ ID NO: 270 - RNA, 21 nt, synthetic construct
  source 1..21: mol_type = other RNA
gatgcttgtgatttttgaact

SEQ ID NO: 271 - RNA, 21 nt, synthetic construct
  source 1..21: mol_type = other RNA
tgtgatttttgaacaatacgt

SEQ ID NO: 272 - RNA, 21 nt, synthetic construct
  source 1..21: mol_type = other RNA
gtgatttttgaacaatacgtt

SEQ ID NO: 273 - RNA, 21 nt, synthetic construct
  source 1..21: mol_type = other RNA
tgatttttgaacaatacgtgt

SEQ ID NO: 274 - RNA, 21 nt, synthetic construct
  source 1..21: mol_type = other RNA
gatttttgaacaatacgtgat

SEQ ID NO: 275 - RNA, 21 nt, synthetic construct
  source 1..21: mol_type = other RNA
atttttgaacaatacgtgaat

SEQ ID NO: 276 - RNA, 21 nt, synthetic construct
  source 1..21: mol_type = other RNA
tgaacaatacgtgaaagatgt

SEQ ID NO: 277 - RNA, 21 nt, synthetic construct
  source 1..21: mol_type = other RNA
gatgcaagcacctgaatttct

SEQ ID NO: 278 - RNA, 21 nt, synthetic construct
  source 1..21: mol_type = other RNA
atgcaagcacctgaatttctt

SEQ ID NO: 279 - RNA, 21 nt, synthetic construct
  source 1..21: mol_type = other RNA
tgcaagcacctgaatttctgt

SEQ ID NO: 280 - RNA, 21 nt, synthetic construct
  source 1..21: mol_type = other RNA
gcaagcacctgaatttctgtt

SEQ ID NO: 281 - RNA, 21 nt, synthetic construct
  source 1..21: mol_type = other RNA
caagcacctgaatttctgttt

SEQ ID NO: 282 - RNA, 21 nt, synthetic construct
  source 1..21: mol_type = other RNA
aagcacctgaatttctgtttt

SEQ ID NO: 283 - RNA, 21 nt, synthetic construct
  source 1..21: mol_type = other RNA
agcacctgaatttctgtttgt

SEQ ID NO: 284 - RNA, 21 nt, synthetic construct
  source 1..21: mol_type = other RNA
gcacctgaatttctgtttgat

SEQ ID NO: 285 - RNA, 21 nt, synthetic construct
  source 1..21: mol_type = other RNA
cacctgaatttctgtttgaat

SEQ ID NO: 286 - RNA, 21 nt, synthetic construct
  source 1..21: mol_type = other RNA
acctgaatttctgtttgaatt

SEQ ID NO: 287 - RNA, 21 nt, synthetic construct
  source 1..21: mol_type = other RNA
cctgaatttctgtttgaatgt

SEQ ID NO: 288 - RNA, 21 nt, synthetic construct
  source 1..21: mol_type = other RNA
tgaatttctgtttgaatgcgt

SEQ ID NO: 289 - RNA, 21 nt, synthetic construct
  source 1..21: mol_type = other RNA
gaatttctgtttgaatgcggt

SEQ ID NO: 290 - RNA, 21 nt, synthetic construct
  source 1..21: mol_type = other RNA
aatttctgtttgaatgcggat

SEQ ID NO: 291 - RNA, 21 nt, synthetic construct
  source 1..21: mol_type = other RNA
ttgaatgcggaaccatagctt

SEQ ID NO: 292 - RNA, 21 nt, synthetic construct
  source 1..21: mol_type = other RNA
tgaatgcggaaccatagctgt

SEQ ID NO: 293 - RNA, 21 nt, synthetic construct
  source 1..21: mol_type = other RNA
gaatgcggaaccatagctggt

SEQ ID NO: 294 - RNA, 21 nt, synthetic construct
  source 1..21: mol_type = other RNA
cggaaccatagctggttattt

SEQ ID NO: 295 - RNA, 21 nt, synthetic construct
  source 1..21: mol_type = other RNA
ggaaccatagctggttatttt

SEQ ID NO: 296 - RNA, 21 nt, synthetic construct
  source 1..21: mol_type = other RNA
gaaccatagctggttatttct

SEQ ID NO: 297 - RNA, 21 nt, synthetic construct
  source 1..21: mol_type = other RNA
aaccatagctggttatttctt

SEQ ID NO: 298 - RNA, 21 nt, synthetic construct
  source 1..21: mol_type = other RNA
accatagctggttatttctct

SEQ ID NO: 299 - RNA, 21 nt, synthetic construct
  source 1..21: mol_type = other RNA
ccatagctggttatttctcct

SEQ ID NO: 300 - RNA, 21 nt, synthetic construct
  source 1..21: mol_type = other RNA
catagctggttatttctccct

SEQ ID NO: 301 - RNA, 21 nt, synthetic construct
  source 1..21: mol_type = other RNA
ctggttatttctcccttgtgt

SEQ ID NO: 302 - RNA, 21 nt, synthetic construct
  source 1..21: mol_type = other RNA
tggttatttctcccttgtgtt

SEQ ID NO: 303 - RNA, 21 nt, synthetic construct
  source 1..21: mol_type = other RNA
ggttatttctcccttgtgttt

SEQ ID NO: 304 - RNA, 21 nt, synthetic construct
  source 1..21: mol_type = other RNA
ttatttctcccttgtgttagt

SEQ ID NO: 305 - RNA, 21 nt, synthetic construct
  source 1..21: mol_type = other RNA
tatttctcccttgtgttagtt

SEQ ID NO: 306 - RNA, 21 nt, synthetic construct
  source 1..21: mol_type = other RNA
atttctcccttgtgttagtat

SEQ ID NO: 307 - RNA, 21 nt, synthetic construct
  source 1..21: mol_type = other RNA
tttctcccttgtgttagtaat

SEQ ID NO: 308 - RNA, 21 nt, synthetic construct
  source 1..21: mol_type = other RNA
tcccttgtgttagtaataaat

SEQ ID NO: 309 - RNA, 21 nt, synthetic construct
  source 1..21: mol_type = other RNA
cccttgtgttagtaataaact

SEQ ID NO: 310 - RNA, 21 nt, synthetic construct
  source 1..21: mol_type = other RNA
ccttgtgttagtaataaacgt

SEQ ID NO: 311 - RNA, 21 nt, synthetic construct
  source 1..21: mol_type = other RNA
cttgtgttagtaataaacgtt

SEQ ID NO: 312 - RNA, 21 nt, synthetic construct
  source 1..21: mol_type = other RNA
ttgtgttagtaataaacgtct

SEQ ID NO: 313 - RNA, 21 nt, synthetic construct
  source 1..21: mol_type = other RNA
tgtgttagtaataaacgtctt

SEQ ID NO: 314 - RNA, 21 nt, synthetic construct
  source 1..21: mol_type = other RNA
gtgttagtaataaacgtcttt

SEQ ID NO: 315 - RNA, 21 nt, synthetic construct
  source 1..21: mol_type = other RNA
tgttagtaataaacgtcttgt

SEQ ID NO: 316 - RNA, 21 nt, synthetic construct
  source 1..21: mol_type = other RNA
gttagtaataaacgtcttgct

SEQ ID NO: 317 - RNA, 21 nt, synthetic construct
  source 1..21: mol_type = other RNA
ttagtaataaacgtcttgcct

SEQ ID NO: 318 - RNA, 21 nt, synthetic construct
  source 1..21: mol_type = other RNA
aaacgtcttgccacaataagt

SEQ ID NO: 319 - RNA, 21 nt, synthetic construct
  source 1..21: mol_type = other RNA
aacgtcttgccacaataagct

SEQ ID NO: 320 - RNA, 21 nt, synthetic construct
  source 1..21: mol_type = other RNA
acgtcttgccacaataagcct

SEQ ID NO: 321 - RNA, 21 nt, synthetic construct
  source 1..21: mol_type = other RNA
agttgagaacaaaaattgggt

SEQ ID NO: 322 - RNA, 23 nt, synthetic construct
  source 1..23: mol_type = other RNA
accagaacaacggcagcttcttc

SEQ ID NO: 323 - RNA, 23 nt, synthetic construct
  source 1..23: mol_type = other RNA
acccagaacaacggcagcttctt

SEQ ID NO: 324 - RNA, 23 nt, synthetic construct
  source 1..23: mol_type = other RNA
aacccagaacaacggcagcttct

SEQ ID NO: 325 - RNA, 23 nt, synthetic construct
  source 1..23: mol_type = other RNA
aagtacccagaacaacggcagct

SEQ ID NO: 326 - RNA, 23 nt, synthetic construct
  source 1..23: mol_type = other RNA
actgtagtacccagaacaacggc

SEQ ID NO: 327 - RNA, 23 nt, synthetic construct
  source 1..23: mol_type = other RNA
accttctgctgtagtacccagaa

SEQ ID NO: 328 - RNA, 23 nt, synthetic construct
  source 1..23: mol_type = other RNA
acatacccttctgctgtagtacc

SEQ ID NO: 329 - RNA, 23 nt, synthetic construct
  source 1..23: mol_type = other RNA
agcatacccttctgctgtagtac

SEQ ID NO: 330 - RNA, 23 nt, synthetic construct
  source 1..23: mol_type = other RNA
acgcatacccttctgctgtagta

SEQ ID NO: 331 - RNA, 23 nt, synthetic construct
  source 1..23: mol_type = other RNA
accgcatacccttctgctgtagt

SEQ ID NO: 332 - RNA, 23 nt, synthetic construct
  source 1..23: mol_type = other RNA
atccgcatacccttctgctgtag

SEQ ID NO: 333 - RNA, 23 nt, synthetic construct
  source 1..23: mol_type = other RNA
acttccgcatacccttctgctgt

SEQ ID NO: 334 - RNA, 23 nt, synthetic construct
  source 1..23: mol_type = other RNA
acaggtactctcattgtggatga

SEQ ID NO: 335 - RNA, 23 nt, synthetic construct
  source 1..23: mol_type = other RNA
actcacaggtactctcattgtgg

SEQ ID NO: 336 - RNA, 23 nt, synthetic construct
  source 1..23: mol_type = other RNA
atgaattggagcaggtatgaagg

SEQ ID NO: 337 - RNA, 23 nt, synthetic construct
  source 1..23: mol_type = other RNA
actgaattggagcaggtatgaag

SEQ ID NO: 338 - RNA, 23 nt, synthetic construct
  source 1..23: mol_type = other RNA
acctgaattggagcaggtatgaa

SEQ ID NO: 339 - RNA, 23 nt, synthetic construct
  source 1..23: mol_type = other RNA
actgtagggccttttcatccaca

SEQ ID NO: 340 - RNA, 23 nt, synthetic construct
  source 1..23: mol_type = other RNA
acctgtagggccttttcatccac

SEQ ID NO: 341 - RNA, 23 nt, synthetic construct
  source 1..23: mol_type = other RNA
aagttttgcagcgactagcacca

SEQ ID NO: 342 - RNA, 23 nt, synthetic construct
  source 1..23: mol_type = other RNA
aaagttttgcagcgactagcacc

SEQ ID NO: 343 - RNA, 23 nt, synthetic construct
  source 1..23: mol_type = other RNA
acaagttttgcagcgactagcac

SEQ ID NO: 344 - RNA, 23 nt, synthetic construct
  source 1..23: mol_type = other RNA
acttcggtgtcaagttttgcagc

SEQ ID NO: 345 - RNA, 23 nt, synthetic construct
  source 1..23: mol_type = other RNA
atcttcggtgtcaagttttgcag

SEQ ID NO: 346 - RNA, 23 nt, synthetic construct
  source 1..23: mol_type = other RNA
acaacttgtcttcggtgtcaagt

SEQ ID NO: 347 - RNA, 23 nt, synthetic construct
  source 1..23: mol_type = other RNA
atcaacttgtcttcggtgtcaag

SEQ ID NO: 348 - RNA, 23 nt, synthetic construct
  source 1..23: mol_type = other RNA
acctcaacttgtcttcggtgtca

SEQ ID NO: 349 - RNA, 23 nt, synthetic construct
  source 1..23: mol_type = other RNA
accctcaacttgtcttcggtgtc

SEQ ID NO: 350 - RNA, 23 nt, synthetic construct
  source 1..23: mol_type = other RNA
aaccattgcggccctcaacttgt

SEQ ID NO: 351 - RNA, 23 nt, synthetic construct
  source 1..23: mol_type = other RNA
aaagaagttggccagcatcccga

SEQ ID NO: 352 - RNA, 23 nt, synthetic construct
  source 1..23: mol_type = other RNA
aagcccaagaagttggccagcat

SEQ ID NO: 353 - RNA, 23 nt, synthetic construct
  source 1..23: mol_type = other RNA
atacggaagcccaagaagttggc

SEQ ID NO: 354 - RNA, 23 nt, synthetic construct
  source 1..23: mol_type = other RNA
aatacggaagcccaagaagttgg

SEQ ID NO: 355 - RNA, 23 nt, synthetic construct
  source 1..23: mol_type = other RNA
atatacggaagcccaagaagttg

SEQ ID NO: 356 - RNA, 23 nt, synthetic construct
  source 1..23: mol_type = other RNA
aatatatacggaagcccaagaag

SEQ ID NO: 357 - RNA, 23 nt, synthetic construct
  source 1..23: mol_type = other RNA
accatatatacggaagcccaaga

SEQ ID NO: 358 - RNA, 23 nt, synthetic construct
  source 1..23: mol_type = other RNA
actcactgtgcatgccatatata

SEQ ID NO: 359 - RNA, 23 nt, synthetic construct
  source 1..23: mol_type = other RNA
accatagctcactgtgcatgcca

SEQ ID NO: 360 - RNA, 23 nt, synthetic construct
  source 1..23: mol_type = other RNA
atccaaggctcccagatagagag

SEQ ID NO: 361 - RNA, 23 nt, synthetic construct
  source 1..23: mol_type = other RNA
aaggattgcctgtagcctgtcag

SEQ ID NO: 362 - RNA, 23 nt, synthetic construct
  source 1..23: mol_type = other RNA
acaggattgcctgtagcctgtca

SEQ ID NO: 363 - RNA, 23 nt, synthetic construct
  source 1..23: mol_type = other RNA
aaacacccaggattgcctgtagc

SEQ ID NO: 364 - RNA, 23 nt, synthetic construct
  source 1..23: mol_type = other RNA
agaacacccaggattgcctgtag

SEQ ID NO: 365 - RNA, 23 nt, synthetic construct
  source 1..23: mol_type = other RNA
aaaggaacacccaggattgcctg

SEQ ID NO: 366 - RNA, 23 nt, synthetic construct
  source 1..23: mol_type = other RNA
acaaggaacacccaggattgcct

SEQ ID NO: 367 - RNA, 23 nt, synthetic construct
  source 1..23: mol_type = other RNA
atccaaggaacacccaggattgc

SEQ ID NO: 368 - RNA, 23 nt, synthetic construct
  source 1..23: mol_type = other RNA
acttccaaggaacacccaggatt

SEQ ID NO: 369 - RNA, 23 nt, synthetic construct
  source 1..23: mol_type = other RNA
acagttcttgtccttccaaggaa

SEQ ID NO: 370 - RNA, 23 nt, synthetic construct
  source 1..23: mol_type = other RNA
aacaaacggctgcttcaggtgca

SEQ ID NO: 371 - RNA, 23 nt, synthetic construct
  source 1..23: mol_type = other RNA
acagttctgtgaagtccagagag

SEQ ID NO: 372 - RNA, 23 nt, synthetic construct
  source 1..23: mol_type = other RNA
accagttctgtgaagtccagaga

SEQ ID NO: 373 - RNA, 23 nt, synthetic construct
  source 1..23: mol_type = other RNA
acatccagttctgtgaagtccag

SEQ ID NO: 374 - RNA, 23 nt, synthetic construct
  source 1..23: mol_type = other RNA
aaacatccagttctgtgaagtcc

SEQ ID NO: 375 - RNA, 23 nt, synthetic construct
  source 1..23: mol_type = other RNA
acaacatccagttctgtgaagtc

SEQ ID NO: 376 - RNA, 23 nt, synthetic construct
  source 1..23: mol_type = other RNA
acagcaacatccagttctgtgaa

SEQ ID NO: 377 - RNA, 23 nt, synthetic construct
  source 1..23: mol_type = other RNA
agcagcaacatccagttctgtga

SEQ ID NO: 378 - RNA, 23 nt, synthetic construct
  source 1..23: mol_type = other RNA
acaatcttctcagcagcaacatc

SEQ ID NO: 379 - RNA, 23 nt, synthetic construct
  source 1..23: mol_type = other RNA
agtcaatcttctcagcagcaaca

SEQ ID NO: 380 - RNA, 23 nt, synthetic construct
  source 1..23: mol_type = other RNA
actgtcaatcttctcagcagcaa

SEQ ID NO: 381 - RNA, 23 nt, synthetic construct
  source 1..23: mol_type = other RNA
acacagcctgcatgaacctgtca

SEQ ID NO: 382 - RNA, 23 nt, synthetic construct
  source 1..23: mol_type = other RNA
acatcctgtcacagcctgcatga

SEQ ID NO: 383 - RNA, 23 nt, synthetic construct
  source 1..23: mol_type = other RNA
atccatcctgtcacagcctgcat

SEQ ID NO: 384 - RNA, 23 nt, synthetic construct
  source 1..23: mol_type = other RNA
attgaaagccagggtgctgtcca

SEQ ID NO: 385 - RNA, 23 nt, synthetic construct
  source 1..23: mol_type = other RNA
aacgtaggtgttgaaagccaggg

SEQ ID NO: 386 - RNA, 23 nt, synthetic construct
  source 1..23: mol_type = other RNA
atggacgtaggtgttgaaagcca

SEQ ID NO: 387 - RNA, 23 nt, synthetic construct
  source 1..23: mol_type = other RNA
acttggaagtggacgtaggtgtt

SEQ ID NO: 388 - RNA, 23 nt, synthetic construct
  source 1..23: mol_type = other RNA
acatcttcccttggaagtggacg

SEQ ID NO: 389 - RNA, 23 nt, synthetic construct
  source 1..23: mol_type = other RNA
acttcatcttcccttggaagtgg

SEQ ID NO: 390 - RNA, 23 nt, synthetic construct
  source 1..23: mol_type = other RNA
accttcatcttcccttggaagtg

SEQ ID NO: 391 - RNA, 23 nt, synthetic construct
  source 1..23: mol_type = other RNA
agcccttcatcttcccttggaag

SEQ ID NO: 392 - RNA, 23 nt, synthetic construct
  source 1..23: mol_type = other RNA
acagggagaagcccttcatcttc

SEQ ID NO: 393 - RNA, 23 nt, synthetic construct
  source 1..23: mol_type = other RNA
aacactgaggtgctgttgtccac

SEQ ID NO: 394 - RNA, 23 nt, synthetic construct
  source 1..23: mol_type = other RNA
agacactgaggtgctgttgtcca

SEQ ID NO: 395 - RNA, 23 nt, synthetic construct
  source 1..23: mol_type = other RNA
acagacactgaggtgctgttgtc

SEQ ID NO: 396 - RNA, 23 nt, synthetic construct
  source 1..23: mol_type = other RNA
aatgggaacagacactgaggtgc

SEQ ID NO: 397 - RNA, 23 nt, synthetic construct
  source 1..23: mol_type = other RNA
agagcatgggaacagacactgag

SEQ ID NO: 398 - RNA, 23 nt, synthetic construct
  source 1..23: mol_type = other RNA
acagagagcatgggaacagacac

SEQ ID NO: 399 - RNA, 23 nt, synthetic construct
  source 1..23: mol_type = other RNA
accagagagcatgggaacagaca

SEQ ID NO: 400 - RNA, 23 nt, synthetic construct
  source 1..23: mol_type = other RNA
agagaagttgtcctggatgtcac

SEQ ID NO: 401 - RNA, 23 nt, synthetic construct
  source 1..23: mol_type = other RNA
acgagaagttgtcctggatgtca

SEQ ID NO: 402 - RNA, 23 nt, synthetic construct
  source 1..23: mol_type = other RNA
accgagaagttgtcctggatgtc

SEQ ID NO: 403 - RNA, 23 nt, synthetic construct
  source 1..23: mol_type = other RNA
aaccgagaagttgtcctggatgt

SEQ ID NO: 404 - RNA, 23 nt, synthetic construct
  source 1..23: mol_type = other RNA
acaccgagaagttgtcctggatg

SEQ ID NO: 405 - RNA, 23 nt, synthetic construct
  source 1..23: mol_type = other RNA
atcaccgagaagttgtcctggat

SEQ ID NO: 406 - RNA, 23 nt, synthetic construct
  source 1..23: mol_type = other RNA
agtcaccgagaagttgtcctgga

SEQ ID NO: 407 - RNA, 23 nt, synthetic construct
  source 1..23: mol_type = other RNA
acacttgagtcaccgagaagttg

SEQ ID NO: 408 - RNA, 23 nt, synthetic construct
  source 1..23: mol_type = other RNA
agcacttgagtcaccgagaagtt

SEQ ID NO: 409 - RNA, 23 nt, synthetic construct
  source 1..23: mol_type = other RNA
acagtgaagggcacttgagtcac

SEQ ID NO: 410 - RNA, 23 nt, synthetic construct
  source 1..23: mol_type = other RNA
actcagtgaagggcacttgagtc

SEQ ID NO: 411 - RNA, 23 nt, synthetic construct
  source 1..23: mol_type = other RNA
acatagtgaggctggatcagcag

SEQ ID NO: 412 - RNA, 23 nt, synthetic construct
  source 1..23: mol_type = other RNA
atggaaagtgagaccctccacct

SEQ ID NO: 413 - RNA, 23 nt, synthetic construct
  source 1..23: mol_type = other RNA
agagttttgctggaaagtgagac

SEQ ID NO: 414 - RNA, 23 nt, synthetic construct
  source 1..23: mol_type = other RNA
acagttgagggagttttgctgga

SEQ ID NO: 415 - RNA, 23 nt, synthetic construct
  source 1..23: mol_type = other RNA
accagttgagggagttttgctgg

SEQ ID NO: 416 - RNA, 23 nt, synthetic construct
  source 1..23: mol_type = other RNA
acatccagttgagggagttttgc

SEQ ID NO: 417 - RNA, 23 nt, synthetic construct
  source 1..23: mol_type = other RNA
acttcatccagttgagggagttt

SEQ ID NO: 418 - RNA, 23 nt, synthetic construct
  source 1..23: mol_type = other RNA
agagatagtttcttcatccagtt

SEQ ID NO: 419 - RNA, 23 nt, synthetic construct
  source 1..23: mol_type = other RNA
aaagatccttgcagcaccagttg

SEQ ID NO: 420 - RNA, 23 nt, synthetic construct
  source 1..23: mol_type = other RNA
acataagatccttgcagcaccag

SEQ ID NO: 421 - RNA, 23 nt, synthetic construct
  source 1..23: mol_type = other RNA
atcataagatccttgcagcacca

SEQ ID NO: 422 - RNA, 23 nt, synthetic construct
  source 1..23: mol_type = other RNA
agtcataagatccttgcagcacc

SEQ ID NO: 423 - RNA, 23 nt, synthetic construct
  source 1..23: mol_type = other RNA
acaggtcctgcaggtcataagat

SEQ ID NO: 424 - RNA, 23 nt, synthetic construct
  source 1..23: mol_type = other RNA
aatttttgcaggttcagctcggt

SEQ ID NO: 425 - RNA, 23 nt, synthetic construct
  source 1..23: mol_type = other RNA
aaatttttgcaggttcagctcgg

SEQ ID NO: 426 - RNA, 23 nt, synthetic construct
  source 1..23: mol_type = other RNA
acaatttttgcaggttcagctcg

SEQ ID NO: 427 - RNA, 23 nt, synthetic construct
  source 1..23: mol_type = other RNA
atcaatttttgcaggttcagctc

SEQ ID NO: 428 - RNA, 23 nt, synthetic construct
  source 1..23: mol_type = other RNA
actcaatttttgcaggttcagct

SEQ ID NO: 429 - RNA, 23 nt, synthetic construct
  source 1..23: mol_type = other RNA
agctcaatttttgcaggttcagc

SEQ ID NO: 430 - RNA, 23 nt, synthetic construct
  source 1..23: mol_type = other RNA
agtcattgctcaatttttgcagg

SEQ ID NO: 431 - RNA, 23 nt, synthetic construct
  source 1..23: mol_type = other RNA
acggtcattgctcaatttttgca

SEQ ID NO: 432 - RNA, 23 nt, synthetic construct
  source 1..23: mol_type = other RNA
actgatgcggtcattgctcaatt

SEQ ID NO: 433 - RNA, 23 nt, synthetic construct
  source 1..23: mol_type = other RNA
acctgatgcggtcattgctcaat

SEQ ID NO: 434 - RNA, 23 nt, synthetic construct
  source 1..23: mol_type = other RNA
aaccctgatgcggtcattgctca

SEQ ID NO: 435 - RNA, 23 nt, synthetic construct
  source 1..23: mol_type = other RNA
aaaaatgctgttcagcacctccc

SEQ ID NO: 436 - RNA, 23 nt, synthetic construct
  source 1..23: mol_type = other RNA
actcatccgcttcaagctcaaaa

SEQ ID NO: 437 - RNA, 23 nt, synthetic construct
  source 1..23: mol_type = other RNA
atgttaagctgttgggtagactc

SEQ ID NO: 438 - RNA, 23 nt, synthetic construct
  source 1..23: mol_type = other RNA
attgttaagctgttgggtagact

SEQ ID NO: 439 - RNA, 23 nt, synthetic construct
  source 1..23: mol_type = other RNA
acttgttaagctgttgggtagac

SEQ ID NO: 440 - RNA, 23 nt, synthetic construct
  source 1..23: mol_type = other RNA
acaggcttgttaagctgttgggt

SEQ ID NO: 441 - RNA, 23 nt, synthetic construct
  source 1..23: mol_type = other RNA
acctcaggcttgttaagctgttg

SEQ ID NO: 442 - RNA, 23 nt, synthetic construct
  source 1..23: mol_type = other RNA
aaagacctcaggcttgttaagct

SEQ ID NO: 443 - RNA, 23 nt, synthetic construct
  source 1..23: mol_type = other RNA
acaagacctcaggcttgttaagc

SEQ ID NO: 444 - RNA, 23 nt, synthetic construct
  source 1..23: mol_type = other RNA
accaagacctcaggcttgttaag

SEQ ID NO: 445 - RNA, 23 nt, synthetic construct
  source 1..23: mol_type = other RNA
atccaagacctcaggcttgttaa

SEQ ID NO: 446 - RNA, 23 nt, synthetic construct
  source 1..23: mol_type = other RNA
actccaagacctcaggcttgtta

SEQ ID NO: 447 - RNA, 23 nt, synthetic construct
  source 1..23: mol_type = other RNA
acctccaagacctcaggcttgtt

SEQ ID NO: 448 - RNA, 23 nt, synthetic construct
  source 1..23: mol_type = other RNA
agcaaacaggaatgggcggttca

SEQ ID NO: 449 - RNA, 23 nt, synthetic construct
  source 1..23: mol_type = other RNA
aagcaaacaggaatgggcggttc

SEQ ID NO: 450 - RNA, 23 nt, synthetic construct
  source 1..23: mol_type = other RNA
acagcaaacaggaatgggcggtt

SEQ ID NO: 451 - RNA, 23 nt, synthetic construct
  source 1..23: mol_type = other RNA
aacagcaaacaggaatgggcggt

SEQ ID NO: 452 - RNA, 23 nt, synthetic construct
  source 1..23: mol_type = other RNA
acatacacagcaaacaggaatgg

SEQ ID NO: 453 - RNA, 23 nt, synthetic construct
  source 1..23: mol_type = other RNA
aatcatacacagcaaacaggaat

SEQ ID NO: 454 - RNA, 23 nt, synthetic construct
  source 1..23: mol_type = other RNA
acgctttgatcatacacagcaaa

SEQ ID NO: 455 - RNA, 23 nt, synthetic construct
  source 1..23: mol_type = other RNA
agcgctttgatcatacacagcaa

SEQ ID NO: 456 - RNA, 23 nt, synthetic construct
  source 1..23: mol_type = other RNA
aggcgctttgatcatacacagca

SEQ ID NO: 457 - RNA, 23 nt, synthetic construct
  source 1..23: mol_type = other RNA
attgttatctgctgctggccttt

SEQ ID NO: 458 - RNA, 23 nt, synthetic construct
  source 1..23: mol_type = other RNA
aacacatcgctgatttgtccggg

SEQ ID NO: 459 - RNA, 23 nt, synthetic construct
  source 1..23: mol_type = other RNA
agacacatcgctgatttgtccgg

SEQ ID NO: 460 - RNA, 23 nt, synthetic construct
  source 1..23: mol_type = other RNA
aattagaagaaaaggtgggagac

SEQ ID NO: 461 - RNA, 23 nt, synthetic construct
  source 1..23: mol_type = other RNA
acattagaagaaaaggtgggaga

SEQ ID NO: 462 - RNA, 23 nt, synthetic construct
  source 1..23: mol_type = other RNA
atcattagaagaaaaggtgggag

SEQ ID NO: 463 - RNA, 23 nt, synthetic construct
  source 1..23: mol_type = other RNA
agtcgactcattagaagaaaagg

SEQ ID NO: 464 - RNA, 23 nt, synthetic construct
  source 1..23: mol_type = other RNA
aagtcgactcattagaagaaaag

SEQ ID NO: 465 - RNA, 23 nt, synthetic construct
  source 1..23: mol_type = other RNA
aaagtcgactcattagaagaaaa

SEQ ID NO: 466 - RNA, 23 nt, synthetic construct
  source 1..23: mol_type = other RNA
acaaagtcgactcattagaagaa

SEQ ID NO: 467 - RNA, 23 nt, synthetic construct
  source 1..23: mol_type = other RNA
atcaaagtcgactcattagaaga

SEQ ID NO: 468 - RNA, 23 nt, synthetic construct
  source 1..23: mol_type = other RNA
actcaaagtcgactcattagaag

SEQ ID NO: 469 - RNA, 23 nt, synthetic construct
  source 1..23: mol_type = other RNA
agctcaaagtcgactcattagaa

SEQ ID NO: 470 - RNA, 23 nt, synthetic construct
  source 1..23: mol_type = other RNA
aagctcaaagtcgactcattaga

SEQ ID NO: 471 - RNA, 23 nt, synthetic construct
  source 1..23: mol_type = other RNA
actgctttccagctcaaagtcga

SEQ ID NO: 472 - RNA, 23 nt, synthetic construct
  source 1..23: mol_type = other RNA
aaaacggctgctttccagctcaa

SEQ ID NO: 473 - RNA, 23 nt, synthetic construct
  source 1..23: mol_type = other RNA
agaaacggctgctttccagctca

SEQ ID NO: 474 - RNA, 23 nt, synthetic construct
  source 1..23: mol_type = other RNA
aagaaacggctgctttccagctc

SEQ ID NO: 475 - RNA, 23 nt, synthetic construct
  source 1..23: mol_type = other RNA
agagaaacggctgctttccagct

SEQ ID NO: 476 - RNA, 23 nt, synthetic construct
  source 1..23: mol_type = other RNA
aaggagaaacggctgctttccag

SEQ ID NO: 477 - RNA, 23 nt, synthetic construct
  source 1..23: mol_type = other RNA
acaaggagaaacggctgctttcc

SEQ ID NO: 478 - RNA, 23 nt, synthetic construct
  source 1..23: mol_type = other RNA
aaccaaggagaaacggctgcttt

SEQ ID NO: 479 - RNA, 23 nt, synthetic construct
  source 1..23: mol_type = other RNA
agaccaaggagaaacggctgctt

SEQ ID NO: 480 - RNA, 23 nt, synthetic construct
  source 1..23: mol_type = other RNA
aagaccaaggagaaacggctgct

SEQ ID NO: 481 - RNA, 23 nt, synthetic construct
  source 1..23: mol_type = other RNA
aacttagaccaaggagaaacggc

SEQ ID NO: 482 - RNA, 23 nt, synthetic construct
  source 1..23: mol_type = other RNA
acacttagaccaaggagaaacgg

SEQ ID NO: 483 - RNA, 23 nt, synthetic construct
  source 1..23: mol_type = other RNA
aacacttagaccaaggagaaacg

SEQ ID NO: 484 - RNA, 23 nt, synthetic construct
  source 1..23: mol_type = other RNA
acacacttagaccaaggagaaac

SEQ ID NO: 485 - RNA, 23 nt, synthetic construct
  source 1..23: mol_type = other RNA
agcacacttagaccaaggagaaa

SEQ ID NO: 486 - RNA, 23 nt, synthetic construct
  source 1..23: mol_type = other RNA
acagcacacttagaccaaggaga

SEQ ID NO: 487 - RNA, 23 nt, synthetic construct
  source 1..23: mol_type = other RNA
actccatgcagcacacttagacc

SEQ ID NO: 488 - RNA, 23 nt, synthetic construct
  source 1..23: mol_type = other RNA
actcactccatgcagcacactta

SEQ ID NO: 489 - RNA, 23 nt, synthetic construct
  source 1..23: mol_type = other RNA
acttctactgctcactccatgca

SEQ ID NO: 490 - RNA, 23 nt, synthetic construct
  source 1..23: mol_type = other RNA
acaggcttctactgctcactcca

SEQ ID NO: 491 - RNA, 23 nt, synthetic construct
  source 1..23: mol_type = other RNA
acaaactgggaggtgcatttgtg

SEQ ID NO: 492 - RNA, 23 nt, synthetic construct
  source 1..23: mol_type = other RNA
agcaaactgggaggtgcatttgt

SEQ ID NO: 493 - RNA, 23 nt, synthetic construct
  source 1..23: mol_type = other RNA
aagcaaactgggaggtgcatttg

SEQ ID NO: 494 - RNA, 23 nt, synthetic construct
  source 1..23: mol_type = other RNA
acagcaaactgggaggtgcattt

SEQ ID NO: 495 - RNA, 23 nt, synthetic construct
  source 1..23: mol_type = other RNA
accagcaaactgggaggtgcatt

SEQ ID NO: 496 - RNA, 23 nt, synthetic construct
  source 1..23: mol_type = other RNA
ataaacccagcaaactgggaggt

SEQ ID NO: 497 - RNA, 23 nt, synthetic construct
  source 1..23: mol_type = other RNA
aaataaacccagcaaactgggag

SEQ ID NO: 498 - RNA, 23 nt, synthetic construct
  source 1..23: mol_type = other RNA
aaaataaacccagcaaactggga

SEQ ID NO: 499 - RNA, 23 nt, synthetic construct
  source 1..23: mol_type = other RNA
aaaaataaacccagcaaactggg

SEQ ID NO: 500 - RNA, 23 nt, synthetic construct
  source 1..23: mol_type = other RNA
ataaaataaacccagcaaactgg

SEQ ID NO: 501 - RNA, 23 nt, synthetic construct
  source 1..23: mol_type = other RNA
actaaaataaacccagcaaactg

SEQ ID NO: 502 - RNA, 23 nt, synthetic construct
  source 1..23: mol_type = other RNA
atctaaaataaacccagcaaact

SEQ ID NO: 503 - RNA, 23 nt, synthetic construct
  source 1..23: mol_type = other RNA
actctaaaataaacccagcaaac

SEQ ID NO: 504 - RNA, 23 nt, synthetic construct
  source 1..23: mol_type = other RNA
atctctaaaataaacccagcaaa

SEQ ID NO: 505 - RNA, 23 nt, synthetic construct
  source 1..23: mol_type = other RNA
accattctctaaaataaacccag

SEQ ID NO: 506 - RNA, 23 nt, synthetic construct
  source 1..23: mol_type = other RNA
aaacactggttcttgcctcccca

SEQ ID NO: 507 - RNA, 23 nt, synthetic construct
  source 1..23: mol_type = other RNA
aaaacactggttcttgcctcccc

SEQ ID NO: 508 - RNA, 23 nt, synthetic construct
  source 1..23: mol_type = other RNA
actaaacactggttcttgcctcc

SEQ ID NO: 509 - RNA, 23 nt, synthetic construct
  source 1..23: mol_type = other RNA
agctaaacactggttcttgcctc

SEQ ID NO: 510 - RNA, 23 nt, synthetic construct
  source 1..23: mol_type = other RNA
acagtagtcccgcgctaaacact

SEQ ID NO: 511 - RNA, 23 nt, synthetic construct
  source 1..23: mol_type = other RNA
attctttttggaacagtagtccc

SEQ ID NO: 512 - RNA, 23 nt, synthetic construct
  source 1..23: mol_type = other RNA
aggaattctttttggaacagtag

SEQ ID NO: 513 - RNA, 23 nt, synthetic construct
  source 1..23: mol_type = other RNA
atggaattctttttggaacagta

SEQ ID NO: 514 - RNA, 23 nt, synthetic construct
  source 1..23: mol_type = other RNA
agtcggttggaattctttttgga

SEQ ID NO: 515 - RNA, 23 nt, synthetic construct
  source 1..23: mol_type = other RNA
atcacaaacaagctggtcggttg

SEQ ID NO: 516 - RNA, 23 nt, synthetic construct
  source 1..23: mol_type = other RNA
aacttgaaaagggaacacttttt

SEQ ID NO: 517 - RNA, 23 nt, synthetic construct
  source 1..23: mol_type = other RNA
acaacttgaaaagggaacacttt

SEQ ID NO: 518 - RNA, 23 nt, synthetic construct
  source 1..23: mol_type = other RNA
atcaacttgaaaagggaacactt

SEQ ID NO: 519 - RNA, 23 nt, synthetic construct
  source 1..23: mol_type = other RNA
actcaacttgaaaagggaacact

SEQ ID NO: 520 - RNA, 23 nt, synthetic construct
  source 1..23: mol_type = other RNA
atctcaacttgaaaagggaacac

SEQ ID NO: 521 - RNA, 23 nt, synthetic construct
  source 1..23: mol_type = other RNA
acaatttttgttctcaacttgaa

SEQ ID NO: 522 - RNA, 23 nt, synthetic construct
  source 1..23: mol_type = other RNA
accaatttttgttctcaacttga

SEQ ID NO: 523 - RNA, 23 nt, synthetic construct
  source 1..23: mol_type = other RNA
aacccaatttttgttctcaactt

SEQ ID NO: 524 - RNA, 23 nt, synthetic construct
  source 1..23: mol_type = other RNA
aaacccaatttttgttctcaact

SEQ ID NO: 525 - RNA, 23 nt, synthetic construct
  source 1..23: mol_type = other RNA
aaaacccaatttttgttctcaac

SEQ ID NO: 526 - RNA, 23 nt, synthetic construct
  source 1..23: mol_type = other RNA
aaaaacccaatttttgttctcaa

SEQ ID NO: 527 - RNA, 23 nt, synthetic construct
  source 1..23: mol_type = other RNA
ataaaacccaatttttgttctca

SEQ ID NO: 528 - RNA, 23 nt, synthetic construct
  source 1..23: mol_type = other RNA
attaaaacccaatttttgttctc

SEQ ID NO: 529 - RNA, 23 nt, synthetic construct
  source 1..23: mol_type = other RNA
aggcaatgcaaaaatgtatactt

SEQ ID NO: 530 - RNA, 23 nt, synthetic construct
  source 1..23: mol_type = other RNA
aaaggcaatgcaaaaatgtatac

SEQ ID NO: 531 - RNA, 23 nt, synthetic construct
  source 1..23: mol_type = other RNA
accgaaggcaatgcaaaaatgta

SEQ ID NO: 532 - RNA, 23 nt, synthetic construct
  source 1..23: mol_type = other RNA
aaccgaaggcaatgcaaaaatgt

SEQ ID NO: 533 - RNA, 23 nt, synthetic construct
  source 1..23: mol_type = other RNA
aaaccgaaggcaatgcaaaaatg

SEQ ID NO: 534 - RNA, 23 nt, synthetic construct
  source 1..23: mol_type = other RNA
aaaaccgaaggcaatgcaaaaat

SEQ ID NO: 535 - RNA, 23 nt, synthetic construct
  source 1..23: mol_type = other RNA
acaaaccgaaggcaatgcaaaaa

SEQ ID NO: 536 - RNA, 23 nt, synthetic construct
  source 1..23: mol_type = other RNA
aacaaaccgaaggcaatgcaaaa

SEQ ID NO: 537 - RNA, 23 nt, synthetic construct
  source 1..23: mol_type = other RNA
atacaaaccgaaggcaatgcaaa

SEQ ID NO: 538 - RNA, 23 nt, synthetic construct
  source 1..23: mol_type = other RNA
aatacaaaccgaaggcaatgcaa

SEQ ID NO: 539 - RNA, 23 nt, synthetic construct
  source 1..23: mol_type = other RNA
aaatacaaaccgaaggcaatgca

SEQ ID NO: 540 - RNA, 23 nt, synthetic construct
  source 1..23: mol_type = other RNA
aaaatacaaaccgaaggcaatgc

SEQ ID NO: 541 - RNA, 23 nt, synthetic construct
  source 1..23: mol_type = other RNA
ataaatacaaaccgaaggcaatg

SEQ ID NO: 542 - RNA, 23 nt, synthetic construct
  source 1..23: mol_type = other RNA
actaaatacaaaccgaaggcaat

SEQ ID NO: 543 - RNA, 23 nt, synthetic construct
  source 1..23: mol_type = other RNA
aactaaatacaaaccgaaggcaa

SEQ ID NO: 544 - RNA, 23 nt, synthetic construct
  source 1..23: mol_type = other RNA
acactaaatacaaaccgaaggca

SEQ ID NO: 545 - RNA, 23 nt, synthetic construct
  source 1..23: mol_type = other RNA
aacactaaatacaaaccgaaggc

SEQ ID NO: 546 - RNA, 23 nt, synthetic construct
  source 1..23: mol_type = other RNA
acaagacactaaatacaaaccga

SEQ ID NO: 547 - RNA, 23 nt, synthetic construct
  source 1..23: mol_type = other RNA
acattcaagacactaaatacaaa

SEQ ID NO: 548 - RNA, 23 nt, synthetic construct
  source 1..23: mol_type = other RNA
atacattcaagacactaaataca

SEQ ID NO: 549 - RNA, 23 nt, synthetic construct
  source 1..23: mol_type = other RNA
acttacattcaagacactaaata

SEQ ID NO: 550 - RNA, 23 nt, synthetic construct
  source 1..23: mol_type = other RNA
acatgttcttacattcaagacac

SEQ ID NO: 551 - RNA, 23 nt, synthetic construct
  source 1..23: mol_type = other RNA
acacggaggtcatgttcttacat

SEQ ID NO: 552 - RNA, 23 nt, synthetic construct
  source 1..23: mol_type = other RNA
aacacggaggtcatgttcttaca

SEQ ID NO: 553 - RNA, 23 nt, synthetic construct
  source 1..23: mol_type = other RNA
atacacggaggtcatgttcttac

SEQ ID NO: 554 - RNA, 23 nt, synthetic construct
  source 1..23: mol_type = other RNA
actacacggaggtcatgttctta

SEQ ID NO: 555 - RNA, 23 nt, synthetic construct
  source 1..23: mol_type = other RNA
aactacacggaggtcatgttctt

SEQ ID NO: 556 - RNA, 23 nt, synthetic construct
  source 1..23: mol_type = other RNA
acactacacggaggtcatgttct

SEQ ID NO: 557 - RNA, 23 nt, synthetic construct
  source 1..23: mol_type = other RNA
aacactacacggaggtcatgttc

SEQ ID NO: 558 - RNA, 23 nt, synthetic construct
  source 1..23: mol_type = other RNA
acagacactacacggaggtcatg

SEQ ID NO: 559 - RNA, 23 nt, synthetic construct
  source 1..23: mol_type = other RNA
agtattacagacactacacggag

SEQ ID NO: 560 - RNA, 23 nt, synthetic construct
  source 1..23: mol_type = other RNA
aggtattacagacactacacgga

SEQ ID NO: 561 - RNA, 23 nt, synthetic construct
  source 1..23: mol_type = other RNA
aaggtattacagacactacacgg

SEQ ID NO: 562 - RNA, 23 nt, synthetic construct
  source 1..23: mol_type = other RNA
aaaggtattacagacactacacg

SEQ ID NO: 563 - RNA, 23 nt, synthetic construct
  source 1..23: mol_type = other RNA
aactaaggtattacagacactac

SEQ ID NO: 564 - RNA, 23 nt, synthetic construct
  source 1..23: mol_type = other RNA
aaactaaggtattacagacacta

SEQ ID NO: 565 - RNA, 23 nt, synthetic construct
  source 1..23: mol_type = other RNA
aaaactaaggtattacagacact

SEQ ID NO: 566 - RNA, 23 nt, synthetic construct
  source 1..23: mol_type = other RNA
aaaaactaaggtattacagacac

SEQ ID NO: 567 - RNA, 23 nt, synthetic construct
  source 1..23: mol_type = other RNA
aatcacaagcatctgtggaaaaa

SEQ ID NO: 568 - RNA, 23 nt, synthetic construct
  source 1..23: mol_type = other RNA
aaaaaatcacaagcatctgtgga

SEQ ID NO: 569 - RNA, 23 nt, synthetic construct
  source 1..23: mol_type = other RNA
acaaaaatcacaagcatctgtgg

SEQ ID NO: 570 - RNA, 23 nt, synthetic construct
  source 1..23: mol_type = other RNA
atcaaaaatcacaagcatctgtg

SEQ ID NO: 571 - RNA, 23 nt, synthetic construct
  source 1..23: mol_type = other RNA
attcaaaaatcacaagcatctgt

SEQ ID NO: 572 - RNA, 23 nt, synthetic construct
  source 1..23: mol_type = other RNA
agttcaaaaatcacaagcatctg

SEQ ID NO: 573 - RNA, 23 nt, synthetic construct
  source 1..23: mol_type = other RNA
acgtattgttcaaaaatcacaag

SEQ ID NO: 574 - RNA, 23 nt, synthetic construct
  source 1..23: mol_type = other RNA
aacgtattgttcaaaaatcacaa

SEQ ID NO: 575 - RNA, 23 nt, synthetic construct
  source 1..23: mol_type = other RNA
acacgtattgttcaaaaatcaca

SEQ ID NO: 576 - RNA, 23 nt, synthetic construct
  source 1..23: mol_type = other RNA
atcacgtattgttcaaaaatcac

SEQ ID NO: 577 - RNA, 23 nt, synthetic construct
  source 1..23: mol_type = other RNA
attcacgtattgttcaaaaatca

SEQ ID NO: 578 - RNA, 23 nt, synthetic construct
  source 1..23: mol_type = other RNA
acatctttcacgtattgttcaaa

SEQ ID NO: 579 - RNA, 23 nt, synthetic construct
  source 1..23: mol_type = other RNA
agaaattcaggtgcttgcatctt

SEQ ID NO: 580 - RNA, 23 nt, synthetic construct
  source 1..23: mol_type = other RNA
aagaaattcaggtgcttgcatct

SEQ ID NO: 581 - RNA, 23 nt, synthetic construct
  source 1..23: mol_type = other RNA
acagaaattcaggtgcttgcatc

SEQ ID NO: 582 - RNA, 23 nt, synthetic construct
  source 1..23: mol_type = other RNA
aacagaaattcaggtgcttgcat

SEQ ID NO: 583 - RNA, 23 nt, synthetic construct
  source 1..23: mol_type = other RNA
aaacagaaattcaggtgcttgca

SEQ ID NO: 584 - RNA, 23 nt, synthetic construct
  source 1..23: mol_type = other RNA
aaaacagaaattcaggtgcttgc

SEQ ID NO: 585 - RNA, 23 nt, synthetic construct
  source 1..23: mol_type = other RNA
acaaacagaaattcaggtgcttg

SEQ ID NO: 586 - RNA, 23 nt, synthetic construct
  source 1..23: mol_type = other RNA
atcaaacagaaattcaggtgctt

SEQ ID NO: 587 - RNA, 23 nt, synthetic construct
  source 1..23: mol_type = other RNA
attcaaacagaaattcaggtgct

SEQ ID NO: 588 - RNA, 23 nt, synthetic construct
  source 1..23: mol_type = other RNA
aattcaaacagaaattcaggtgc

SEQ ID NO: 589 - RNA, 23 nt, synthetic construct
  source 1..23: mol_type = other RNA
acattcaaacagaaattcaggtg

SEQ ID NO: 590 - RNA, 23 nt, synthetic construct
  source 1..23: mol_type = other RNA
acgcattcaaacagaaattcagg

SEQ ID NO: 591 - RNA, 23 nt, synthetic construct
  source 1..23: mol_type = other RNA
accgcattcaaacagaaattcag

SEQ ID NO: 592 - RNA, 23 nt, synthetic construct
  source 1..23: mol_type = other RNA
atccgcattcaaacagaaattca

SEQ ID NO: 593 - RNA, 23 nt, synthetic construct
  source 1..23: mol_type = other RNA
aagctatggttccgcattcaaac

SEQ ID NO: 594 - RNA, 23 nt, synthetic construct
  source 1..23: mol_type = other RNA
acagctatggttccgcattcaaa

SEQ ID NO: 595 - RNA, 23 nt, synthetic construct
  source 1..23: mol_type = other RNA
accagctatggttccgcattcaa

SEQ ID NO: 596 - RNA, 23 nt, synthetic construct
  source 1..23: mol_type = other RNA
aaataaccagctatggttccgca

SEQ ID NO: 597 - RNA, 23 nt, synthetic construct
  source 1..23: mol_type = other RNA
aaaataaccagctatggttccgc

SEQ ID NO: 598 - RNA, 23 nt, synthetic construct
  source 1..23: mol_type = other RNA
agaaataaccagctatggttccg

SEQ ID NO: 599 - RNA, 23 nt, synthetic construct
  source 1..23: mol_type = other RNA
aagaaataaccagctatggttcc

SEQ ID NO: 600 - RNA, 23 nt, synthetic construct
  source 1..23: mol_type = other RNA
agagaaataaccagctatggttc

SEQ ID NO: 601 - RNA, 23 nt, synthetic construct
  source 1..23: mol_type = other RNA
aggagaaataaccagctatggtt

SEQ ID NO: 602 - RNA, 23 nt, synthetic construct
  source 1..23: mol_type = other RNA
agggagaaataaccagctatggt

SEQ ID NO: 603 - RNA, 23 nt, synthetic construct
  source 1..23: mol_type = other RNA
acacaagggagaaataaccagct

SEQ ID NO: 604 - RNA, 23 nt, synthetic construct
  source 1..23: mol_type = other RNA
aacacaagggagaaataaccagc

SEQ ID NO: 605 - RNA, 23 nt, synthetic construct
  source 1..23: mol_type = other RNA
aaacacaagggagaaataaccag

SEQ ID NO: 606 - RNA, 23 nt, synthetic construct
  source 1..23: mol_type = other RNA
actaacacaagggagaaataacc

SEQ ID NO: 607 - RNA, 23 nt, synthetic construct
  source 1..23: mol_type = other RNA
aactaacacaagggagaaataac

SEQ ID NO: 608 - RNA, 23 nt, synthetic construct
  source 1..23: mol_type = other RNA
atactaacacaagggagaaataa

SEQ ID NO: 609 - RNA, 23 nt, synthetic construct
  source 1..23: mol_type = other RNA
attactaacacaagggagaaata

SEQ ID NO: 610 - RNA, 23 nt, synthetic construct
  source 1..23: mol_type = other RNA
atttattactaacacaagggaga

SEQ ID NO: 611 - RNA, 23 nt, synthetic construct
  source 1..23: mol_type = other RNA
agtttattactaacacaagggag

SEQ ID NO: 612 - RNA, 23 nt, synthetic construct
  source 1..23: mol_type = other RNA
acgtttattactaacacaaggga

SEQ ID NO: 613 - RNA, 23 nt, synthetic construct
  source 1..23: mol_type = other RNA
aacgtttattactaacacaaggg

SEQ ID NO: 614 - RNA, 23 nt, synthetic construct
  source 1..23: mol_type = other RNA
agacgtttattactaacacaagg

SEQ ID NO: 615 - RNA, 23 nt, synthetic construct
  source 1..23: mol_type = other RNA
aagacgtttattactaacacaag

SEQ ID NO: 616 - RNA, 23 nt, synthetic construct
  source 1..23: mol_type = other RNA
aaagacgtttattactaacacaa

SEQ ID NO: 617 - RNA, 23 nt, synthetic construct
  source 1..23: mol_type = other RNA
acaagacgtttattactaacaca

SEQ ID NO: 618 - RNA, 23 nt, synthetic construct
  source 1..23: mol_type = other RNA
agcaagacgtttattactaacac

SEQ ID NO: 619 - RNA, 23 nt, synthetic construct
  source 1..23: mol_type = other RNA
aggcaagacgtttattactaaca

SEQ ID NO: 620 - RNA, 23 nt, synthetic construct
  source 1..23: mol_type = other RNA
acttattgtggcaagacgtttat

SEQ ID NO: 621 - RNA, 23 nt, synthetic construct
  source 1..23: mol_type = other RNA
agcttattgtggcaagacgttta

SEQ ID NO: 622 - RNA, 23 nt, synthetic construct
  source 1..23: mol_type = other RNA
aggcttattgtggcaagacgttt

SEQ ID NO: 623 - RNA, 23 nt, synthetic construct
  source 1..23: mol_type = other RNA
acccaatttttgttctcaacttg

SEQ ID NO: 624 - RNA, 21 nt, synthetic construct
  source 1..21: mol_type = other RNA
  modified_base 1: mod_base = OTHER; note = 2'-O-methyladenosine-3'-phosphorothioate
  modified_base 2: mod_base = OTHER; note = 2'-O-methylguanosine-3'-phosphorothioate
  modified_base 3: mod_base = OTHER; note = 2'-O-methyladenosine-3'-phosphate
  modified_base 4: mod_base = OTHER; note = 2'-O-methyladenosine-3'-phosphate
  modified_base 5: mod_base = OTHER; note = 2'-O-methylguanosine-3'-phosphate
  modified_base 6: mod_base = OTHER; note = 2'-O-methylcytidine-3'-phosphate
  modified_base 7: mod_base = OTHER; note = 2'-fluorouridine-3'-phosphate
  modified_base 8: mod_base = OTHER; note = 2'-O-methylguanosine-3'-phosphate
  modified_base 9: mod_base = OTHER; note = 2'-fluorocytidine-3'-phosphate
  modified_base 10: mod_base = OTHER; note = 2'-fluorocytidine-3'-phosphate
  modified_base 11: mod_base = OTHER; note = 2'-fluoroguanosine-3'-phosphate
  modified_base 12: mod_base = OTHER; note = 2'-O-methyluridine-3'-phosphate
  modified_base 13: mod_base = OTHER; note = 2'-O-methyluridine-3'-phosphate
  modified_base 14: mod_base = OTHER; note = 2'-O-methylguanosine-3'-phosphate
  modified_base 15: mod_base = OTHER; note = 2'-O-methyluridine-3'-phosphate
  modified_base 16: mod_base = OTHER; note = 2'-O-methyluridine-3'-phosphate
  modified_base 17: mod_base = OTHER; note = 2'-O-methylcytidine-3'-phosphate
  modified_base 18: mod_base = OTHER; note = 2'-O-methyluridine-3'-phosphate
  modified_base 19: mod_base = OTHER; note = 2'-O-methylguanosine-3'-phosphate
  modified_base 20: mod_base = OTHER; note = 2'-O-methylguanosine-3'-phosphate
  modified_base 21: mod_base = OTHER; note = 2'-O-methyluridine-3'-phosphate N-[tris(GalNAc-alkyl)-amidodecanoyl)]-4-hydroxyprolinol (Hyp-(GalNAc-alkyl)3)
agaagctgccgttgttctggt

SEQ ID NO: 625 - RNA, 21 nt, synthetic construct
  source 1..21: mol_type = other RNA
  modified_base 1: mod_base = OTHER; note = 2'-O-methylguanosine-3'-phosphorothioate
  modified_base 2: mod_base = OTHER; note = 2'-O-methyladenosine-3'-phosphorothioate
  modified_base 3: mod_base = OTHER; note = 2'-O-methyladenosine-3'-phosphate
  modified_base 4: mod_base = OTHER; note = 2'-O-methylguanosine-3'-phosphate
  modified_base 5: mod_base = OTHER; note = 2'-O-methylcytidine-3'-phosphate
  modified_base 6: mod_base = OTHER; note = 2'-O-methyluridine-3'-phosphate
  modified_base 7: mod_base = OTHER; note = 2'-fluoroguanosine-3'-phosphate
  modified_base 8: mod_base = OTHER; note = 2'-O-methylcytidine-3'-phosphate
  modified_base 9: mod_base = OTHER; note = 2'-fluorocytidine-3'-phosphate
  modified_base 10: mod_base = OTHER; note = 2'-fluoroguanosine-3'-phosphate
  modified_base 11: mod_base = OTHER; note = 2'-fluorouridine-3'-phosphate
  modified_base 12: mod_base = OTHER; note = 2'-O-methyluridine-3'-phosphate
  modified_base 13: mod_base = OTHER; note = 2'-O-methylguanosine-3'-phosphate
  modified_base 14: mod_base = OTHER; note = 2'-O-methyluridine-3'-phosphate
  modified_base 15: mod_base = OTHER; note = 2'-O-methyluridine-3'-phosphate
  modified_base 16: mod_base = OTHER; note = 2'-O-methylcytidine-3'-phosphate
  modified_base 17: mod_base = OTHER; note = 2'-O-methyluridine-3'-phosphate
  modified_base 18: mod_base = OTHER; note = 2'-O-methylguanosine-3'-phosphate
  modified_base 19: mod_base = OTHER; note = 2'-O-methylguanosine-3'-phosphate
  modified_base 20: mod_base = OTHER; note = 2'-O-methylguanosine-3'-phosphate
  modified_base 21: mod_base = OTHER; note = 2'-O-methyluridine-3'-phosphate N-[tris(GalNAc-alkyl)-amidodecanoyl)]-4-hydroxyprolinol (Hyp-(GalNAc-alkyl)3)
gaagctgccgttgttctgggt

SEQ ID NO: 626 - RNA, 21 nt, synthetic construct
  source 1..21: mol_type = other RNA
  modified_base 1: mod_base = OTHER; note = 2'-O-methyladenosine-3'-phosphorothioate
  modified_base 2: mod_base = OTHER; note = 2'-O-methyladenosine-3'-phosphorothioate
  modified_base 3: mod_base = OTHER; note = 2'-O-methylguanosine-3'-phosphate
  modified_base 4: mod_base = OTHER; note = 2'-O-methylcytidine-3'-phosphate
  modified_base 5: mod_base = OTHER; note = 2'-O-methyluridine-3'-phosphate
  modified_base 6: mod_base = OTHER; note = 2'-O-methylguanosine-3'-phosphate
  modified_base 7: mod_base = OTHER; note = 2'-fluorocytidine-3'-phosphate
  modified_base 8: mod_base = OTHER; note = 2'-O-methylcytidine-3'-phosphate
  modified_base 9: mod_base = OTHER; note = 2'-fluoroguanosine-3'-phosphate
  modified_base 10: mod_base = OTHER; note = 2'-fluorouridine-3'-phosphate
  modified_base 11: mod_base = OTHER; note = 2'-fluorouridine-3'-phosphate
  modified_base 12: mod_base = OTHER; note = 2'-O-methylguanosine-3'-phosphate
  modified_base 13: mod_base = OTHER; note = 2'-O-methyluridine-3'-phosphate
  modified_base 14: mod_base = OTHER; note = 2'-O-methyluridine-3'-phosphate
  modified_base 15: mod_base = OTHER; note = 2'-O-methylcytidine-3'-phosphate
  modified_base 16: mod_base = OTHER; note = 2'-O-methyluridine-3'-phosphate
  modified_base 17: mod_base = OTHER; note = 2'-O-methylguanosine-3'-phosphate
  modified_base 18: mod_base = OTHER; note = 2'-O-methylguanosine-3'-phosphate
  modified_base 19: mod_base = OTHER; note = 2'-O-methylguanosine-3'-phosphate
  modified_base 20: mod_base = OTHER; note = 2'-O-methyluridine-3'-phosphate
  modified_base 21: mod_base = OTHER; note = 2'-O-methyluridine-3'-phosphate N-[tris(GalNAc-alkyl)-amidodecanoyl)]-4-hydroxyprolinol (Hyp-(GalNAc-alkyl)3)
aagctgccgttgttctgggtt

SEQ ID NO: 627 - RNA, 21 nt, synthetic construct
  source 1..21: mol_type = other RNA
  modified_base 1: mod_base = OTHER; note = 2'-O-methylcytidine-3'-phosphorothioate
  modified_base 2: mod_base = OTHER; note = 2'-O-methyluridine-3'-phosphorothioate
  modified_base 3: mod_base = OTHER; note = 2'-O-methylguanosine-3'-phosphate
  modified_base 4: mod_base = OTHER; note = 2'-O-methylcytidine-3'-phosphate
  modified_base 5: mod_base = OTHER; note = 2'-O-methylcytidine-3'-phosphate
  modified_base 6: mod_base = OTHER; note = 2'-O-methylguanosine-3'-phosphate
  modified_base 7: mod_base = OTHER; note = 2'-fluorouridine-3'-phosphate
  modified_base 8: mod_base = OTHER; note = 2'-O-methyluridine-3'-phosphate
  modified_base 9: mod_base = OTHER; note = 2'-fluoroguanosine-3'-phosphate
  modified_base 10: mod_base = OTHER; note = 2'-fluorouridine-3'-phosphate
  modified_base 11: mod_base = OTHER; note = 2'-fluorouridine-3'-phosphate
  modified_base 12: mod_base = OTHER; note = 2'-O-methylcytidine-3'-phosphate
  modified_base 13: mod_base = OTHER; note = 2'-O-methyluridine-3'-phosphate
  modified_base 14: mod_base = OTHER; note = 2'-O-methylguanosine-3'-phosphate
  modified_base 15: mod_base = OTHER; note = 2'-O-methylguanosine-3'-phosphate
  modified_base 16: mod_base = OTHER; note = 2'-O-methylguanosine-3'-phosphate
  modified_base 17: mod_base = OTHER; note = 2'-O-methyluridine-3'-phosphate
  modified_base 18: mod_base = OTHER; note = 2'-O-methyladenosine-3'-phosphate
  modified_base 19: mod_base = OTHER; note = 2'-O-methylcytidine-3'-phosphate
  modified_base 20: mod_base = OTHER; note = 2'-O-methyluridine-3'-phosphate
  modified_base 21: mod_base = OTHER; note = 2'-O-methyluridine-3'-phosphate N-[tris(GalNAc-alkyl)-amidodecanoyl)]-4-hydroxyprolinol (Hyp-(GalNAc-alkyl)3)
ctgccgttgttctgggtactt

SEQ ID NO: 628 - RNA, 21 nt, synthetic construct
  source 1..21: mol_type = other RNA
  modified_base 1: mod_base = OTHER; note = 2'-O-methylcytidine-3'-phosphorothioate
  modified_base 2: mod_base = OTHER; note = 2'-O-methylguanosine-3'-phosphorothioate
  modified_base 3: mod_base = OTHER; note = 2'-O-methyluridine-3'-phosphate
  modified_base 4: mod_base = OTHER; note = 2'-O-methyluridine-3'-phosphate
  modified_base 5: mod_base = OTHER; note = 2'-O-methylguanosine-3'-phosphate
  modified_base 6: mod_base = OTHER; note = 2'-O-methyluridine-3'-phosphate
  modified_base 7: mod_base = OTHER; note = 2'-fluorouridine-3'-phosphate
  modified_base 8: mod_base = OTHER; note = 2'-O-methylcytidine-3'-phosphate
  modified_base 9: mod_base = OTHER; note = 2'-fluorouridine-3'-phosphate
  modified_base 10: mod_base = OTHER; note = 2'-fluoroguanosine-3'-phosphate
  modified_base 11: mod_base = OTHER; note = 2'-fluoroguanosine-3'-phosphate
  modified_base 12: mod_base = OTHER; note = 2'-O-methylguanosine-3'-phosphate
  modified_base 13: mod_base = OTHER; note = 2'-O-methyluridine-3'-phosphate
  modified_base 14: mod_base = OTHER; note = 2'-O-methyladenosine-3'-phosphate
  modified_base 15: mod_base = OTHER; note = 2'-O-methylcytidine-3'-phosphate
  modified_base 16: mod_base = OTHER; note = 2'-O-methyluridine-3'-phosphate
  modified_base 17: mod_base = OTHER; note = 2'-O-methyladenosine-3'-phosphate
  modified_base 18: mod_base = OTHER; note = 2'-O-methylcytidine-3'-phosphate
  modified_base 19: mod_base = OTHER; note = 2'-O-methyladenosine-3'-phosphate
  modified_base 20: mod_base = OTHER; note = 2'-O-methylguanosine-3'-phosphate
  modified_base 21: mod_base = OTHER; note = 2'-O-methyluridine-3'-phosphate N-[tris(GalNAc-alkyl)-amidodecanoyl)]-4-hydroxyprolinol (Hyp-(GalNAc-alkyl)3)
cgttgttctgggtactacagt

SEQ ID NO: 629 - RNA, 21 nt, synthetic construct
  source 1..21: mol_type = other RNA
  modified_base 1: mod_base = OTHER; note = 2'-O-methylcytidine-3'-phosphorothioate
  modified_base 2: mod_base = OTHER; note = 2'-O-methyluridine-3'-phosphorothioate
  modified_base 3: mod_base = OTHER; note = 2'-O-methylguanosine-3'-phosphate
  modified_base 4: mod_base = OTHER; note = 2'-O-methylguanosine-3'-phosphate
  modified_base 5: mod_base = OTHER; note = 2'-O-methylguanosine-3'-phosphate
  modified_base 6: mod_base = OTHER; note = 2'-O-methyluridine-3'-phosphate
  modified_base 7: mod_base = OTHER; note = 2'-fluoroadenosine-3'-phosphate
  modified_base 8: mod_base = OTHER; note = 2'-O-methylcytidine-3'-phosphate
  modified_base 9: mod_base = OTHER; note = 2'-fluorouridine-3'-phosphate
  modified_base 10: mod_base = OTHER; note = 2'-fluoroadenosine-3'-phosphate
  modified_base 11: mod_base = OTHER; note = 2'-fluorocytidine-3'-phosphate
  modified_base 12: mod_base = OTHER; note = 2'-O-methyladenosine-3'-phosphate
  modified_base 13: mod_base = OTHER; note = 2'-O-methylguanosine-3'-phosphate
  modified_base 14: mod_base = OTHER; note = 2'-O-methylcytidine-3'-phosphate
  modified_base 15: mod_base = OTHER; note = 2'-O-methyladenosine-3'-phosphate
  modified_base 16: mod_base = OTHER; note = 2'-O-methylguanosine-3'-phosphate
  modified_base 17: mod_base = OTHER; note = 2'-O-methyladenosine-3'-phosphate
  modified_base 18: mod_base = OTHER; note = 2'-O-methyladenosine-3'-phosphate
  modified_base 19: mod_base = OTHER; note = 2'-O-methylguanosine-3'-phosphate
  modified_base 20: mod_base = OTHER; note = 2'-O-methylguanosine-3'-phosphate
  modified_base 21: mod_base = OTHER; note = 2'-O-methyluridine-3'-phosphate N-[tris(GalNAc-alkyl)-amidodecanoyl)]-4-hydroxyprolinol (Hyp-(GalNAc-alkyl)3)
ctgggtactacagcagaaggt

SEQ ID NO: 630 - RNA, 21 nt, synthetic construct
  source 1..21: mol_type = other RNA
  modified_base 1: mod_base = OTHER; note = 2'-O-methyluridine-3'-phosphorothioate
  modified_base 2: mod_base = OTHER; note = 2'-O-methyladenosine-3'-phosphorothioate
  modified_base 3: mod_base = OTHER; note = 2'-O-methylcytidine-3'-phosphate
  modified_base 4: mod_base = OTHER; note = 2'-O-methyluridine-3'-phosphate
  modified_base 5: mod_base = OTHER; note = 2'-O-methyladenosine-3'-phosphate
  modified_base 6: mod_base = OTHER; note = 2'-O-methylcytidine-3'-phosphate
  modified_base 7: mod_base = OTHER; note = 2'-fluoroadenosine-3'-phosphate
  modified_base 8: mod_base = OTHER; note = 2'-O-methylguanosine-3'-phosphate
  modified_base 9: mod_base = OTHER; note = 2'-fluorocytidine-3'-phosphate
  modified_base 10: mod_base = OTHER; note = 2'-fluoroadenosine-3'-phosphate
  modified_base 11: mod_base = OTHER; note = 2'-fluoroguanosine-3'-phosphate
  modified_base 12: mod_base = OTHER; note = 2'-O-methyladenosine-3'-phosphate
  modified_base 13: mod_base = OTHER; note = 2'-O-methyladenosine-3'-phosphate
  modified_base 14: mod_base = OTHER; note = 2'-O-methylguanosine-3'-phosphate
  modified_base 15: mod_base = OTHER; note = 2'-O-methylguanosine-3'-phosphate
  modified_base 16: mod_base = OTHER; note = 2'-O-methylguanosine-3'-phosphate
  modified_base 17: mod_base = OTHER; note = 2'-O-methyluridine-3'-phosphate
  modified_base 18: mod_base = OTHER; note = 2'-O-methyladenosine-3'-phosphate
  modified_base 19: mod_base = OTHER; note = 2'-O-methyluridine-3'-phosphate
  modified_base 20: mod_base = OTHER; note = 2'-O-methylguanosine-3'-phosphate
  modified_base 21: mod_base = OTHER; note = 2'-O-methyluridine-3'-phosphate N-[tris(GalNAc-alkyl)-amidodecanoyl)]-4-hydroxyprolinol (Hyp-(GalNAc-alkyl)3)
tactacagcagaagggtatgt

SEQ ID NO: 631 - RNA, 21 nt, synthetic construct
  source 1..21: mol_type = other RNA
  modified_base 1: mod_base = OTHER; note = 2'-O-methyladenosine-3'-phosphorothioate
  modified_base 2: mod_base = OTHER; note = 2'-O-methylcytidine-3'-phosphorothioate
  modified_base 3: mod_base = OTHER; note = 2'-O-methyluridine-3'-phosphate
  modified_base 4: mod_base = OTHER; note = 2'-O-methyladenosine-3'-phosphate
  modified_base 5: mod_base = OTHER; note = 2'-O-methylcytidine-3'-phosphate
  modified_base 6: mod_base = OTHER; note = 2'-O-methyladenosine-3'-phosphate
  modified_base 7: mod_base = OTHER; note = 2'-fluoroguanosine-3'-phosphate
  modified_base 8: mod_base = OTHER; note = 2'-O-methylcytidine-3'-phosphate
  modified_base 9: mod_base = OTHER; note = 2'-fluoroadenosine-3'-phosphate
  modified_base 10: mod_base = OTHER; note = 2'-fluoroguanosine-3'-phosphate
  modified_base 11: mod_base = OTHER; note = 2'-fluoroadenosine-3'-phosphate
  modified_base 12: mod_base = OTHER; note = 2'-O-methyladenosine-3'-phosphate
  modified_base 13: mod_base = OTHER; note = 2'-O-methylguanosine-3'-phosphate
  modified_base 14: mod_base = OTHER; note = 2'-O-methylguanosine-3'-phosphate
  modified_base 15: mod_base = OTHER; note = 2'-O-methylguanosine-3'-phosphate
  modified_base 16: mod_base = OTHER; note = 2'-O-methyluridine-3'-phosphate
  modified_base 17: mod_base = OTHER; note = 2'-O-methyladenosine-3'-phosphate
  modified_base 18: mod_base = OTHER; note = 2'-O-methyluridine-3'-phosphate
  modified_base 19: mod_base = OTHER; note = 2'-O-methylguanosine-3'-phosphate
  modified_base 20: mod_base = OTHER; note = 2'-O-methylcytidine-3'-phosphate
  modified_base 21: mod_base = OTHER; note = 2'-O-methyluridine-3'-phosphate N-[tris(GalNAc-alkyl)-amidodecanoyl)]-4-hydroxyprolinol (Hyp-(GalNAc-alkyl)3)
actacagcagaagggtatgct

SEQ ID NO: 632 - RNA, 21 nt, synthetic construct
  source 1..21: mol_type = other RNA
  modified_base 1: mod_base = OTHER; note = 2'-O-methylcytidine-3'-phosphorothioate
  modified_base 2: mod_base = OTHER; note = 2'-O-methyluridine-3'-phosphorothioate
  modified_base 3: mod_base = OTHER; note = 2'-O-methyladenosine-3'-phosphate
  modified_base 4: mod_base = OTHER; note = 2'-O-methylcytidine-3'-phosphate
  modified_base 5: mod_base = OTHER; note = 2'-O-methyladenosine-3'-phosphate
  modified_base 6: mod_base = OTHER; note = 2'-O-methylguanosine-3'-phosphate
  modified_base 7: mod_base = OTHER; note = 2'-fluorocytidine-3'-phosphate
  modified_base 8: mod_base = OTHER; note = 2'-O-methyladenosine-3'-phosphate
  modified_base 9: mod_base = OTHER; note = 2'-fluoroguanosine-3'-phosphate
  modified_base 10: mod_base = OTHER; note = 2'-fluoroadenosine-3'-phosphate
  modified_base 11: mod_base = OTHER; note = 2'-fluoroadenosine-3'-phosphate
  modified_base 12: mod_base = OTHER; note = 2'-O-methylguanosine-3'-phosphate
  modified_base 13: mod_base = OTHER; note = 2'-O-methylguanosine-3'-phosphate
  modified_base 14: mod_base = OTHER; note = 2'-O-methylguanosine-3'-phosphate
  modified_base 15: mod_base = OTHER; note = 2'-O-methyluridine-3'-phosphate
  modified_base 16: mod_base = OTHER; note = 2'-O-methyladenosine-3'-phosphate
  modified_base 17: mod_base = OTHER; note = 2'-O-methyluridine-3'-phosphate
  modified_base 18: mod_base = OTHER; note = 2'-O-methylguanosine-3'-phosphate
  modified_base 19: mod_base = OTHER; note = 2'-O-methylcytidine-3'-phosphate
  modified_base 20: mod_base = OTHER; note = 2'-O-methylguanosine-3'-phosphate
  modified_base 21: mod_base = OTHER; note = 2'-O-methyluridine-3'-phosphate N-[tris(GalNAc-alkyl)-amidodecanoyl)]-4-hydroxyprolinol (Hyp-(GalNAc-alkyl)3)
ctacagcagaagggtatgcgt

SEQ ID NO: 633 - RNA, 21 nt, synthetic construct
  source 1..21: mol_type = other RNA
  modified_base 1: mod_base = OTHER; note = 2'-O-methyluridine-3'-phosphorothioate
  modified_base 2: mod_base = OTHER; note = 2'-O-methyladenosine-3'-phosphorothioate
  modified_base 3: mod_base = OTHER; note = 2'-O-methylcytidine-3'-phosphate
  modified_base 4: mod_base = OTHER; note = 2'-O-methyladenosine-3'-phosphate
  modified_base 5: mod_base = OTHER; note = 2'-O-methylguanosine-3'-phosphate
  modified_base 6: mod_base = OTHER; note = 2'-O-methylcytidine-3'-phosphate
  modified_base 7: mod_base = OTHER; note = 2'-fluoroadenosine-3'-phosphate
  modified_base 8: mod_base = OTHER; note = 2'-O-methylguanosine-3'-phosphate
  modified_base 9: mod_base = OTHER; note = 2'-fluoroadenosine-3'-phosphate
  modified_base 10: mod_base = OTHER; note = 2'-fluoroadenosine-3'-phosphate
  modified_base 11: mod_base = OTHER; note = 2'-fluoroguanosine-3'-phosphate
  modified_base 12: mod_base = OTHER; note = 2'-O-methylguanosine-3'-phosphate
  modified_base 13: mod_base = OTHER; note = 2'-O-methylguanosine-3'-phosphate
  modified_base 14: mod_base = OTHER; note = 2'-O-methyluridine-3'-phosphate
  modified_base 15: mod_base = OTHER; note = 2'-O-methyladenosine-3'-phosphate
  modified_base 16: mod_base = OTHER; note = 2'-O-methyluridine-3'-phosphate
  modified_base 17: mod_base = OTHER; note = 2'-O-methylguanosine-3'-phosphate
  modified_base 18: mod_base = OTHER; note = 2'-O-methylcytidine-3'-phosphate
  modified_base 19: mod_base = OTHER; note = 2'-O-methylguanosine-3'-phosphate
  modified_base 20: mod_base = OTHER; note = 2'-O-methylguanosine-3'-phosphate
  modified_base 21: mod_base = OTHER; note = 2'-O-methyluridine-3'-phosphate N-[tris(GalNAc-alkyl)-amidodecanoyl)]-4-hydroxyprolinol (Hyp-(GalNAc-alkyl)3)
tacagcagaagggtatgcggt

SEQ ID NO: 634 - RNA, 21 nt, synthetic construct
  source 1..21: mol_type = other RNA
  modified_base 1: mod_base = OTHER; note = 2'-O-methyladenosine-3'-phosphorothioate
  modified_base 2: mod_base = OTHER; note = 2'-O-methylcytidine-3'-phosphorothioate
  modified_base 3: mod_base = OTHER; note = 2'-O-methyladenosine-3'-phosphate
  modified_base 4: mod_base = OTHER; note = 2'-O-methylguanosine-3'-phosphate
  modified_base 5: mod_base = OTHER; note = 2'-O-methylcytidine-3'-phosphate
  modified_base 6: mod_base = OTHER; note = 2'-O-methyladenosine-3'-phosphate
  modified_base 7: mod_base = OTHER; note = 2'-fluoroguanosine-3'-phosphate
  modified_base 8: mod_base = OTHER; note = 2'-O-methyladenosine-3'-phosphate
  modified_base 9: mod_base = OTHER; note = 2'-fluoroadenosine-3'-phosphate
  modified_base 10: mod_base = OTHER; note = 2'-fluoroguanosine-3'-phosphate
  modified_base 11: mod_base = OTHER; note = 2'-fluoroguanosine-3'-phosphate
  modified_base 12: mod_base = OTHER; note = 2'-O-methylguanosine-3'-phosphate
  modified_base 13: mod_base = OTHER; note = 2'-O-methyluridine-3'-phosphate
  modified_base 14: mod_base = OTHER; note = 2'-O-methyladenosine-3'-phosphate
  modified_base 15: mod_base = OTHER; note = 2'-O-methyluridine-3'-phosphate
  modified_base 16: mod_base = OTHER; note = 2'-O-methylguanosine-3'-phosphate
  modified_base 17: mod_base = OTHER; note = 2'-O-methylcytidine-3'-phosphate
  modified_base 18: mod_base = OTHER; note = 2'-O-methylguanosine-3'-phosphate
  modified_base 19: mod_base = OTHER; note = 2'-O-methylguanosine-3'-phosphate
  modified_base 20: mod_base = OTHER; note = 2'-O-methyladenosine-3'-phosphate
  modified_base 21: mod_base = OTHER; note = 2'-O-methyluridine-3'-phosphate N-[tris(GalNAc-alkyl)-amidodecanoyl)]-4-hydroxyprolinol (Hyp-(GalNAc-alkyl)3)
acagcagaagggtatgcggat

SEQ ID NO: 635 - RNA, 21 nt, synthetic construct
  source 1..21: mol_type = other RNA
  modified_base 1: mod_base = OTHER; note = 2'-O-methyladenosine-3'-phosphorothioate
  modified_base 2: mod_base = OTHER; note = 2'-O-methylguanosine-3'-phosphorothioate
  modified_base 3: mod_base = OTHER; note = 2'-O-methylcytidine-3'-phosphate
  modified_base 4: mod_base = OTHER; note = 2'-O-methyladenosine-3'-phosphate
  modified_base 5: mod_base = OTHER; note = 2'-O-methylguanosine-3'-phosphate
  modified_base 6: mod_base = OTHER; note = 2'-O-methyladenosine-3'-phosphate
  modified_base 7: mod_base = OTHER; note = 2'-fluoroadenosine-3'-phosphate
  modified_base 8: mod_base = OTHER; note = 2'-O-methylguanosine-3'-phosphate
  modified_base 9: mod_base = OTHER; note = 2'-fluoroguanosine-3'-phosphate
  modified_base 10: mod_base = OTHER; note = 2'-fluoroguanosine-3'-phosphate
  modified_base 11: mod_base = OTHER; note = 2'-fluorouridine-3'-phosphate
  modified_base 12: mod_base = OTHER; note = 2'-O-methyladenosine-3'-phosphate
  modified_base 13: mod_base = OTHER; note = 2'-O-methyluridine-3'-phosphate
  modified_base 14: mod_base = OTHER; note = 2'-O-methylguanosine-3'-phosphate
  modified_base 15: mod_base = OTHER; note = 2'-O-methylcytidine-3'-phosphate
  modified_base 16: mod_base = OTHER; note = 2'-O-methylguanosine-3'-phosphate
  modified_base 17: mod_base = OTHER; note = 2'-O-methylguanosine-3'-phosphate
  modified_base 18: mod_base = OTHER; note = 2'-O-methyladenosine-3'-phosphate
  modified_base 19: mod_base = OTHER; note = 2'-O-methyladenosine-3'-phosphate
  modified_base 20: mod_base = OTHER; note = 2'-O-methylguanosine-3'-phosphate
  modified_base 21: mod_base = OTHER; note = 2'-O-methyluridine-3'-phosphate N-[tris(GalNAc-alkyl)-amidodecanoyl)]-4-hydroxyprolinol (Hyp-(GalNAc-alkyl)3)
agcagaagggtatgcggaagt

SEQ ID NO: 636 - RNA, 21 nt, synthetic construct
  source 1..21: mol_type = other RNA
  modified_base 1: mod_base = OTHER; note = 2'-O-methyladenosine-3'-phosphorothioate
  modified_base 2: mod_base = OTHER; note = 2'-O-methyluridine-3'-phosphorothioate
  modified_base 3: mod_base = OTHER; note = 2'-O-methylcytidine-3'-phosphate
  modified_base 4: mod_base = OTHER; note = 2'-O-methylcytidine-3'-phosphate
  modified_base 5: mod_base = OTHER; note = 2'-O-methyladenosine-3'-phosphate
  modified_base 6: mod_base = OTHER; note = 2'-O-methylcytidine-3'-phosphate
  modified_base 7: mod_base = OTHER; note = 2'-fluoroadenosine-3'-phosphate
  modified_base 8: mod_base = OTHER; note = 2'-O-methyladenosine-3'-phosphate
  modified_base 9: mod_base = OTHER; note = 2'-fluorouridine-3'-phosphate
  modified_base 10: mod_base = OTHER; note = 2'-fluoroguanosine-3'-phosphate
  modified_base 11: mod_base = OTHER; note = 2'-fluoroadenosine-3'-phosphate
  modified_base 12: mod_base = OTHER; note = 2'-O-methylguanosine-3'-phosphate
  modified_base 13: mod_base = OTHER; note = 2'-O-methyladenosine-3'-phosphate
  modified_base 14: mod_base = OTHER; note = 2'-O-methylguanosine-3'-phosphate
  modified_base 15: mod_base = OTHER; note = 2'-O-methyluridine-3'-phosphate
  modified_base 16: mod_base = OTHER; note = 2'-O-methyladenosine-3'-phosphate
  modified_base 17: mod_base = OTHER; note = 2'-O-methylcytidine-3'-phosphate
  modified_base 18: mod_base = OTHER; note = 2'-O-methylcytidine-3'-phosphate
  modified_base 19: mod_base = OTHER; note = 2'-O-methyluridine-3'-phosphate
  modified_base 20: mod_base = OTHER; note = 2'-O-methylguanosine-3'-phosphate
  modified_base 21: mod_base = OTHER; note = 2'-O-methyluridine-3'-phosphate N-[tris(GalNAc-alkyl)-amidodecanoyl)]-4-hydroxyprolinol (Hyp-(GalNAc-alkyl)3)
atccacaatgagagtacctgt

SEQ ID NO: 637 - RNA, 21 nt, synthetic construct
  source 1..21: mol_type = other RNA
  modified_base 1: mod_base = OTHER; note = 2'-O-methyladenosine-3'-phosphorothioate
  modified_base 2: mod_base = OTHER; note = 2'-O-methylcytidine-3'-phosphorothioate
  modified_base 3: mod_base = OTHER; note = 2'-O-methyladenosine-3'-phosphate
  modified_base 4: mod_base = OTHER; note = 2'-O-methyladenosine-3'-phosphate
  modified_base 5: mod_base = OTHER; note = 2'-O-methyluridine-3'-phosphate
  modified_base 6: mod_base = OTHER; note = 2'-O-methylguanosine-3'-phosphate
  modified_base 7: mod_base = OTHER; note = 2'-fluoroadenosine-3'-phosphate
  modified_base 8: mod_base = OTHER; note = 2'-O-methylguanosine-3'-phosphate
  modified_base 9: mod_base = OTHER; note = 2'-fluoroadenosine-3'-phosphate
  modified_base 10: mod_base = OTHER; note = 2'-fluoroguanosine-3'-phosphate
  modified_base 11: mod_base = OTHER; note = 2'-fluorouridine-3'-phosphate
  modified_base 12: mod_base = OTHER; note = 2'-O-methyladenosine-3'-phosphate
  modified_base 13: mod_base = OTHER; note = 2'-O-methylcytidine-3'-phosphate
  modified_base 14: mod_base = OTHER; note = 2'-O-methylcytidine-3'-phosphate
  modified_base 15: mod_base = OTHER; note = 2'-O-methyluridine-3'-phosphate
  modified_base 16: mod_base = OTHER; note = 2'-O-methylguanosine-3'-phosphate
  modified_base 17: mod_base = OTHER; note = 2'-O-methyluridine-3'-phosphate
  modified_base 18: mod_base = OTHER; note = 2'-O-methylguanosine-3'-phosphate
  modified_base 19: mod_base = OTHER; note = 2'-O-methyladenosine-3'-phosphate
  modified_base 20: mod_base = OTHER; note = 2'-O-methylguanosine-3'-phosphate
  modified_base 21: mod_base = OTHER; note = 2'-O-methyluridine-3'-phosphate N-[tris(GalNAc-alkyl)-amidodecanoyl)]-4-hydroxyprolinol (Hyp-(GalNAc-alkyl)3)
acaatgagagtacctgtgagt

SEQ ID NO: 638 - RNA, 21 nt, synthetic construct
  source 1..21: mol_type = other RNA
  modified_base 1: mod_base = OTHER; note = 2'-O-methyluridine-3'-phosphorothioate
  modified_base 2: mod_base = OTHER; note = 2'-O-methyluridine-3'-phosphorothioate
  modified_base 3: mod_base = OTHER; note = 2'-O-methylcytidine-3'-phosphate
  modified_base 4: mod_base = OTHER; note = 2'-O-methyladenosine-3'-phosphate
  modified_base 5: mod_base = OTHER; note = 2'-O-methyluridine-3'-phosphate
  modified_base 6: mod_base = OTHER; note = 2'-O-methyladenosine-3'-phosphate
  modified_base 7: mod_base = OTHER; note = 2'-fluorocytidine-3'-phosphate
  modified_base 8: mod_base = OTHER; note = 2'-O-methylcytidine-3'-phosphate
  modified_base 9: mod_base = OTHER; note = 2'-fluorouridine-3'-phosphate
  modified_base 10: mod_base = OTHER; note = 2'-fluoroguanosine-3'-phosphate
  modified_base 11: mod_base = OTHER; note = 2'-fluorocytidine-3'-phosphate
  modified_base 12: mod_base = OTHER; note = 2'-O-methyluridine-3'-phosphate
  modified_base 13: mod_base = OTHER; note = 2'-O-methylcytidine-3'-phosphate
  modified_base 14: mod_base = OTHER; note = 2'-O-methylcytidine-3'-phosphate
  modified_base 15: mod_base = OTHER; note = 2'-O-methyladenosine-3'-phosphate
  modified_base 16: mod_base = OTHER; note = 2'-O-methyladenosine-3'-phosphate
  modified_base 17: mod_base = OTHER; note = 2'-O-methyluridine-3'-phosphate
  modified_base 18: mod_base = OTHER; note = 2'-O-methyluridine-3'-phosphate
  modified_base 19: mod_base = OTHER; note = 2'-O-methylcytidine-3'-phosphate
  modified_base 20: mod_base = OTHER; note = 2'-O-methyladenosine-3'-phosphate
  modified_base 21: mod_base = OTHER; note = 2'-O-methyluridine-3'-phosphate N-[tris(GalNAc-alkyl)-amidodecanoyl)]-4-hydroxyprolinol (Hyp-(GalNAc-alkyl)3)
ttcatacctgctccaattcat

SEQ ID NO: 639 - RNA, 21 nt, synthetic construct
  source 1..21: mol_type = other RNA
  modified_base 1: mod_base = OTHER; note = 2'-O-methyluridine-3'-phosphorothioate
  modified_base 2: mod_base = OTHER; note = 2'-O-methylcytidine-3'-phosphorothioate
  modified_base 3: mod_base = OTHER; note = 2'-O-methyladenosine-3'-phosphate
  modified_base 4: mod_base = OTHER; note = 2'-O-methyluridine-3'-phosphate
  modified_base 5: mod_base = OTHER; note = 2'-O-methyladenosine-3'-phosphate
  modified_base 6: mod_base = OTHER; note = 2'-O-methylcytidine-3'-phosphate
  modified_base 7: mod_base = OTHER; note = 2'-fluorocytidine-3'-phosphate
  modified_base 8: mod_base = OTHER; note = 2'-O-methyluridine-3'-phosphate
  modified_base 9: mod_base = OTHER; note = 2'-fluoroguanosine-3'-phosphate
  modified_base 10: mod_base = OTHER; note = 2'-fluorocytidine-3'-phosphate
  modified_base 11: mod_base = OTHER; note = 2'-fluorouridine-3'-phosphate
  modified_base 12: mod_base = OTHER; note = 2'-O-methylcytidine-3'-phosphate
  modified_base 13: mod_base = OTHER; note = 2'-O-methylcytidine-3'-phosphate
  modified_base 14: mod_base = OTHER; note = 2'-O-methyladenosine-3'-phosphate
  modified_base 15: mod_base = OTHER; note = 2'-O-methyladenosine-3'-phosphate
  modified_base 16: mod_base = OTHER; note = 2'-O-methyluridine-3'-phosphate
  modified_base 17: mod_base = OTHER; note = 2'-O-methyluridine-3'-phosphate
  modified_base 18: mod_base = OTHER; note = 2'-O-methylcytidine-3'-phosphate
  modified_base 19: mod_base = OTHER; note = 2'-O-methyladenosine-3'-phosphate
  modified_base 20: mod_base = OTHER; note = 2'-O-methylguanosine-3'-phosphate
  modified_base 21: mod_base = OTHER; note = 2'-O-methyluridine-3'-phosphate N-[tris(GalNAc-alkyl)-amidodecanoyl)]-4-hydroxyprolinol (Hyp-(GalNAc-alkyl)3)
tcatacctgctccaattcagt

SEQ ID NO: 640 - RNA, 21 nt, synthetic construct
  source 1..21: mol_type = other RNA
  modified_base 1: mod_base = OTHER; note = 2'-O-methylcytidine-3'-phosphorothioate
  modified_base 2: mod_base = OTHER; note = 2'-O-methyladenosine-3'-phosphorothioate
  modified_base 3: mod_base = OTHER; note = 2'-O-methyluridine-3'-phosphate
  modified_base 4: mod_base = OTHER; note = 2'-O-methyladenosine-3'-phosphate
  modified_base 5: mod_base = OTHER; note = 2'-O-methylcytidine-3'-phosphate
  modified_base 6: mod_base = OTHER; note = 2'-O-methylcytidine-3'-phosphate
  modified_base 7: mod_base = OTHER; note = 2'-fluorouridine-3'-phosphate
  modified_base 8: mod_base = OTHER; note = 2'-O-methylguanosine-3'-phosphate
  modified_base 9: mod_base = OTHER; note = 2'-fluorocytidine-3'-phosphate
  modified_base 10: mod_base = OTHER; note = 2'-fluorouridine-3'-phosphate
  modified_base 11: mod_base = OTHER; note = 2'-fluorocytidine-3'-phosphate
  modified_base 12: mod_base = OTHER; note = 2'-O-methylcytidine-3'-phosphate
  modified_base 13: mod_base = OTHER; note = 2'-O-methyladenosine-3'-phosphate
  modified_base 14: mod_base = OTHER; note = 2'-O-methyladenosine-3'-phosphate
  modified_base 15: mod_base = OTHER; note = 2'-O-methyluridine-3'-phosphate
  modified_base 16: mod_base = OTHER; note = 2'-O-methyluridine-3'-phosphate
  modified_base 17: mod_base = OTHER; note = 2'-O-methylcytidine-3'-phosphate
  modified_base 18: mod_base = OTHER; note = 2'-O-methyladenosine-3'-phosphate
  modified_base 19: mod_base = OTHER; note = 2'-O-methylguanosine-3'-phosphate
  modified_base 20: mod_base = OTHER; note = 2'-O-methylguanosine-3'-phosphate
  modified_base 21: mod_base = OTHER; note = 2'-O-methyluridine-3'-phosphate N-[tris(GalNAc-alkyl)-amidodecanoyl)]-4-hydroxyprolinol (Hyp-(GalNAc-alkyl)3)
catacctgctccaattcaggt

SEQ ID NO: 641 - RNA, 21 nt, synthetic construct
  source 1..21: mol_type = other RNA
  modified_base 1: mod_base = OTHER; note = 2'-O-methyluridine-3'-phosphorothioate
  modified_base 2: mod_base = OTHER; note = 2'-O-methylguanosine-3'-phosphorothioate
  modified_base 3: mod_base = OTHER; note = 2'-O-methylguanosine-3'-phosphate
  modified_base 4: mod_base = OTHER; note = 2'-O-methyladenosine-3'-phosphate
  modified_base 5: mod_base = OTHER; note = 2'-O-methyluridine-3'-phosphate
  modified_base 6: mod_base = OTHER; note = 2'-O-methylguanosine-3'-phosphate
  modified_base 7: mod_base = OTHER; note = 2'-fluoroadenosine-3'-phosphate
  modified_base 8: mod_base = OTHER; note = 2'-O-methyladenosine-3'-phosphate
  modified_base 9: mod_base = OTHER; note = 2'-fluoroadenosine-3'-phosphate
  modified_base 10: mod_base = OTHER; note = 2'-fluoroadenosine-3'-phosphate
  modified_base 11: mod_base = OTHER; note = 2'-fluoroguanosine-3'-phosphate
  modified_base 12: mod_base = OTHER; note = 2'-O-methylguanosine-3'-phosphate
  modified_base 13: mod_base = OTHER; note = 2'-O-methylcytidine-3'-phosphate
  modified_base 14: mod_base = OTHER; note = 2'-O-methylcytidine-3'-phosphate
  modified_base 15: mod_base = OTHER; note = 2'-O-methylcytidine-3'-phosphate
  modified_base 16: mod_base = OTHER; note = 2'-O-methyluridine-3'-phosphate
  modified_base 17: mod_base = OTHER; note = 2'-O-methyladenosine-3'-phosphate
  modified_base 18: mod_base = OTHER; note = 2'-O-methylcytidine-3'-phosphate
  modified_base 19: mod_base = OTHER; note = 2'-O-methyladenosine-3'-phosphate
  modified_base 20: mod_base = OTHER; note = 2'-O-methylguanosine-3'-phosphate
  modified_base 21: mod_base = OTHER; note = 2'-O-methyluridine-3'-phosphate N-[tris(GalNAc-alkyl)-amidodecanoyl)]-4-hydroxyprolinol (Hyp-(GalNAc-alkyl)3)
tggatgaaaaggccctacagt

SEQ ID NO: 642 - RNA, 21 nt, synthetic construct
  source 1..21: mol_type = other RNA
  modified_base 1: mod_base = OTHER; note = 2'-O-methylguanosine-3'-phosphorothioate
  modified_base 2: mod_base = OTHER; note = 2'-O-methylguanosine-3'-phosphorothioate
  modified_base 3: mod_base = OTHER; note = 2'-O-methyladenosine-3'-phosphate
  modified_base 4: mod_base = OTHER; note = 2'-O-methyluridine-3'-phosphate
  modified_base 5: mod_base = OTHER; note = 2'-O-methylguanosine-3'-phosphate
  modified_base 6: mod_base = OTHER; note = 2'-O-methyladenosine-3'-phosphate
  modified_base 7: mod_base = OTHER; note = 2'-fluoroadenosine-3'-phosphate
  modified_base 8: mod_base = OTHER; note = 2'-O-methyladenosine-3'-phosphate
  modified_base 9: mod_base = OTHER; note = 2'-fluoroadenosine-3'-phosphate
  modified_base 10: mod_base = OTHER; note = 2'-fluoroguanosine-3'-phosphate
  modified_base 11: mod_base = OTHER; note = 2'-fluoroguanosine-3'-phosphate
  modified_base 12: mod_base = OTHER; note = 2'-O-methylcytidine-3'-phosphate
  modified_base 13: mod_base = OTHER; note = 2'-O-methylcytidine-3'-phosphate
  modified_base 14: mod_base = OTHER; note = 2'-O-methylcytidine-3'-phosphate
  modified_base 15: mod_base = OTHER; note = 2'-O-methyluridine-3'-phosphate
  modified_base 16: mod_base = OTHER; note = 2'-O-methyladenosine-3'-phosphate
  modified_base 17: mod_base = OTHER; note = 2'-O-methylcytidine-3'-phosphate
  modified_base 18: mod_base = OTHER; note = 2'-O-methyladenosine-3'-phosphate
  modified_base 19: mod_base = OTHER; note = 2'-O-methylguanosine-3'-phosphate
  modified_base 20: mod_base = OTHER; note = 2'-O-methylguanosine-3'-phosphate
  modified_base 21: mod_base = OTHER; note = 2'-O-methyluridine-3'-phosphate N-[tris(GalNAc-alkyl)-amidodecanoyl)]-4-hydroxyprolinol (Hyp-(GalNAc-alkyl)3)
ggatgaaaaggccctacaggt

SEQ ID NO: 643 - RNA, 21 nt, synthetic construct
  source 1..21: mol_type = other RNA
  modified_base 1: mod_base = OTHER; note = 2'-O-methylguanosine-3'-phosphorothioate
  modified_base 2: mod_base = OTHER; note = 2'-O-methyluridine-3'-phosphorothioate
  modified_base 3: mod_base = OTHER; note = 2'-O-methylguanosine-3'-phosphate
  modified_base 4: mod_base = OTHER; note = 2'-O-methylcytidine-3'-phosphate
  modified_base 5: mod_base = OTHER; note = 2'-O-methyluridine-3'-phosphate
  modified_base 6: mod_base = OTHER; note = 2'-O-methyladenosine-3'-phosphate
  modified_base 7: mod_base = OTHER; note = 2'-fluoroguanosine-3'-phosphate
  modified_base 8: mod_base = OTHER; note = 2'-O-methyluridine-3'-phosphate
  modified_base 9: mod_base = OTHER; note = 2'-fluorocytidine-3'-phosphate
  modified_base 10: mod_base = OTHER; note = 2'-fluoroguanosine-3'-phosphate
  modified_base 11: mod_base = OTHER; note = 2'-fluorocytidine-3'-phosphate
  modified_base 12: mod_base = OTHER; note = 2'-O-methyluridine-3'-phosphate
  modified_base 13: mod_base = OTHER; note = 2'-O-methylguanosine-3'-phosphate
  modified_base 14: mod_base = OTHER; note = 2'-O-methylcytidine-3'-phosphate
  modified_base 15: mod_base = OTHER; note = 2'-O-methyladenosine-3'-phosphate
  modified_base 16: mod_base = OTHER; note = 2'-O-methyladenosine-3'-phosphate
  modified_base 17: mod_base = OTHER; note = 2'-O-methyladenosine-3'-phosphate
  modified_base 18: mod_base = OTHER; note = 2'-O-methyladenosine-3'-phosphate
  modified_base 19: mod_base = OTHER; note = 2'-O-methylcytidine-3'-phosphate
  modified_base 20: mod_base = OTHER; note = 2'-O-methyluridine-3'-phosphate
  modified_base 21: mod_base = OTHER; note = 2'-O-methyluridine-3'-phosphate N-[tris(GalNAc-alkyl)-amidodecanoyl)]-4-hydroxyprolinol (Hyp-(GalNAc-alkyl)3)
gtgctagtcgctgcaaaactt

SEQ ID NO: 644 - RNA, 21 nt, synthetic construct
  source 1..21: mol_type = other RNA
  modified_base 1: mod_base = OTHER; note = 2'-O-methyluridine-3'-phosphorothioate
  modified_base 2: mod_base = OTHER; note = 2'-O-methylguanosine-3'-phosphorothioate
  modified_base 3: mod_base = OTHER; note = 2'-O-methylcytidine-3'-phosphate
  modified_base 4: mod_base = OTHER; note = 2'-O-methyluridine-3'-phosphate
  modified_base 5: mod_base = OTHER; note = 2'-O-methyladenosine-3'-phosphate
  modified_base 6: mod_base = OTHER; note = 2'-O-methylguanosine-3'-phosphate
  modified_base 7: mod_base = OTHER; note = 2'-fluorouridine-3'-phosphate
  modified_base 8: mod_base = OTHER; note = 2'-O-methylcytidine-3'-phosphate
  modified_base 9: mod_base = OTHER; note = 2'-fluoroguanosine-3'-phosphate
  modified_base 10: mod_base = OTHER; note = 2'-fluorocytidine-3'-phosphate
  modified_base 11: mod_base = OTHER; note = 2'-fluorouridine-3'-phosphate
  modified_base 12: mod_base = OTHER; note = 2'-O-methylguanosine-3'-phosphate
  modified_base 13: mod_base = OTHER; note = 2'-O-methylcytidine-3'-phosphate
  modified_base 14: mod_base = OTHER; note = 2'-O-methyladenosine-3'-phosphate
  modified_base 15: mod_base = OTHER; note = 2'-O-methyladenosine-3'-phosphate
  modified_base 16: mod_base = OTHER; note = 2'-O-methyladenosine-3'-phosphate
  modified_base 17: mod_base = OTHER; note = 2'-O-methyladenosine-3'-phosphate
  modified_base 18: mod_base = OTHER; note = 2'-O-methylcytidine-3'-phosphate
  modified_base 19: mod_base = OTHER; note = 2'-O-methyluridine-3'-phosphate
  modified_base 20: mod_base = OTHER; note = 2'-O-methyluridine-3'-phosphate
  modified_base 21: mod_base = OTHER; note = 2'-O-methyluridine-3'-phosphate N-[tris(GalNAc-alkyl)-amidodecanoyl)]-4-hydroxyprolinol (Hyp-(GalNAc-alkyl)3)
tgctagtcgctgcaaaacttt

SEQ ID NO: 645 - RNA, 21 nt, synthetic construct
  source 1..21: mol_type = other RNA
  modified_base 1: mod_base = OTHER; note = 2'-O-methylguanosine-3'-phosphorothioate
  modified_base 2: mod_base = OTHER; note = 2'-O-methylcytidine-3'-phosphorothioate
  modified_base 3: mod_base = OTHER; note = 2'-O-methyluridine-3'-phosphate
  modified_base 4: mod_base = OTHER; note = 2'-O-methyladenosine-3'-phosphate
  modified_base 5: mod_base = OTHER; note = 2'-O-methylguanosine-3'-phosphate
  modified_base 6: mod_base = OTHER; note = 2'-O-methyluridine-3'-phosphate
  modified_base 7: mod_base = OTHER; note = 2'-fluorocytidine-3'-phosphate
  modified_base 8: mod_base = OTHER; note = 2'-O-methylguanosine-3'-phosphate
  modified_base 9: mod_base = OTHER; note = 2'-fluorocytidine-3'-phosphate
  modified_base 10: mod_base = OTHER; note = 2'-fluorouridine-3'-phosphate
  modified_base 11: mod_base = OTHER; note = 2'-fluoroguanosine-3'-phosphate
  modified_base 12: mod_base = OTHER; note = 2'-O-methylcytidine-3'-phosphate
  modified_base 13: mod_base = OTHER; note = 2'-O-methyladenosine-3'-phosphate
  modified_base 14: mod_base = OTHER; note = 2'-O-methyladenosine-3'-phosphate
  modified_base 15: mod_base = OTHER; note = 2'-O-methyladenosine-3'-phosphate
  modified_base 16: mod_base = OTHER; note = 2'-O-methyladenosine-3'-phosphate
  modified_base 17: mod_base = OTHER; note = 2'-O-methylcytidine-3'-phosphate
  modified_base 18: mod_base = OTHER; note = 2'-O-methyluridine-3'-phosphate
  modified_base 19: mod_base = OTHER; note = 2'-O-methyluridine-3'-phosphate
  modified_base 20: mod_base = OTHER; note = 2'-O-methylguanosine-3'-phosphate
  modified_base 21: mod_base = OTHER; note = 2'-O-methyluridine-3'-phosphate N-[tris(GalNAc-alkyl)-amidodecanoyl)]-4-hydroxyprolinol (Hyp-(GalNAc-alkyl)3)
gctagtcgctgcaaaacttgt

SEQ ID NO: 646 - RNA, 21 nt, synthetic construct
  source 1..21: mol_type = other RNA
  modified_base 1: mod_base = OTHER; note = 2'-O-methyluridine-3'-phosphorothioate
  modified_base 2: mod_base = OTHER; note = 2'-O-methylguanosine-3'-phosphorothioate
  modified_base 3: mod_base = OTHER; note = 2'-O-methylcytidine-3'-phosphate
  modified_base 4: mod_base = OTHER; note = 2'-O-methyladenosine-3'-phosphate
  modified_base 5: mod_base = OTHER; note = 2'-O-methyladenosine-3'-phosphate
  modified_base 6: mod_base = OTHER; note = 2'-O-methyladenosine-3'-phosphate
  modified_base 7: mod_base = OTHER; note = 2'-fluoroadenosine-3'-phosphate
  modified_base 8: mod_base = OTHER; note = 2'-O-methylcytidine-3'-phosphate
  modified_base 9: mod_base = OTHER; note = 2'-fluorouridine-3'-phosphate
  modified_base 10: mod_base = OTHER; note = 2'-fluorouridine-3'-phosphate
  modified_base 11: mod_base = OTHER; note = 2'-fluoroguanosine-3'-phosphate
  modified_base 12: mod_base = OTHER; note = 2'-O-methyladenosine-3'-phosphate
  modified_base 13: mod_base = OTHER; note = 2'-O-methylcytidine-3'-phosphate
  modified_base 14: mod_base = OTHER; note = 2'-O-methyladenosine-3'-phosphate
  modified_base 15: mod_base = OTHER; note = 2'-O-methylcytidine-3'-phosphate
  modified_base 16: mod_base = OTHER; note = 2'-O-methylcytidine-3'-phosphate
  modified_base 17: mod_base = OTHER; note = 2'-O-methylguanosine-3'-phosphate
  modified_base 18: mod_base = OTHER; note = 2'-O-methyladenosine-3'-phosphate
  modified_base 19: mod_base = OTHER; note = 2'-O-methyladenosine-3'-phosphate
  modified_base 20: mod_base = OTHER; note = 2'-O-methylguanosine-3'-phosphate
  modified_base 21: mod_base = OTHER; note = 2'-O-methyluridine-3'-phosphate N-[tris(GalNAc-alkyl)-amidodecanoyl)]-4-hydroxyprolinol (Hyp-(GalNAc-alkyl)3)
tgcaaaacttgacaccgaagt

SEQ ID NO: 647 - RNA, 21 nt, synthetic construct
  source 1..21: mol_type = other RNA
  modified_base 1: mod_base = OTHER; note = 2'-O-methylguanosine-3'-phosphorothioate
  modified_base 2: mod_base = OTHER; note = 2'-O-methylcytidine-3'-phosphorothioate
  modified_base 3: mod_base = OTHER; note = 2'-O-methyladenosine-3'-phosphate
  modified_base 4: mod_base = OTHER; note = 2'-O-methyladenosine-3'-phosphate
  modified_base 5: mod_base = OTHER; note = 2'-O-methyladenosine-3'-phosphate
  modified_base 6: mod_base = OTHER; note = 2'-O-methyladenosine-3'-phosphate
  modified_base 7: mod_base = OTHER; note = 2'-fluorocytidine-3'-phosphate
  modified_base 8: mod_base = OTHER; note = 2'-O-methyluridine-3'-phosphate
  modified_base 9: mod_base = OTHER; note = 2'-fluorouridine-3'-phosphate
  modified_base 10: mod_base = OTHER; note = 2'-fluoroguanosine-3'-phosphate
  modified_base 11: mod_base = OTHER; note = 2'-fluoroadenosine-3'-phosphate
  modified_base 12: mod_base = OTHER; note = 2'-O-methylcytidine-3'-phosphate
  modified_base 13: mod_base = OTHER; note = 2'-O-methyladenosine-3'-phosphate
  modified_base 14: mod_base = OTHER; note = 2'-O-methylcytidine-3'-phosphate
  modified_base 15: mod_base = OTHER; note = 2'-O-methylcytidine-3'-phosphate
  modified_base 16: mod_base = OTHER; note = 2'-O-methylguanosine-3'-phosphate
  modified_base 17: mod_base = OTHER; note = 2'-O-methyladenosine-3'-phosphate
  modified_base 18: mod_base = OTHER; note = 2'-O-methyladenosine-3'-phosphate
  modified_base 19: mod_base = OTHER; note = 2'-O-methylguanosine-3'-phosphate
  modified_base 20: mod_base = OTHER; note = 2'-O-methyladenosine-3'-phosphate
  modified_base 21: mod_base = OTHER; note = 2'-O-methyluridine-3'-phosphate N-[tris(GalNAc-alkyl)-amidodecanoyl)]-4-hydroxyprolinol (Hyp-(GalNAc-alkyl)3)
gcaaaacttgacaccgaagat

SEQ ID NO: 648 - RNA, 21 nt, synthetic construct
  source 1..21: mol_type = other RNA
  modified_base 1: mod_base = OTHER; note = 2'-O-methyluridine-3'-phosphorothioate
  modified_base 2: mod_base = OTHER; note = 2'-O-methyluridine-3'-phosphorothioate
  modified_base 3: mod_base = OTHER; note = 2'-O-methylguanosine-3'-phosphate
  modified_base 4: mod_base = OTHER; note = 2'-O-methyladenosine-3'-phosphate
  modified_base 5: mod_base = OTHER; note = 2'-O-methylcytidine-3'-phosphate
  modified_base 6: mod_base = OTHER; note = 2'-O-methyladenosine-3'-phosphate
  modified_base 7: mod_base = OTHER; note = 2'-fluorocytidine-3'-phosphate
  modified_base 8: mod_base = OTHER; note = 2'-O-methylcytidine-3'-phosphate
  modified_base 9: mod_base = OTHER; note = 2'-fluoroguanosine-3'-phosphate
  modified_base 10: mod_base = OTHER; note = 2'-fluoroadenosine-3'-phosphate
  modified_base 11: mod_base = OTHER; note = 2'-fluoroadenosine-3'-phosphate
  modified_base 12: mod_base = OTHER; note = 2'-O-methylguanosine-3'-phosphate
  modified_base 13: mod_base = OTHER; note = 2'-O-methyladenosine-3'-phosphate
  modified_base 14: mod_base = OTHER; note = 2'-O-methylcytidine-3'-phosphate
  modified_base 15: mod_base = OTHER; note = 2'-O-methyladenosine-3'-phosphate
  modified_base 16: mod_base = OTHER; note = 2'-O-methyladenosine-3'-phosphate
  modified_base 17: mod_base = OTHER; note = 2'-O-methylguanosine-3'-phosphate
  modified_base 18: mod_base = OTHER; note = 2'-O-methyluridine-3'-phosphate
  modified_base 19: mod_base = OTHER; note = 2'-O-methyluridine-3'-phosphate
  modified_base 20: mod_base = OTHER; note = 2'-O-methylguanosine-3'-phosphate
  modified_base 21: mod_base = OTHER; note = 2'-O-methyluridine-3'-phosphate N-[tris(GalNAc-alkyl)-amidodecanoyl)]-4-hydroxyprolinol (Hyp-(GalNAc-alkyl)3)
ttgacaccgaagacaagttgt

SEQ ID NO: 649 - RNA, 21 nt, synthetic construct
  source 1..21: mol_type = other RNA
  modified_base 1: mod_base = OTHER; note = 2'-O-methyluridine-3'-phosphorothioate
  modified_base 2: mod_base = OTHER; note = 2'-O-methylguanosine-3'-phosphorothioate
  modified_base 3: mod_base = OTHER; note = 2'-O-methyladenosine-3'-phosphate
  modified_base 4: mod_base = OTHER; note = 2'-O-methylcytidine-3'-phosphate
  modified_base 5: mod_base = OTHER; note = 2'-O-methyladenosine-3'-phosphate
  modified_base 6: mod_base = OTHER; note = 2'-O-methylcytidine-3'-phosphate
  modified_base 7: mod_base = OTHER; note = 2'-fluorocytidine-3'-phosphate
  modified_base 8: mod_base = OTHER; note = 2'-O-methylguanosine-3'-phosphate
  modified_base 9: mod_base = OTHER; note = 2'-fluoroadenosine-3'-phosphate
  modified_base 10: mod_base = OTHER; note = 2'-fluoroadenosine-3'-phosphate
  modified_base 11: mod_base = OTHER; note = 2'-fluoroguanosine-3'-phosphate
  modified_base 12: mod_base = OTHER; note = 2'-O-methyladenosine-3'-phosphate
  modified_base 13: mod_base = OTHER; note = 2'-O-methylcytidine-3'-phosphate
  modified_base 14: mod_base = OTHER; note = 2'-O-methyladenosine-3'-phosphate
  modified_base 15: mod_base = OTHER; note = 2'-O-methyladenosine-3'-phosphate
  modified_base 16: mod_base = OTHER; note = 2'-O-methylguanosine-3'-phosphate
  modified_base 17: mod_base = OTHER; note = 2'-O-methyluridine-3'-phosphate
  modified_base 18: mod_base = OTHER; note = 2'-O-methyluridine-3'-phosphate
  modified_base 19: mod_base = OTHER; note = 2'-O-methylguanosine-3'-phosphate
  modified_base 20: mod_base = OTHER; note = 2'-O-methyladenosine-3'-phosphate
  modified_base 21: mod_base = OTHER; note = 2'-O-methyluridine-3'-phosphate N-[tris(GalNAc-alkyl)-amidodecanoyl)]-4-hydroxyprolinol (Hyp-(GalNAc-alkyl)3)
tgacaccgaagacaagttgat

SEQ ID NO: 650 - RNA, 21 nt, synthetic construct
  source 1..21: mol_type = other RNA
  modified_base 1: mod_base = OTHER; note = 2'-O-methyladenosine-3'-phosphorothioate
  modified_base 2: mod_base = OTHER; note = 2'-O-methylcytidine-3'-phosphorothioate
  modified_base 3: mod_base = OTHER; note = 2'-O-methyladenosine-3'-phosphate
  modified_base 4: mod_base = OTHER; note = 2'-O-methylcytidine-3'-phosphate
  modified_base 5: mod_base = OTHER; note = 2'-O-methylcytidine-3'-phosphate
  modified_base 6: mod_base = OTHER; note = 2'-O-methylguanosine-3'-phosphate
  modified_base 7: mod_base = OTHER; note = 2'-fluoroadenosine-3'-phosphate
  modified_base 8: mod_base = OTHER; note = 2'-O-methyladenosine-3'-phosphate
  modified_base 9: mod_base = OTHER; note = 2'-fluoroguanosine-3'-phosphate
  modified_base 10: mod_base = OTHER; note = 2'-fluoroadenosine-3'-phosphate
  modified_base 11: mod_base = OTHER; note = 2'-fluorocytidine-3'-phosphate
  modified_base 12: mod_base = OTHER; note = 2'-O-methyladenosine-3'-phosphate
  modified_base 13: mod_base = OTHER; note = 2'-O-methyladenosine-3'-phosphate
  modified_base 14: mod_base = OTHER; note = 2'-O-methylguanosine-3'-phosphate
  modified_base 15: mod_base = OTHER; note = 2'-O-methyluridine-3'-phosphate
  modified_base 16: mod_base = OTHER; note = 2'-O-methyluridine-3'-phosphate
  modified_base 17: mod_base = OTHER; note = 2'-O-methylguanosine-3'-phosphate
  modified_base 18: mod_base = OTHER; note = 2'-O-methyladenosine-3'-phosphate
  modified_base 19: mod_base = OTHER; note = 2'-O-methylguanosine-3'-phosphate
  modified_base 20: mod_base = OTHER; note = 2'-O-methylguanosine-3'-phosphate
  modified_base 21: mod_base = OTHER; note = 2'-O-methyluridine-3'-phosphate N-[tris(GalNAc-alkyl)-amidodecanoyl)]-4-hydroxyprolinol (Hyp-(GalNAc-alkyl)3)
acaccgaagacaagttgaggt

SEQ ID NO: 651 - RNA, 21 nt, synthetic construct
  source 1..21: mol_type = other RNA
  modified_base 1: mod_base = OTHER; note = 2'-O-methylcytidine-3'-phosphorothioate
  modified_base 2: mod_base = OTHER; note = 2'-O-methyladenosine-3'-phosphorothioate
  modified_base 3: mod_base = OTHER; note = 2'-O-methylcytidine-3'-phosphate
  modified_base 4: mod_base = OTHER; note = 2'-O-methylcytidine-3'-phosphate
  modified_base 5: mod_base = OTHER; note = 2'-O-methylguanosine-3'-phosphate
  modified_base 6: mod_base = OTHER; note = 2'-O-methyladenosine-3'-phosphate
  modified_base 7: mod_base = OTHER; note = 2'-fluoroadenosine-3'-phosphate
  modified_base 8: mod_base = OTHER; note = 2'-O-methylguanosine-3'-phosphate
  modified_base 9: mod_base = OTHER; note = 2'-fluoroadenosine-3'-phosphate
  modified_base 10: mod_base = OTHER; note = 2'-fluorocytidine-3'-phosphate
  modified_base 11: mod_base = OTHER; note = 2'-fluoroadenosine-3'-phosphate
  modified_base 12: mod_base = OTHER; note = 2'-O-methyladenosine-3'-phosphate
  modified_base 13: mod_base = OTHER; note = 2'-O-methylguanosine-3'-phosphate
  modified_base 14: mod_base = OTHER; note = 2'-O-methyluridine-3'-phosphate
  modified_base 15: mod_base = OTHER; note = 2'-O-methyluridine-3'-phosphate
  modified_base 16: mod_base = OTHER; note = 2'-O-methylguanosine-3'-phosphate
  modified_base 17: mod_base = OTHER; note = 2'-O-methyladenosine-3'-phosphate
  modified_base 18: mod_base = OTHER; note = 2'-O-methylguanosine-3'-phosphate
  modified_base 19: mod_base = OTHER; note = 2'-O-methylguanosine-3'-phosphate
  modified_base 20: mod_base = OTHER; note = 2'-O-methylguanosine-3'-phosphate
  modified_base 21: mod_base = OTHER; note = 2'-O-methyluridine-3'-phosphate N-[tris(GalNAc-alkyl)-amidodecanoyl)]-4-hydroxyprolinol (Hyp-(GalNAc-alkyl)3)
caccgaagacaagttgagggt

SEQ ID NO: 652 - RNA, 21 nt, synthetic construct
  source 1..21: mol_type = other RNA
  modified_base 1: mod_base = OTHER; note = 2'-O-methyladenosine-3'-phosphorothioate
  modified_base 2: mod_base = OTHER; note = 2'-O-methyladenosine-3'-phosphorothioate
  modified_base 3: mod_base = OTHER; note = 2'-O-methylguanosine-3'-phosphate
  modified_base 4: mod_base = OTHER; note = 2'-O-methyluridine-3'-phosphate
  modified_base 5: mod_base = OTHER; note = 2'-O-methyluridine-3'-phosphate
  modified_base 6: mod_base = OTHER; note = 2'-O-methylguanosine-3'-phosphate
  modified_base 7: mod_base = OTHER; note = 2'-fluoroadenosine-3'-phosphate
  modified_base 8: mod_base = OTHER; note = 2'-O-methylguanosine-3'-phosphate
  modified_base 9: mod_base = OTHER; note = 2'-fluoroguanosine-3'-phosphate
  modified_base 10: mod_base = OTHER; note = 2'-fluoroguanosine-3'-phosphate
  modified_base 11: mod_base = OTHER; note = 2'-fluorocytidine-3'-phosphate
  modified_base 12: mod_base = OTHER; note = 2'-O-methylcytidine-3'-phosphate
  modified_base 13: mod_base = OTHER; note = 2'-O-methylguanosine-3'-phosphate
  modified_base 14: mod_base = OTHER; note = 2'-O-methylcytidine-3'-phosphate
  modified_base 15: mod_base = OTHER; note = 2'-O-methyladenosine-3'-phosphate
  modified_base 16: mod_base = OTHER; note = 2'-O-methyladenosine-3'-phosphate
  modified_base 17: mod_base = OTHER; note = 2'-O-methyluridine-3'-phosphate
  modified_base 18: mod_base = OTHER; note = 2'-O-methylguanosine-3'-phosphate
  modified_base 19: mod_base = OTHER; note = 2'-O-methylguanosine-3'-phosphate
  modified_base 20: mod_base = OTHER; note = 2'-O-methyluridine-3'-phosphate
  modified_base 21: mod_base = OTHER; note = 2'-O-methyluridine-3'-phosphate N-[tris(GalNAc-alkyl)-amidodecanoyl)]-4-hydroxyprolinol (Hyp-(GalNAc-alkyl)3)
aagttgagggccgcaatggtt

SEQ ID NO: 653 - RNA, 21 nt, synthetic construct
  source 1..21: mol_type = other RNA
  modified_base 1: mod_base = OTHER; note = 2'-O-methylguanosine-3'-phosphorothioate
  modified_base 2: mod_base = OTHER; note = 2'-O-methylguanosine-3'-phosphorothioate
  modified_base 3: mod_base = OTHER; note = 2'-O-methylguanosine-3'-phosphate
  modified_base 4: mod_base = OTHER; note = 2'-O-methyladenosine-3'-phosphate
  modified_base 5: mod_base = OTHER; note = 2'-O-methyluridine-3'-phosphate
  modified_base 6: mod_base = OTHER; note = 2'-O-methylguanosine-3'-phosphate
  modified_base 7: mod_base = OTHER; note = 2'-fluorocytidine-3'-phosphate
  modified_base 8: mod_base = OTHER; note = 2'-O-methyluridine-3'-phosphate
  modified_base 9: mod_base = OTHER; note = 2'-fluoroguanosine-3'-phosphate
  modified_base 10: mod_base = OTHER; note = 2'-fluoroguanosine-3'-phosphate
  modified_base 11: mod_base = OTHER; note = 2'-fluorocytidine-3'-phosphate
  modified_base 12: mod_base = OTHER; note = 2'-O-methylcytidine-3'-phosphate
  modified_base 13: mod_base = OTHER; note = 2'-O-methyladenosine-3'-phosphate
  modified_base 14: mod_base = OTHER; note = 2'-O-methyladenosine-3'-phosphate
  modified_base 15: mod_base = OTHER; note = 2'-O-methylcytidine-3'-phosphate
  modified_base 16: mod_base = OTHER; note = 2'-O-methyluridine-3'-phosphate
  modified_base 17: mod_base = OTHER; note = 2'-O-methyluridine-3'-phosphate
  modified_base 18: mod_base = OTHER; note = 2'-O-methylcytidine-3'-phosphate
  modified_base 19: mod_base = OTHER; note = 2'-O-methyluridine-3'-phosphate
  modified_base 20: mod_base = OTHER; note = 2'-O-methyluridine-3'-phosphate
  modified_base 21: mod_base = OTHER; note = 2'-O-methyluridine-3'-phosphate N-[tris(GalNAc-alkyl)-amidodecanoyl)]-4-hydroxyprolinol (Hyp-(GalNAc-alkyl)3)
gggatgctggccaacttcttt

SEQ ID NO: 654 - RNA, 21 nt, synthetic construct
  source 1..21: mol_type = other RNA
  modified_base 1: mod_base = OTHER; note = 2'-O-methylguanosine-3'-phosphorothioate
  modified_base 2: mod_base = OTHER; note = 2'-O-methylcytidine-3'-phosphorothioate
  modified_base 3: mod_base = OTHER; note = 2'-O-methyluridine-3'-phosphate
  modified_base 4: mod_base = OTHER; note = 2'-O-methylguanosine-3'-phosphate
  modified_base 5: mod_base = OTHER; note = 2'-O-methylguanosine-3'-phosphate
  modified_base 6: mod_base = OTHER; note = 2'-O-methylcytidine-3'-phosphate
  modified_base 7: mod_base = OTHER; note = 2'-fluorocytidine-3'-phosphate
  modified_base 8: mod_base = OTHER; note = 2'-O-methyladenosine-3'-phosphate
  modified_base 9: mod_base = OTHER; note = 2'-fluoroadenosine-3'-phosphate
  modified_base 10: mod_base = OTHER; note = 2'-fluorocytidine-3'-phosphate
  modified_base 11: mod_base = OTHER; note = 2'-fluorouridine-3'-phosphate
  modified_base 12: mod_base = OTHER; note = 2'-O-methyluridine-3'-phosphate
  modified_base 13: mod_base = OTHER; note = 2'-O-methylcytidine-3'-phosphate
  modified_base 14: mod_base = OTHER; note = 2'-O-methyluridine-3'-phosphate
  modified_base 15: mod_base = OTHER; note = 2'-O-methyluridine-3'-phosphate
  modified_base 16: mod_base = OTHER; note = 2'-O-methylguanosine-3'-phosphate
  modified_base 17: mod_base = OTHER; note = 2'-O-methylguanosine-3'-phosphate
  modified_base 18: mod_base = OTHER; note = 2'-O-methylguanosine-3'-phosphate
  modified_base 19: mod_base = OTHER; note = 2'-O-methylcytidine-3'-phosphate
  modified_base 20: mod_base = OTHER; note = 2'-O-methyluridine-3'-phosphate
  modified_base 21: mod_base = OTHER; note = 2'-O-methyluridine-3'-phosphate N-[tris(GalNAc-alkyl)-amidodecanoyl)]-4-hydroxyprolinol (Hyp-(GalNAc-alkyl)3)
gctggccaacttcttgggctt

SEQ ID NO: 655 - RNA, 21 nt, synthetic construct
  source 1..21: mol_type = other RNA
  modified_base 1: mod_base = OTHER; note = 2'-O-methylcytidine-3'-phosphorothioate
  modified_base 2: mod_base = OTHER; note = 2'-O-methyladenosine-3'-phosphorothioate
  modified_base 3: mod_base = OTHER; note = 2'-O-methyladenosine-3'-phosphate
  modified_base 4: mod_base = OTHER; note = 2'-O-methylcytidine-3'-phosphate
  modified_base 5: mod_base = OTHER; note = 2'-O-methyluridine-3'-phosphate
  modified_base 6: mod_base = OTHER; note = 2'-O-methyluridine-3'-phosphate
  modified_base 7: mod_base = OTHER; note = 2'-fluorocytidine-3'-phosphate
  modified_base 8: mod_base = OTHER; note = 2'-O-methyluridine-3'-phosphate
  modified_base 9: mod_base = OTHER; note = 2'-fluorouridine-3'-phosphate
  modified_base 10: mod_base = OTHER; note = 2'-fluoroguanosine-3'-phosphate
  modified_base 11: mod_base = OTHER; note = 2'-fluoroguanosine-3'-phosphate
  modified_base 12: mod_base = OTHER; note = 2'-O-methylguanosine-3'-phosphate
  modified_base 13: mod_base = OTHER; note = 2'-O-methylcytidine-3'-phosphate
  modified_base 14: mod_base = OTHER; note = 2'-O-methyluridine-3'-phosphate
  modified_base 15: mod_base = OTHER; note = 2'-O-methyluridine-3'-phosphate
  modified_base 16: mod_base = OTHER; note = 2'-O-methylcytidine-3'-phosphate
  modified_base 17: mod_base = OTHER; note = 2'-O-methylcytidine-3'-phosphate
  modified_base 18: mod_base = OTHER; note = 2'-O-methylguanosine-3'-phosphate
  modified_base 19: mod_base = OTHER; note = 2'-O-methyluridine-3'-phosphate
  modified_base 20: mod_base = OTHER; note = 2'-O-methyladenosine-3'-phosphate
  modified_base 21: mod_base = OTHER; note = 2'-O-methyluridine-3'-phosphate N-[tris(GalNAc-alkyl)-amidodecanoyl)]-4-hydroxyprolinol (Hyp-(GalNAc-alkyl)3)
caacttcttgggcttccgtat

SEQ ID NO: 656 - RNA, 21 nt, synthetic construct
  source 1..21: mol_type = other RNA
  modified_base 1: mod_base = OTHER; note = 2'-O-methyladenosine-3'-phosphorothioate
  modified_base 2: mod_base = OTHER; note = 2'-O-methyladenosine-3'-phosphorothioate
  modified_base 3: mod_base = OTHER; note = 2'-O-methylcytidine-3'-phosphate
  modified_base 4: mod_base = OTHER; note = 2'-O-methyluridine-3'-phosphate
  modified_base 5: mod_base = OTHER; note = 2'-O-methyluridine-3'-phosphate
  modified_base 6: mod_base = OTHER; note = 2'-O-methylcytidine-3'-phosphate
  modified_base 7: mod_base = OTHER; note = 2'-fluorouridine-3'-phosphate
  modified_base 8: mod_base = OTHER; note = 2'-O-methyluridine-3'-phosphate
  modified_base 9: mod_base = OTHER; note = 2'-fluoroguanosine-3'-phosphate
  modified_base 10: mod_base = OTHER; note = 2'-fluoroguanosine-3'-phosphate
  modified_base 11: mod_base = OTHER; note = 2'-fluoroguanosine-3'-phosphate
  modified_base 12: mod_base = OTHER; note = 2'-O-methylcytidine-3'-phosphate
  modified_base 13: mod_base = OTHER; note = 2'-O-methyluridine-3'-phosphate
  modified_base 14: mod_base = OTHER; note = 2'-O-methyluridine-3'-phosphate
  modified_base 15: mod_base = OTHER; note = 2'-O-methylcytidine-3'-phosphate
  modified_base 16: mod_base = OTHER; note = 2'-O-methylcytidine-3'-phosphate
  modified_base 17: mod_base = OTHER; note = 2'-O-methylguanosine-3'-phosphate
  modified_base 18: mod_base = OTHER; note = 2'-O-methyluridine-3'-phosphate
  modified_base 19: mod_base = OTHER; note = 2'-O-methyladenosine-3'-phosphate
  modified_base 20: mod_base = OTHER; note = 2'-O-methyluridine-3'-phosphate
  modified_base 21: mod_base = OTHER; note = 2'-O-methyluridine-3'-phosphate N-[tris(GalNAc-alkyl)-amidodecanoyl)]-4-hydroxyprolinol (Hyp-(GalNAc-alkyl)3)
aacttcttgggcttccgtatt

SEQ ID NO: 657 - RNA, 21 nt, synthetic construct
  source 1..21: mol_type = other RNA
  modified_base 1: mod_base = OTHER; note = 2'-O-methyladenosine-3'-phosphorothioate
  modified_base 2: mod_base = OTHER; note = 2'-O-methylcytidine-3'-phosphorothioate
  modified_base 3: mod_base = OTHER; note = 2'-O-methyluridine-3'-phosphate
  modified_base 4: mod_base = OTHER; note = 2'-O-methyluridine-3'-phosphate
  modified_base 5: mod_base = OTHER; note = 2'-O-methylcytidine-3'-phosphate
  modified_base 6: mod_base = OTHER; note = 2'-O-methyluridine-3'-phosphate
  modified_base 7: mod_base = OTHER; note = 2'-fluorouridine-3'-phosphate
  modified_base 8: mod_base = OTHER; note = 2'-O-methylguanosine-3'-phosphate
  modified_base 9: mod_base = OTHER; note = 2'-fluoroguanosine-3'-phosphate
  modified_base 10: mod_base = OTHER; note = 2'-fluoroguanosine-3'-phosphate
  modified_base 11: mod_base = OTHER; note = 2'-fluorocytidine-3'-phosphate
  modified_base 12: mod_base = OTHER; note = 2'-O-methyluridine-3'-phosphate
  modified_base 13: mod_base = OTHER; note = 2'-O-methyluridine-3'-phosphate
  modified_base 14: mod_base = OTHER; note = 2'-O-methylcytidine-3'-phosphate
  modified_base 15: mod_base = OTHER; note = 2'-O-methylcytidine-3'-phosphate
  modified_base 16: mod_base = OTHER; note = 2'-O-methylguanosine-3'-phosphate
  modified_base 17: mod_base = OTHER; note = 2'-O-methyluridine-3'-phosphate
  modified_base 18: mod_base = OTHER; note = 2'-O-methyladenosine-3'-phosphate
  modified_base 19: mod_base = OTHER; note = 2'-O-methyluridine-3'-phosphate
  modified_base 20: mod_base = OTHER; note = 2'-O-methyladenosine-3'-phosphate
  modified_base 21: mod_base = OTHER; note = 2'-O-methyluridine-3'-phosphate N-[tris(GalNAc-alkyl)-amidodecanoyl)]-4-hydroxyprolinol (Hyp-(GalNAc-alkyl)3)
acttcttgggcttccgtatat

SEQ ID NO: 658 - RNA, 21 nt, synthetic construct
  source 1..21: mol_type = other RNA
  modified_base 1: mod_base = OTHER; note = 2'-O-methyluridine-3'-phosphorothioate
  modified_base 2: mod_base = OTHER; note = 2'-O-methylcytidine-3'-phosphorothioate
  modified_base 3: mod_base = OTHER; note = 2'-O-methyluridine-3'-phosphate
  modified_base 4: mod_base = OTHER; note = 2'-O-methyluridine-3'-phosphate
  modified_base 5: mod_base = OTHER; note = 2'-O-methylguanosine-3'-phosphate
  modified_base 6: mod_base = OTHER; note = 2'-O-methylguanosine-3'-phosphate
  modified_base 7: mod_base = OTHER; note = 2'-fluoroguanosine-3'-phosphate
  modified_base 8: mod_base = OTHER; note = 2'-O-methylcytidine-3'-phosphate
  modified_base 9: mod_base = OTHER; note = 2'-fluorouridine-3'-phosphate
  modified_base 10: mod_base = OTHER; note = 2'-fluorouridine-3'-phosphate
  modified_base 11: mod_base = OTHER; note = 2'-fluorocytidine-3'-phosphate
  modified_base 12: mod_base = OTHER; note = 2'-O-methylcytidine-3'-phosphate
  modified_base 13: mod_base = OTHER; note = 2'-O-methylguanosine-3'-phosphate
  modified_base 14: mod_base = OTHER; note = 2'-O-methyluridine-3'-phosphate
  modified_base 15: mod_base = OTHER; note = 2'-O-methyladenosine-3'-phosphate
  modified_base 16: mod_base = OTHER; note = 2'-O-methyluridine-3'-phosphate
  modified_base 17: mod_base = OTHER; note = 2'-O-methyladenosine-3'-phosphate
  modified_base 18: mod_base = OTHER; note = 2'-O-methyluridine-3'-phosphate
  modified_base 19: mod_base = OTHER; note = 2'-O-methyladenosine-3'-phosphate
  modified_base 20: mod_base = OTHER; note = 2'-O-methyluridine-3'-phosphate
  modified_base 21: mod_base = OTHER; note = 2'-O-methyluridine-3'-phosphate N-[tris(GalNAc-alkyl)-amidodecanoyl)]-4-hydroxyprolinol (Hyp-(GalNAc-alkyl)3)
tcttgggcttccgtatatatt

SEQ ID NO: 659 - RNA, 21 nt, synthetic construct
  source 1..21: mol_type = other RNA
  modified_base 1: mod_base = OTHER; note = 2'-O-methyluridine-3'-phosphorothioate
  modified_base 2: mod_base = OTHER; note = 2'-O-methyluridine-3'-phosphorothioate
  modified_base 3: mod_base = OTHER; note = 2'-O-methylguanosine-3'-phosphate
  modified_base 4: mod_base = OTHER; note = 2'-O-methylguanosine-3'-phosphate
  modified_base 5: mod_base = OTHER; note = 2'-O-methylguanosine-3'-phosphate
  modified_base 6: mod_base = OTHER; note = 2'-O-methylcytidine-3'-phosphate
  modified_base 7: mod_base = OTHER; note = 2'-fluorouridine-3'-phosphate
  modified_base 8: mod_base = OTHER; note = 2'-O-methyluridine-3'-phosphate
  modified_base 9: mod_base = OTHER; note = 2'-fluorocytidine-3'-phosphate
  modified_base 10: mod_base = OTHER; note = 2'-fluorocytidine-3'-phosphate
  modified_base 11: mod_base = OTHER; note = 2'-fluoroguanosine-3'-phosphate
  modified_base 12: mod_base = OTHER; note = 2'-O-methyluridine-3'-phosphate
  modified_base 13: mod_base = OTHER; note = 2'-O-methyladenosine-3'-phosphate
  modified_base 14: mod_base = OTHER; note = 2'-O-methyluridine-3'-phosphate
  modified_base 15: mod_base = OTHER; note = 2'-O-methyladenosine-3'-phosphate
  modified_base 16: mod_base = OTHER; note = 2'-O-methyluridine-3'-phosphate
  modified_base 17: mod_base = OTHER; note = 2'-O-methyladenosine-3'-phosphate
  modified_base 18: mod_base = OTHER; note = 2'-O-methyluridine-3'-phosphate
  modified_base 19: mod_base = OTHER; note = 2'-O-methylguanosine-3'-phosphate
  modified_base 20: mod_base = OTHER; note = 2'-O-methylguanosine-3'-phosphate
  modified_base 21: mod_base = OTHER; note = 2'-O-methyluridine-3'-phosphate N-[tris(GalNAc-alkyl)-amidodecanoyl)]-4-hydroxyprolinol (Hyp-(GalNAc-alkyl)3)
ttgggcttccgtatatatggt

SEQ ID NO: 660 - RNA, 21 nt, synthetic construct
  source 1..21: mol_type = other RNA
  modified_base 1: mod_base = OTHER; note = 2'-O-methyluridine-3'-phosphorothioate
  modified_base 2: mod_base = OTHER; note = 2'-O-methyladenosine-3'-phosphorothioate
  modified_base 3: mod_base = OTHER; note = 2'-O-methyluridine-3'-phosphate
  modified_base 4: mod_base = OTHER; note = 2'-O-methyladenosine-3'-phosphate
  modified_base 5: mod_base = OTHER; note = 2'-O-methyluridine-3'-phosphate
  modified_base 6: mod_base = OTHER; note = 2'-O-methylguanosine-3'-phosphate
  modified_base 7: mod_base = OTHER; note = 2'-fluoroguanosine-3'-phosphate
  modified_base 8: mod_base = OTHER; note = 2'-O-methylcytidine-3'-phosphate
  modified_base 9: mod_base = OTHER; note = 2'-fluoroadenosine-3'-phosphate
  modified_base 10: mod_base = OTHER; note = 2'-fluorouridine-3'-phosphate
  modified_base 11: mod_base = OTHER; note = 2'-fluoroguanosine-3'-phosphate
  modified_base 12: mod_base = OTHER; note = 2'-O-methylcytidine-3'-phosphate
  modified_base 13: mod_base = OTHER; note = 2'-O-methyladenosine-3'-phosphate
  modified_base 14: mod_base = OTHER; note = 2'-O-methylcytidine-3'-phosphate
  modified_base 15: mod_base = OTHER; note = 2'-O-methyladenosine-3'-phosphate
  modified_base 16: mod_base = OTHER; note = 2'-O-methylguanosine-3'-phosphate
  modified_base 17: mod_base = OTHER; note = 2'-O-methyluridine-3'-phosphate
  modified_base 18: mod_base = OTHER; note = 2'-O-methylguanosine-3'-phosphate
  modified_base 19: mod_base = OTHER; note = 2'-O-methyladenosine-3'-phosphate
  modified_base 20: mod_base = OTHER; note = 2'-O-methylguanosine-3'-phosphate
  modified_base 21: mod_base = OTHER; note = 2'-O-methyluridine-3'-phosphate N-[tris(GalNAc-alkyl)-amidodecanoyl)]-4-hydroxyprolinol (Hyp-(GalNAc-alkyl)3)
tatatggcatgcacagtgagt

SEQ ID NO: 661 - RNA, 21 nt, synthetic construct
  source 1..21: mol_type = other RNA
  modified_base 1: mod_base = OTHER; note = 2'-O-methylguanosine-3'-phosphorothioate
  modified_base 2: mod_base = OTHER; note = 2'-O-methylcytidine-3'-phosphorothioate
  modified_base 3: mod_base = OTHER; note = 2'-O-methyladenosine-3'-phosphate
  modified_base 4: mod_base = OTHER; note = 2'-O-methyluridine-3'-phosphate
  modified_base 5: mod_base = OTHER; note = 2'-O-methylguanosine-3'-phosphate
  modified_base 6: mod_base = OTHER; note = 2'-O-methylcytidine-3'-phosphate
  modified_base 7: mod_base = OTHER; note = 2'-fluoroadenosine-3'-phosphate
  modified_base 8: mod_base = OTHER; note = 2'-O-methylcytidine-3'-phosphate
  modified_base 9: mod_base = OTHER; note = 2'-fluoroadenosine-3'-phosphate
  modified_base 10: mod_base = OTHER; note = 2'-fluoroguanosine-3'-phosphate
  modified_base 11: mod_base = OTHER; note = 2'-fluorouridine-3'-phosphate
  modified_base 12: mod_base = OTHER; note = 2'-O-methylguanosine-3'-phosphate
  modified_base 13: mod_base = OTHER; note = 2'-O-methyladenosine-3'-phosphate
  modified_base 14: mod_base = OTHER; note = 2'-O-methylguanosine-3'-phosphate
  modified_base 15: mod_base = OTHER; note = 2'-O-methylcytidine-3'-phosphate
  modified_base 16: mod_base = OTHER; note = 2'-O-methyluridine-3'-phosphate
  modified_base 17: mod_base = OTHER; note = 2'-O-methyladenosine-3'-phosphate
  modified_base 18: mod_base = OTHER; note = 2'-O-methyluridine-3'-phosphate
  modified_base 19: mod_base = OTHER; note = 2'-O-methylguanosine-3'-phosphate
  modified_base 20: mod_base = OTHER; note = 2'-O-methylguanosine-3'-phosphate
  modified_base 21: mod_base = OTHER; note = 2'-O-methyluridine-3'-phosphate N-[tris(GalNAc-alkyl)-amidodecanoyl)]-4-hydroxyprolinol (Hyp-(GalNAc-alkyl)3)
gcatgcacagtgagctatggt

SEQ ID NO: 662 - RNA, 21 nt, synthetic construct
  source 1..21: mol_type = other RNA
  modified_base 1: mod_base = OTHER; note = 2'-O-methylcytidine-3'-phosphorothioate
  modified_base 2: mod_base = OTHER; note = 2'-O-methyluridine-3'-phosphorothioate
  modified_base 3: mod_base = OTHER; note = 2'-O-methylcytidine-3'-phosphate
  modified_base 4: mod_base = OTHER; note = 2'-O-methyluridine-3'-phosphate
  modified_base 5: mod_base = OTHER; note = 2'-O-methyladenosine-3'-phosphate
  modified_base 6: mod_base = OTHER; note = 2'-O-methyluridine-3'-phosphate
  modified_base 7: mod_base = OTHER; note = 2'-fluorocytidine-3'-phosphate
  modified_base 8: mod_base = OTHER; note = 2'-O-methyluridine-3'-phosphate
  modified_base 9: mod_base = OTHER; note = 2'-fluoroguanosine-3'-phosphate
  modified_base 10: mod_base = OTHER; note = 2'-fluoroguanosine-3'-phosphate
  modified_base 11: mod_base = OTHER; note = 2'-fluoroguanosine-3'-phosphate
  modified_base 12: mod_base = OTHER; note = 2'-O-methyladenosine-3'-phosphate
  modified_base 13: mod_base = OTHER; note = 2'-O-methylguanosine-3'-phosphate
  modified_base 14: mod_base = OTHER; note = 2'-O-methylcytidine-3'-phosphate
  modified_base 15: mod_base = OTHER; note = 2'-O-methylcytidine-3'-phosphate
  modified_base 16: mod_base = OTHER; note = 2'-O-methyluridine-3'-phosphate
  modified_base 17: mod_base = OTHER; note = 2'-O-methyluridine-3'-phosphate
  modified_base 18: mod_base = OTHER; note = 2'-O-methylguanosine-3'-phosphate
  modified_base 19: mod_base = OTHER; note = 2'-O-methylguanosine-3'-phosphate
  modified_base 20: mod_base = OTHER; note = 2'-O-methyladenosine-3'-phosphate
  modified_base 21: mod_base = OTHER; note = 2'-O-methyluridine-3'-phosphate N-[tris(GalNAc-alkyl)-amidodecanoyl)]-4-hydroxyprolinol (Hyp-(GalNAc-alkyl)3)
ctctatctgggagccttggat

SEQ ID NO: 663 - RNA, 21 nt, synthetic construct
  source 1..21: mol_type = other RNA
  modified_base 1: mod_base = OTHER; note = 2'-O-methylguanosine-3'-phosphorothioate
  modified_base 2: mod_base = OTHER; note = 2'-O-methyladenosine-3'-phosphorothioate
  modified_base 3: mod_base = OTHER; note = 2'-O-methylcytidine-3'-phosphate
  modified_base 4: mod_base = OTHER; note = 2'-O-methyladenosine-3'-phosphate
  modified_base 5: mod_base = OTHER; note = 2'-O-methylguanosine-3'-phosphate
  modified_base 6: mod_base = OTHER; note = 2'-O-methylguanosine-3'-phosphate
  modified_base 7: mod_base = OTHER; note = 2'-fluorocytidine-3'-phosphate
  modified_base 8: mod_base = OTHER; note = 2'-O-methyluridine-3'-phosphate
  modified_base 9: mod_base = OTHER; note = 2'-fluoroadenosine-3'-phosphate
  modified_base 10: mod_base = OTHER; note = 2'-fluorocytidine-3'-phosphate
  modified_base 11: mod_base = OTHER; note = 2'-fluoroadenosine-3'-phosphate
  modified_base 12: mod_base = OTHER; note = 2'-O-methylguanosine-3'-phosphate
  modified_base 13: mod_base = OTHER; note = 2'-O-methylguanosine-3'-phosphate
  modified_base 14: mod_base = OTHER; note = 2'-O-methylcytidine-3'-phosphate
  modified_base 15: mod_base = OTHER; note = 2'-O-methyladenosine-3'-phosphate
  modified_base 16: mod_base = OTHER; note = 2'-O-methyladenosine-3'-phosphate
  modified_base 17: mod_base = OTHER; note = 2'-O-methyluridine-3'-phosphate
  modified_base 18: mod_base = OTHER; note = 2'-O-methylcytidine-3'-phosphate
  modified_base 19: mod_base = OTHER; note = 2'-O-methylcytidine-3'-phosphate
  modified_base 20: mod_base = OTHER; note = 2'-O-methyluridine-3'-phosphate
  modified_base 21: mod_base = OTHER; note = 2'-O-methyluridine-3'-phosphate N-[tris(GalNAc-alkyl)-amidodecanoyl)]-4-hydroxyprolinol (Hyp-(GalNAc-alkyl)3)
gacaggctacaggcaatcctt

SEQ ID NO: 664 - RNA, 21 nt, synthetic construct
  source 1..21: mol_type = other RNA
  modified_base 1: mod_base = OTHER; note = 2'-O-methyladenosine-3'-phosphorothioate
  modified_base 2: mod_base = OTHER; note = 2'-O-methylcytidine-3'-phosphorothioate
  modified_base 3: mod_base = OTHER; note = 2'-O-methyladenosine-3'-phosphate
  modified_base 4: mod_base = OTHER; note = 2'-O-methylguanosine-3'-phosphate
  modified_base 5: mod_base = OTHER; note = 2'-O-methylguanosine-3'-phosphate
  modified_base 6: mod_base = OTHER; note = 2'-O-methylcytidine-3'-phosphate
  modified_base 7: mod_base = OTHER; note = 2'-fluorouridine-3'-phosphate
  modified_base 8: mod_base = OTHER; note = 2'-O-methyladenosine-3'-phosphate
  modified_base 9: mod_base = OTHER; note = 2'-fluorocytidine-3'-phosphate
  modified_base 10: mod_base = OTHER; note = 2'-fluoroadenosine-3'-phosphate
  modified_base 11: mod_base = OTHER; note = 2'-fluoroguanosine-3'-phosphate
  modified_base 12: mod_base = OTHER; note = 2'-O-methylguanosine-3'-phosphate
  modified_base 13: mod_base = OTHER; note = 2'-O-methylcytidine-3'-phosphate
  modified_base 14: mod_base = OTHER; note = 2'-O-methyladenosine-3'-phosphate
  modified_base 15: mod_base = OTHER; note = 2'-O-methyladenosine-3'-phosphate
  modified_base 16: mod_base = OTHER; note = 2'-O-methyluridine-3'-phosphate
  modified_base 17: mod_base = OTHER; note = 2'-O-methylcytidine-3'-phosphate
  modified_base 18: mod_base = OTHER; note = 2'-O-methylcytidine-3'-phosphate
  modified_base 19: mod_base = OTHER; note = 2'-O-methyluridine-3'-phosphate
  modified_base 20: mod_base = OTHER; note = 2'-O-methylguanosine-3'-phosphate
  modified_base 21: mod_base = OTHER; note = 2'-O-methyluridine-3'-phosphate N-[tris(GalNAc-alkyl)-amidodecanoyl)]-4-hydroxyprolinol (Hyp-(GalNAc-alkyl)3)
acaggctacaggcaatcctgt

SEQ ID NO: 665 - RNA, 21 nt, synthetic construct
  source 1..21: mol_type = other RNA
  modified_base 1: mod_base = OTHER; note = 2'-O-methyluridine-3'-phosphorothioate
  modified_base 2: mod_base = OTHER; note = 2'-O-methyladenosine-3'-phosphorothioate
  modified_base 3: mod_base = OTHER; note = 2'-O-methylcytidine-3'-phosphate
  modified_base 4: mod_base = OTHER; note = 2'-O-methyladenosine-3'-phosphate
  modified_base 5: mod_base = OTHER; note = 2'-O-methylguanosine-3'-phosphate
  modified_base 6: mod_base = OTHER; note = 2'-O-methylguanosine-3'-phosphate
  modified_base 7: mod_base = OTHER; note = 2'-fluorocytidine-3'-phosphate
  modified_base 8: mod_base = OTHER; note = 2'-O-methyladenosine-3'-phosphate
  modified_base 9: mod_base = OTHER; note = 2'-fluoroadenosine-3'-phosphate
  modified_base 10: mod_base = OTHER; note = 2'-fluorouridine-3'-phosphate
  modified_base 11: mod_base = OTHER; note = 2'-fluorocytidine-3'-phosphate
  modified_base 12: mod_base = OTHER; note = 2'-O-methylcytidine-3'-phosphate
  modified_base 13: mod_base = OTHER; note = 2'-O-methyluridine-3'-phosphate
  modified_base 14: mod_base = OTHER; note = 2'-O-methylguanosine-3'-phosphate
  modified_base 15: mod_base = OTHER; note = 2'-O-methylguanosine-3'-phosphate
  modified_base 16: mod_base = OTHER; note = 2'-O-methylguanosine-3'-phosphate
  modified_base 17: mod_base = OTHER; note = 2'-O-methyluridine-3'-phosphate
  modified_base 18: mod_base = OTHER; note = 2'-O-methylguanosine-3'-phosphate
  modified_base 19: mod_base = OTHER; note = 2'-O-methyluridine-3'-phosphate
  modified_base 20: mod_base = OTHER; note = 2'-O-methyluridine-3'-phosphate
  modified_base 21: mod_base = OTHER; note = 2'-O-methyluridine-3'-phosphate N-[tris(GalNAc-alkyl)-amidodecanoyl)]-4-hydroxyprolinol (Hyp-(GalNAc-alkyl)3)
tacaggcaatcctgggtgttt

SEQ ID NO: 666 - RNA, 21 nt, synthetic construct
  source 1..21: mol_type = other RNA
  modified_base 1: mod_base = OTHER; note = 2'-O-methyladenosine-3'-phosphorothioate
  modified_base 2: mod_base = OTHER; note = 2'-O-methylcytidine-3'-phosphorothioate
  modified_base 3: mod_base = OTHER; note = 2'-O-methyladenosine-3'-phosphate
  modified_base 4: mod_base = OTHER; note = 2'-O-methylguanosine-3'-phosphate
  modified_base 5: mod_base = OTHER; note = 2'-O-methylguanosine-3'-phosphate
  modified_base 6: mod_base = OTHER; note = 2'-O-methylcytidine-3'-phosphate
  modified_base 7: mod_base = OTHER; note = 2'-fluoroadenosine-3'-phosphate
  modified_base 8: mod_base = OTHER; note = 2'-O-methyladenosine-3'-phosphate
  modified_base 9: mod_base = OTHER; note = 2'-fluorouridine-3'-phosphate
  modified_base 10: mod_base = OTHER; note = 2'-fluorocytidine-3'-phosphate
  modified_base 11: mod_base = OTHER; note = 2'-fluorocytidine-3'-phosphate
  modified_base 12: mod_base = OTHER; note = 2'-O-methyluridine-3'-phosphate
  modified_base 13: mod_base = OTHER; note = 2'-O-methylguanosine-3'-phosphate
  modified_base 14: mod_base = OTHER; note = 2'-O-methylguanosine-3'-phosphate
  modified_base 15: mod_base = OTHER; note = 2'-O-methylguanosine-3'-phosphate
  modified_base 16: mod_base = OTHER; note = 2'-O-methyluridine-3'-phosphate
  modified_base 17: mod_base = OTHER; note = 2'-O-methylguanosine-3'-phosphate
  modified_base 18: mod_base = OTHER; note = 2'-O-methyluridine-3'-phosphate
  modified_base 19: mod_base = OTHER; note = 2'-O-methyluridine-3'-phosphate
  modified_base 20: mod_base = OTHER; note = 2'-O-methylcytidine-3'-phosphate
  modified_base 21: mod_base = OTHER; note = 2'-O-methyluridine-3'-phosphate N-[tris(GalNAc-alkyl)-amidodecanoyl)]-4-hydroxyprolinol (Hyp-(GalNAc-alkyl)3)
acaggcaatcctgggtgttct

SEQ ID NO: 667 - RNA, 21 nt, synthetic construct
  source 1..21: mol_type = other RNA
  modified_base 1: mod_base = OTHER; note = 2'-O-methylguanosine-3'-phosphorothioate
  modified_base 2: mod_base = OTHER; note = 2'-O-methylguanosine-3'-phosphorothioate
  modified_base 3: mod_base = OTHER; note = 2'-O-methylcytidine-3'-phosphate
  modified_base 4: mod_base = OTHER; note = 2'-O-methyladenosine-3'-phosphate
  modified_base 5: mod_base = OTHER; note = 2'-O-methyladenosine-3'-phosphate
  modified_base 6: mod_base = OTHER; note = 2'-O-methyluridine-3'-phosphate
  modified_base 7: mod_base = OTHER; note = 2'-fluorocytidine-3'-phosphate
  modified_base 8: mod_base = OTHER; note = 2'-O-methylcytidine-3'-phosphate
  modified_base 9: mod_base = OTHER; note = 2'-fluorouridine-3'-phosphate
  modified_base 10: mod_base = OTHER; note = 2'-fluoroguanosine-3'-phosphate
  modified_base 11: mod_base = OTHER; note = 2'-fluoroguanosine-3'-phosphate
  modified_base 12: mod_base = OTHER; note = 2'-O-methylguanosine-3'-phosphate
  modified_base 13: mod_base = OTHER; note = 2'-O-methyluridine-3'-phosphate
  modified_base 14: mod_base = OTHER; note = 2'-O-methylguanosine-3'-phosphate
  modified_base 15: mod_base = OTHER; note = 2'-O-methyluridine-3'-phosphate
  modified_base 16: mod_base = OTHER; note = 2'-O-methyluridine-3'-phosphate
  modified_base 17: mod_base = OTHER; note = 2'-O-methylcytidine-3'-phosphate
  modified_base 18: mod_base = OTHER; note = 2'-O-methylcytidine-3'-phosphate
  modified_base 19: mod_base = OTHER; note = 2'-O-methyluridine-3'-phosphate
  modified_base 20: mod_base = OTHER; note = 2'-O-methyluridine-3'-phosphate
  modified_base 21: mod_base = OTHER; note = 2'-O-methyluridine-3'-phosphate N-[tris(GalNAc-alkyl)-amidodecanoyl)]-4-hydroxyprolinol (Hyp-(GalNAc-alkyl)3)
ggcaatcctgggtgttccttt

SEQ ID NO: 668 - RNA, 21 nt, synthetic construct
  source 1..21: mol_type = other RNA
  modified_base 1: mod_base = OTHER; note = 2'-O-methylguanosine-3'-phosphorothioate
  modified_base 2: mod_base = OTHER; note = 2'-O-methylcytidine-3'-phosphorothioate
  modified_base 3: mod_base = OTHER; note = 2'-O-methyladenosine-3'-phosphate
  modified_base 4: mod_base = OTHER; note = 2'-O-methyladenosine-3'-phosphate
  modified_base 5: mod_base = OTHER; note = 2'-O-methyluridine-3'-phosphate
  modified_base 6: mod_base = OTHER; note = 2'-O-methylcytidine-3'-phosphate
  modified_base 7: mod_base = OTHER; note = 2'-fluorocytidine-3'-phosphate
  modified_base 8: mod_base = OTHER; note = 2'-O-methyluridine-3'-phosphate
  modified_base 9: mod_base = OTHER; note = 2'-fluoroguanosine-3'-phosphate
  modified_base 10: mod_base = OTHER; note = 2'-fluoroguanosine-3'-phosphate
  modified_base 11: mod_base = OTHER; note = 2'-fluoroguanosine-3'-phosphate
  modified_base 12: mod_base = OTHER; note = 2'-O-methyluridine-3'-phosphate
  modified_base 13: mod_base = OTHER; note = 2'-O-methylguanosine-3'-phosphate
  modified_base 14: mod_base = OTHER; note = 2'-O-methyluridine-3'-phosphate
  modified_base 15: mod_base = OTHER; note = 2'-O-methyluridine-3'-phosphate
  modified_base 16: mod_base = OTHER; note = 2'-O-methylcytidine-3'-phosphate
  modified_base 17: mod_base = OTHER; note = 2'-O-methylcytidine-3'-phosphate
  modified_base 18: mod_base = OTHER; note = 2'-O-methyluridine-3'-phosphate
  modified_base 19: mod_base = OTHER; note = 2'-O-methyluridine-3'-phosphate
  modified_base 20: mod_base = OTHER; note = 2'-O-methylguanosine-3'-phosphate
  modified_base 21: mod_base = OTHER; note = 2'-O-methyluridine-3'-phosphate N-[tris(GalNAc-alkyl)-amidodecanoyl)]-4-hydroxyprolinol (Hyp-(GalNAc-alkyl)3)
gcaatcctgggtgttccttgt

SEQ ID NO: 669 - RNA, 21 nt, synthetic construct
  source 1..21: mol_type = other RNA
  modified_base 1: mod_base = OTHER; note = 2'-O-methyladenosine-3'-phosphorothioate
  modified_base 2: mod_base = OTHER; note = 2'-O-methyladenosine-3'-phosphorothioate
  modified_base 3: mod_base = OTHER; note = 2'-O-methyluridine-3'-phosphate
  modified_base 4: mod_base = OTHER; note = 2'-O-methylcytidine-3'-phosphate
  modified_base 5: mod_base = OTHER; note = 2'-O-methylcytidine-3'-phosphate
  modified_base 6: mod_base = OTHER; note = 2'-O-methyluridine-3'-phosphate
  modified_base 7: mod_base = OTHER; note = 2'-fluoroguanosine-3'-phosphate
  modified_base 8: mod_base = OTHER; note = 2'-O-methylguanosine-3'-phosphate
  modified_base 9: mod_base = OTHER; note = 2'-fluoroguanosine-3'-phosphate
  modified_base 10: mod_base = OTHER; note = 2'-fluorouridine-3'-phosphate
  modified_base 11: mod_base = OTHER; note = 2'-fluoroguanosine-3'-phosphate
  modified_base 12: mod_base = OTHER; note = 2'-O-methyluridine-3'-phosphate
  modified_base 13: mod_base = OTHER; note = 2'-O-methyluridine-3'-phosphate
  modified_base 14: mod_base = OTHER; note = 2'-O-methylcytidine-3'-phosphate
  modified_base 15: mod_base = OTHER; note = 2'-O-methylcytidine-3'-phosphate
  modified_base 16: mod_base = OTHER; note = 2'-O-methyluridine-3'-phosphate
  modified_base 17: mod_base = OTHER; note = 2'-O-methyluridine-3'-phosphate
  modified_base 18: mod_base = OTHER; note = 2'-O-methylguanosine-3'-phosphate
  modified_base 19: mod_base = OTHER; note = 2'-O-methylguanosine-3'-phosphate
  modified_base 20: mod_base = OTHER; note = 2'-O-methyladenosine-3'-phosphate
  modified_base 21: mod_base = OTHER; note = 2'-O-methyluridine-3'-phosphate N-[tris(GalNAc-alkyl)-amidodecanoyl)]-4-hydroxyprolinol (Hyp-(GalNAc-alkyl)3)
aatcctgggtgttccttggat

SEQ ID NO: 670 - RNA, 21 nt, synthetic construct
  source 1..21: mol_type = other RNA
  modified_base 1: mod_base = OTHER; note = 2'-O-methyluridine-3'-phosphorothioate
  modified_base 2: mod_base = OTHER; note = 2'-O-methylcytidine-3'-phosphorothioate
  modified_base 3: mod_base = OTHER; note = 2'-O-methylcytidine-3'-phosphate
  modified_base 4: mod_base = OTHER; note = 2'-O-methyluridine-3'-phosphate
  modified_base 5: mod_base = OTHER; note = 2'-O-methylguanosine-3'-phosphate
  modified_base 6: mod_base = OTHER; note = 2'-O-methylguanosine-3'-phosphate
  modified_base 7: mod_base = OTHER; note = 2'-fluoroguanosine-3'-phosphate
  modified_base 8: mod_base = OTHER; note = 2'-O-methyluridine-3'-phosphate
  modified_base 9: mod_base = OTHER; note = 2'-fluoroguanosine-3'-phosphate
  modified_base 10: mod_base = OTHER; note = 2'-fluorouridine-3'-phosphate
  modified_base 11: mod_base = OTHER; note = 2'-fluorouridine-3'-phosphate
  modified_base 12: mod_base = OTHER; note = 2'-O-methylcytidine-3'-phosphate
  modified_base 13: mod_base = OTHER; note = 2'-O-methylcytidine-3'-phosphate
  modified_base 14: mod_base = OTHER; note = 2'-O-methyluridine-3'-phosphate
  modified_base 15: mod_base = OTHER; note = 2'-O-methyluridine-3'-phosphate
  modified_base 16: mod_base = OTHER; note = 2'-O-methylguanosine-3'-phosphate
  modified_base 17: mod_base = OTHER; note = 2'-O-methylguanosine-3'-phosphate
  modified_base 18: mod_base = OTHER; note = 2'-O-methyladenosine-3'-phosphate
  modified_base 19: mod_base = OTHER; note = 2'-O-methyladenosine-3'-phosphate
  modified_base 20: mod_base = OTHER; note = 2'-O-methylguanosine-3'-phosphate
  modified_base 21: mod_base = OTHER; note = 2'-O-methyluridine-3'-phosphate N-[tris(GalNAc-alkyl)-amidodecanoyl)]-4-hydroxyprolinol (Hyp-(GalNAc-alkyl)3)
tcctgggtgttccttggaagt

SEQ ID NO: 671 - RNA, 21 nt, synthetic construct
  source 1..21: mol_type = other RNA
  modified_base 1: mod_base = OTHER; note = 2'-O-methylcytidine-3'-phosphorothioate
  modified_base 2: mod_base = OTHER; note = 2'-O-methylcytidine-3'-phosphorothioate
  modified_base 3: mod_base = OTHER; note = 2'-O-methyluridine-3'-phosphate
  modified_base 4: mod_base = OTHER; note = 2'-O-methyluridine-3'-phosphate
  modified_base 5: mod_base = OTHER; note = 2'-O-methylguanosine-3'-phosphate
  modified_base 6: mod_base = OTHER; note = 2'-O-methylguanosine-3'-phosphate
  modified_base 7: mod_base = OTHER; note = 2'-fluoroadenosine-3'-phosphate
  modified_base 8: mod_base = OTHER; note = 2'-O-methyladenosine-3'-phosphate
  modified_base 9: mod_base = OTHER; note = 2'-fluoroguanosine-3'-phosphate
  modified_base 10: mod_base = OTHER; note = 2'-fluoroguanosine-3'-phosphate
  modified_base 11: mod_base = OTHER; note = 2'-fluoroadenosine-3'-phosphate
  modified_base 12: mod_base = OTHER; note = 2'-O-methylcytidine-3'-phosphate
  modified_base 13: mod_base = OTHER; note = 2'-O-methyladenosine-3'-phosphate
  modified_base 14: mod_base = OTHER; note = 2'-O-methyladenosine-3'-phosphate
  modified_base 15: mod_base = OTHER; note = 2'-O-methylguanosine-3'-phosphate
  modified_base 16: mod_base = OTHER; note = 2'-O-methyladenosine-3'-phosphate
  modified_base 17: mod_base = OTHER; note = 2'-O-methyladenosine-3'-phosphate
  modified_base 18: mod_base = OTHER; note = 2'-O-methylcytidine-3'-phosphate
  modified_base 19: mod_base = OTHER; note = 2'-O-methyluridine-3'-phosphate
  modified_base 20: mod_base = OTHER; note = 2'-O-methylguanosine-3'-phosphate
  modified_base 21: mod_base = OTHER; note = 2'-O-methyluridine-3'-phosphate N-[tris(GalNAc-alkyl)-amidodecanoyl)]-4-hydroxyprolinol (Hyp-(GalNAc-alkyl)3)
ccttggaaggacaagaactgt

SEQ ID NO: 672 - RNA, 21 nt, synthetic construct
  source 1..21: mol_type = other RNA
  modified_base 1: mod_base = OTHER; note = 2'-O-methylcytidine-3'-phosphorothioate
  modified_base 2: mod_base = OTHER; note = 2'-O-methyladenosine-3'-phosphorothioate
  modified_base 3: mod_base = OTHER; note = 2'-O-methylcytidine-3'-phosphate
  modified_base 4: mod_base = OTHER; note = 2'-O-methylcytidine-3'-phosphate
  modified_base 5: mod_base = OTHER; note = 2'-O-methyluridine-3'-phosphate
  modified_base 6: mod_base = OTHER; note = 2'-O-methylguanosine-3'-phosphate
  modified_base 7: mod_base = OTHER; note = 2'-fluoroadenosine-3'-phosphate
  modified_base 8: mod_base = OTHER; note = 2'-O-methyladenosine-3'-phosphate
  modified_base 9: mod_base = OTHER; note = 2'-fluoroguanosine-3'-phosphate
  modified_base 10: mod_base = OTHER; note = 2'-fluorocytidine-3'-phosphate
  modified_base 11: mod_base = OTHER; note = 2'-fluoroadenosine-3'-phosphate
  modified_base 12: mod_base = OTHER; note = 2'-O-methylguanosine-3'-phosphate
  modified_base 13: mod_base = OTHER; note = 2'-O-methylcytidine-3'-phosphate
  modified_base 14: mod_base = OTHER; note = 2'-O-methylcytidine-3'-phosphate
  modified_base 15: mod_base = OTHER; note = 2'-O-methylguanosine-3'-phosphate
  modified_base 16: mod_base = OTHER; note = 2'-O-methyluridine-3'-phosphate
  modified_base 17: mod_base = OTHER; note = 2'-O-methyluridine-3'-phosphate
  modified_base 18: mod_base = OTHER; note = 2'-O-methyluridine-3'-phosphate
  modified_base 19: mod_base = OTHER; note = 2'-O-methylguanosine-3'-phosphate
  modified_base 20: mod_base = OTHER; note = 2'-O-methyluridine-3'-phosphate
  modified_base 21: mod_base = OTHER; note = 2'-O-methyluridine-3'-phosphate N-[tris(GalNAc-alkyl)-amidodecanoyl)]-4-hydroxyprolinol (Hyp-(GalNAc-alkyl)3)
cacctgaagcagccgtttgtt

SEQ ID NO: 673 - RNA, 21 nt, synthetic construct
  source 1..21: mol_type = other RNA
  modified_base 1: mod_base = OTHER; note = 2'-O-methylcytidine-3'-phosphorothioate
  modified_base 2: mod_base = OTHER; note = 2'-O-methyluridine-3'-phosphorothioate
  modified_base 3: mod_base = OTHER; note = 2'-O-methylcytidine-3'-phosphate
  modified_base 4: mod_base = OTHER; note = 2'-O-methyluridine-3'-phosphate
  modified_base 5: mod_base = OTHER; note = 2'-O-methylguanosine-3'-phosphate
  modified_base 6: mod_base = OTHER; note = 2'-O-methylguanosine-3'-phosphate
  modified_base 7: mod_base = OTHER; note = 2'-fluoroadenosine-3'-phosphate
  modified_base 8: mod_base = OTHER; note = 2'-O-methylcytidine-3'-phosphate
  modified_base 9: mod_base = OTHER; note = 2'-fluorouridine-3'-phosphate
  modified_base 10: mod_base = OTHER; note = 2'-fluorouridine-3'-phosphate
  modified_base 11: mod_base = OTHER; note = 2'-fluorocytidine-3'-phosphate
  modified_base 12: mod_base = OTHER; note = 2'-O-methyladenosine-3'-phosphate
  modified_base 13: mod_base = OTHER; note = 2'-O-methylcytidine-3'-phosphate
  modified_base 14: mod_base = OTHER; note = 2'-O-methyladenosine-3'-phosphate
  modified_base 15: mod_base = OTHER; note = 2'-O-methylguanosine-3'-phosphate
  modified_base 16: mod_base = OTHER; note = 2'-O-methyladenosine-3'-phosphate
  modified_base 17: mod_base = OTHER; note = 2'-O-methyladenosine-3'-phosphate
  modified_base 18: mod_base = OTHER; note = 2'-O-methylcytidine-3'-phosphate
  modified_base 19: mod_base = OTHER; note = 2'-O-methyluridine-3'-phosphate
  modified_base 20: mod_base = OTHER; note = 2'-O-methylguanosine-3'-phosphate
  modified_base 21: mod_base = OTHER; note = 2'-O-methyluridine-3'-phosphate N-[tris(GalNAc-alkyl)-amidodecanoyl)]-4-hydroxyprolinol (Hyp-(GalNAc-alkyl)3)
ctctggacttcacagaactgt

SEQ ID NO: 674 - RNA, 21 nt, synthetic construct
  source 1..21: mol_type = other RNA
  modified_base 1: mod_base = OTHER; note = 2'-O-methyluridine-3'-phosphorothioate
  modified_base 2: mod_base = OTHER; note = 2'-O-methylcytidine-3'-phosphorothioate
  modified_base 3: mod_base = OTHER; note = 2'-O-methyluridine-3'-phosphate
  modified_base 4: mod_base = OTHER; note = 2'-O-methylguanosine-3'-phosphate
  modified_base 5: mod_base = OTHER; note = 2'-O-methylguanosine-3'-phosphate
  modified_base 6: mod_base = OTHER; note = 2'-O-methyladenosine-3'-phosphate
  modified_base 7: mod_base = OTHER; note = 2'-fluorocytidine-3'-phosphate
  modified_base 8: mod_base = OTHER; note = 2'-O-methyluridine-3'-phosphate
  modified_base 9: mod_base = OTHER; note = 2'-fluorouridine-3'-phosphate
  modified_base 10: mod_base = OTHER; note = 2'-fluorocytidine-3'-phosphate
  modified_base 11: mod_base = OTHER; note = 2'-fluoroadenosine-3'-phosphate
  modified_base 12: mod_base = OTHER; note = 2'-O-methylcytidine-3'-phosphate
  modified_base 13: mod_base = OTHER; note = 2'-O-methyladenosine-3'-phosphate
  modified_base 14: mod_base = OTHER; note = 2'-O-methylguanosine-3'-phosphate
  modified_base 15: mod_base = OTHER; note = 2'-O-methyladenosine-3'-phosphate
  modified_base 16: mod_base = OTHER; note = 2'-O-methyladenosine-3'-phosphate
  modified_base 17: mod_base = OTHER; note = 2'-O-methylcytidine-3'-phosphate
  modified_base 18: mod_base = OTHER; note = 2'-O-methyluridine-3'-phosphate
  modified_base 19: mod_base = OTHER; note = 2'-O-methylguanosine-3'-phosphate
  modified_base 20: mod_base = OTHER; note = 2'-O-methylguanosine-3'-phosphate
  modified_base 21: mod_base = OTHER; note = 2'-O-methyluridine-3'-phosphate N-[tris(GalNAc-alkyl)-amidodecanoyl)]-4-hydroxyprolinol (Hyp-(GalNAc-alkyl)3)
tctggacttcacagaactggt

SEQ ID NO: 675 - RNA, 21 nt, synthetic construct
  source 1..21: mol_type = other RNA
  modified_base 1: mod_base = OTHER; note = 2'-O-methylguanosine-3'-phosphorothioate
  modified_base 2: mod_base = OTHER; note = 2'-O-methylguanosine-3'-phosphorothioate
  modified_base 3: mod_base = OTHER; note = 2'-O-methyladenosine-3'-phosphate
  modified_base 4: mod_base = OTHER; note = 2'-O-methylcytidine-3'-phosphate
  modified_base 5: mod_base = OTHER; note = 2'-O-methyluridine-3'-phosphate
  modified_base 6: mod_base = OTHER; note = 2'-O-methyluridine-3'-phosphate
  modified_base 7: mod_base = OTHER; note = 2'-fluorocytidine-3'-phosphate
  modified_base 8: mod_base = OTHER; note = 2'-O-methyladenosine-3'-phosphate
  modified_base 9: mod_base = OTHER; note = 2'-fluorocytidine-3'-phosphate
  modified_base 10: mod_base = OTHER; note = 2'-fluoroadenosine-3'-phosphate
  modified_base 11: mod_base = OTHER; note = 2'-fluoroguanosine-3'-phosphate
  modified_base 12: mod_base = OTHER; note = 2'-O-methyladenosine-3'-phosphate
  modified_base 13: mod_base = OTHER; note = 2'-O-methyladenosine-3'-phosphate
  modified_base 14: mod_base = OTHER; note = 2'-O-methylcytidine-3'-phosphate
  modified_base 15: mod_base = OTHER; note = 2'-O-methyluridine-3'-phosphate
  modified_base 16: mod_base = OTHER; note = 2'-O-methylguanosine-3'-phosphate
  modified_base 17: mod_base = OTHER; note = 2'-O-methylguanosine-3'-phosphate
  modified_base 18: mod_base = OTHER; note = 2'-O-methyladenosine-3'-phosphate
  modified_base 19: mod_base = OTHER; note = 2'-O-methyluridine-3'-phosphate
  modified_base 20: mod_base = OTHER; note = 2'-O-methylguanosine-3'-phosphate
  modified_base 21: mod_base = OTHER; note = 2'-O-methyluridine-3'-phosphate N-[tris(GalNAc-alkyl)-amidodecanoyl)]-4-hydroxyprolinol (Hyp-(GalNAc-alkyl)3)
ggacttcacagaactggatgt

SEQ ID NO: 676 - RNA, 21 nt, synthetic construct
  source 1..21: mol_type = other RNA
  modified_base 1: mod_base = OTHER; note = 2'-O-methyladenosine-3'-phosphorothioate
  modified_base 2: mod_base = OTHER; note = 2'-O-methylcytidine-3'-phosphorothioate
  modified_base 3: mod_base = OTHER; note = 2'-O-methyluridine-3'-phosphate
  modified_base 4: mod_base = OTHER; note = 2'-O-methyluridine-3'-phosphate
  modified_base 5: mod_base = OTHER; note = 2'-O-methylcytidine-3'-phosphate
  modified_base 6: mod_base = OTHER; note = 2'-O-methyladenosine-3'-phosphate
  modified_base 7: mod_base = OTHER; note = 2'-fluorocytidine-3'-phosphate
  modified_base 8: mod_base = OTHER; note = 2'-O-methyladenosine-3'-phosphate
  modified_base 9: mod_base = OTHER; note = 2'-fluoroguanosine-3'-phosphate
  modified_base 10: mod_base = OTHER; note = 2'-fluoroadenosine-3'-phosphate
  modified_base 11: mod_base = OTHER; note = 2'-fluoroadenosine-3'-phosphate
  modified_base 12: mod_base = OTHER; note = 2'-O-methylcytidine-3'-phosphate
  modified_base 13: mod_base = OTHER; note = 2'-O-methyluridine-3'-phosphate
  modified_base 14: mod_base = OTHER; note = 2'-O-methylguanosine-3'-phosphate
  modified_base 15: mod_base = OTHER; note = 2'-O-methylguanosine-3'-phosphate
  modified_base 16: mod_base = OTHER; note = 2'-O-methyladenosine-3'-phosphate
  modified_base 17: mod_base = OTHER; note = 2'-O-methyluridine-3'-phosphate
  modified_base 18: mod_base = OTHER; note = 2'-O-methylguanosine-3'-phosphate
  modified_base 19: mod_base = OTHER; note = 2'-O-methyluridine-3'-phosphate
  modified_base 20: mod_base = OTHER; note = 2'-O-methyluridine-3'-phosphate
  modified_base 21: mod_base = OTHER; note = 2'-O-methyluridine-3'-phosphate N-[tris(GalNAc-alkyl)-amidodecanoyl)]-4-hydroxyprolinol (Hyp-(GalNAc-alkyl)3)
acttcacagaactggatgttt

SEQ ID NO: 677 - RNA, 21 nt, synthetic construct
  source 1..21: mol_type = other RNA
  modified_base 1: mod_base = OTHER; note = 2'-O-methylcytidine-3'-phosphorothioate
  modified_base 2: mod_base = OTHER; note = 2'-O-methyluridine-3'-phosphorothioate
  modified_base 3: mod_base = OTHER; note = 2'-O-methyluridine-3'-phosphate
  modified_base 4: mod_base = OTHER; note = 2'-O-methylcytidine-3'-phosphate
  modified_base 5: mod_base = OTHER; note = 2'-O-methyladenosine-3'-phosphate
  modified_base 6: mod_base = OTHER; note = 2'-O-methylcytidine-3'-phosphate
  modified_base 7: mod_base = OTHER; note = 2'-fluoroadenosine-3'-phosphate
  modified_base 8: mod_base = OTHER; note = 2'-O-methylguanosine-3'-phosphate
  modified_base 9: mod_base = OTHER; note = 2'-fluoroadenosine-3'-phosphate
  modified_base 10: mod_base = OTHER; note = 2'-fluoroadenosine-3'-phosphate
  modified_base 11: mod_base = OTHER; note = 2'-fluorocytidine-3'-phosphate
  modified_base 12: mod_base = OTHER; note = 2'-O-methyluridine-3'-phosphate
  modified_base 13: mod_base = OTHER; note = 2'-O-methylguanosine-3'-phosphate
  modified_base 14: mod_base = OTHER; note = 2'-O-methylguanosine-3'-phosphate
  modified_base 15: mod_base = OTHER; note = 2'-O-methyladenosine-3'-phosphate
  modified_base 16: mod_base = OTHER; note = 2'-O-methyluridine-3'-phosphate
  modified_base 17: mod_base = OTHER; note = 2'-O-methylguanosine-3'-phosphate
  modified_base 18: mod_base = OTHER; note = 2'-O-methyluridine-3'-phosphate
  modified_base 19: mod_base = OTHER; note = 2'-O-methyluridine-3'-phosphate
  modified_base 20: mod_base = OTHER; note = 2'-O-methylguanosine-3'-phosphate
  modified_base 21: mod_base = OTHER; note = 2'-O-methyluridine-3'-phosphate N-[tris(GalNAc-alkyl)-amidodecanoyl)]-4-hydroxyprolinol (Hyp-(GalNAc-alkyl)3)
cttcacagaactggatgttgt

SEQ ID NO: 678 - RNA, 21 nt, synthetic construct
  source 1..21: mol_type = other RNA
  modified_base 1: mod_base = OTHER; note = 2'-O-methylcytidine-3'-phosphorothioate
  modified_base 2: mod_base = OTHER; note = 2'-O-methyladenosine-3'-phosphorothioate
  modified_base 3: mod_base = OTHER; note = 2'-O-methylcytidine-3'-phosphate
  modified_base 4: mod_base = OTHER; note = 2'-O-methyladenosine-3'-phosphate
  modified_base 5: mod_base = OTHER; note = 2'-O-methylguanosine-3'-phosphate
  modified_base 6: mod_base = OTHER; note = 2'-O-methyladenosine-3'-phosphate
  modified_base 7: mod_base = OTHER; note = 2'-fluoroadenosine-3'-phosphate
  modified_base 8: mod_base = OTHER; note = 2'-O-methylcytidine-3'-phosphate
  modified_base 9: mod_base = OTHER; note = 2'-fluorouridine-3'-phosphate
  modified_base 10: mod_base = OTHER; note = 2'-fluoroguanosine-3'-phosphate
  modified_base 11: mod_base = OTHER; note = 2'-fluoroguanosine-3'-phosphate
  modified_base 12: mod_base = OTHER; note = 2'-O-methyladenosine-3'-phosphate
  modified_base 13: mod_base = OTHER; note = 2'-O-methyluridine-3'-phosphate
  modified_base 14: mod_base = OTHER; note = 2'-O-methylguanosine-3'-phosphate
  modified_base 15: mod_base = OTHER; note = 2'-O-methyluridine-3'-phosphate
  modified_base 16: mod_base = OTHER; note = 2'-O-methyluridine-3'-phosphate
  modified_base 17: mod_base = OTHER; note = 2'-O-methylguanosine-3'-phosphate
  modified_base 18: mod_base = OTHER; note = 2'-O-methylcytidine-3'-phosphate
  modified_base 19: mod_base = OTHER; note = 2'-O-methyluridine-3'-phosphate
  modified_base 20: mod_base = OTHER; note = 2'-O-methylguanosine-3'-phosphate
  modified_base 21: mod_base = OTHER; note = 2'-O-methyluridine-3'-phosphate N-[tris(GalNAc-alkyl)-amidodecanoyl)]-4-hydroxyprolinol (Hyp-(GalNAc-alkyl)3)
cacagaactggatgttgctgt

SEQ ID NO: 679 - RNA, 21 nt, synthetic construct
  source 1..21: mol_type = other RNA
  modified_base 1: mod_base = OTHER; note = 2'-O-methyladenosine-3'-phosphorothioate
  modified_base 2: mod_base = OTHER; note = 2'-O-methylcytidine-3'-phosphorothioate
  modified_base 3: mod_base = OTHER; note = 2'-O-methyladenosine-3'-phosphate
  modified_base 4: mod_base = OTHER; note = 2'-O-methylguanosine-3'-phosphate
  modified_base 5: mod_base = OTHER; note = 2'-O-methyladenosine-3'-phosphate
  modified_base 6: mod_base = OTHER; note = 2'-O-methyladenosine-3'-phosphate
  modified_base 7: mod_base = OTHER; note = 2'-fluorocytidine-3'-phosphate
  modified_base 8: mod_base = OTHER; note = 2'-O-methyluridine-3'-phosphate
  modified_base 9: mod_base = OTHER; note = 2'-fluoroguanosine-3'-phosphate
  modified_base 10: mod_base = OTHER; note = 2'-fluoroguanosine-3'-phosphate
  modified_base 11: mod_base = OTHER; note = 2'-fluoroadenosine-3'-phosphate
  modified_base 12: mod_base = OTHER; note = 2'-O-methyluridine-3'-phosphate
  modified_base 13: mod_base = OTHER; note = 2'-O-methylguanosine-3'-phosphate
  modified_base 14: mod_base = OTHER; note = 2'-O-methyluridine-3'-phosphate
  modified_base 15: mod_base = OTHER; note = 2'-O-methyluridine-3'-phosphate
  modified_base 16: mod_base = OTHER; note = 2'-O-methylguanosine-3'-phosphate
  modified_base 17: mod_base = OTHER; note = 2'-O-methylcytidine-3'-phosphate
  modified_base 18: mod_base = OTHER; note = 2'-O-methyluridine-3'-phosphate
  modified_base 19: mod_base = OTHER; note = 2'-O-methylguanosine-3'-phosphate
  modified_base 20: mod_base = OTHER; note = 2'-O-methylcytidine-3'-phosphate
  modified_base 21: mod_base = OTHER; note = 2'-O-methyluridine-3'-phosphate N-[tris(GalNAc-alkyl)-amidodecanoyl)]-4-hydroxyprolinol (Hyp-(GalNAc-alkyl)3)
acagaactggatgttgctgct

SEQ ID NO: 680 - RNA, 21 nt, synthetic construct
  source 1..21: mol_type = other RNA
  modified_base 1: mod_base = OTHER; note = 2'-O-methyluridine-3'-phosphorothioate
  modified_base 2: mod_base = OTHER; note = 2'-O-methylguanosine-3'-phosphorothioate
  modified_base 3: mod_base = OTHER; note = 2'-O-methyluridine-3'-phosphate
  modified_base 4: mod_base = OTHER; note = 2'-O-methyluridine-3'-phosphate
  modified_base 5: mod_base = OTHER; note = 2'-O-methylguanosine-3'-phosphate
  modified_base 6: mod_base = OTHER; note = 2'-O-methylcytidine-3'-phosphate
  modified_base 7: mod_base = OTHER; note = 2'-fluorouridine-3'-phosphate
  modified_base 8: mod_base = OTHER; note = 2'-O-methylguanosine-3'-phosphate
  modified_base 9: mod_base = OTHER; note = 2'-fluorocytidine-3'-phosphate
  modified_base 10: mod_base = OTHER; note = 2'-fluorouridine-3'-phosphate
  modified_base 11: mod_base = OTHER; note = 2'-fluoroguanosine-3'-phosphate
  modified_base 12: mod_base = OTHER; note = 2'-O-methyladenosine-3'-phosphate
  modified_base 13: mod_base = OTHER; note = 2'-O-methylguanosine-3'-phosphate
  modified_base 14: mod_base = OTHER; note = 2'-O-methyladenosine-3'-phosphate
  modified_base 15: mod_base = OTHER; note = 2'-O-methyladenosine-3'-phosphate
  modified_base 16: mod_base = OTHER; note = 2'-O-methylguanosine-3'-phosphate
  modified_base 17: mod_base = OTHER; note = 2'-O-methyladenosine-3'-phosphate
  modified_base 18: mod_base = OTHER; note = 2'-O-methyluridine-3'-phosphate
  modified_base 19: mod_base = OTHER; note = 2'-O-methyluridine-3'-phosphate
  modified_base 20: mod_base = OTHER; note = 2'-O-methylguanosine-3'-phosphate
  modified_base 21: mod_base = OTHER; note = 2'-O-methyluridine-3'-phosphate N-[tris(GalNAc-alkyl)-amidodecanoyl)]-4-hydroxyprolinol (Hyp-(GalNAc-alkyl)3)
tgttgctgctgagaagattgt

SEQ ID NO: 681 - RNA, 21 nt, synthetic construct
  source 1..21: mol_type = other RNA
  modified_base 1: mod_base = OTHER; note = 2'-O-methyluridine-3'-phosphorothioate
  modified_base 2: mod_base = OTHER; note = 2'-O-methyluridine-3'-phosphorothioate
  modified_base 3: mod_base = OTHER; note = 2'-O-methylguanosine-3'-phosphate
  modified_base 4: mod_base = OTHER; note = 2'-O-methylcytidine-3'-phosphate
  modified_base 5: mod_base = OTHER; note = 2'-O-methyluridine-3'-phosphate
  modified_base 6: mod_base = OTHER; note = 2'-O-methylguanosine-3'-phosphate
  modified_base 7: mod_base = OTHER; note = 2'-fluorocytidine-3'-phosphate
  modified_base 8: mod_base = OTHER; note = 2'-O-methyluridine-3'-phosphate
  modified_base 9: mod_base = OTHER; note = 2'-fluoroguanosine-3'-phosphate
  modified_base 10: mod_base = OTHER; note = 2'-fluoroadenosine-3'-phosphate
  modified_base 11: mod_base = OTHER; note = 2'-fluoroguanosine-3'-phosphate
  modified_base 12: mod_base = OTHER; note = 2'-O-methyladenosine-3'-phosphate
  modified_base 13: mod_base = OTHER; note = 2'-O-methyladenosine-3'-phosphate
  modified_base 14: mod_base = OTHER; note = 2'-O-methylguanosine-3'-phosphate
  modified_base 15: mod_base = OTHER; note = 2'-O-methyladenosine-3'-phosphate
  modified_base 16: mod_base = OTHER; note = 2'-O-methyluridine-3'-phosphate
  modified_base 17: mod_base = OTHER; note = 2'-O-methyluridine-3'-phosphate
  modified_base 18: mod_base = OTHER; note = 2'-O-methylguanosine-3'-phosphate
  modified_base 19: mod_base = OTHER; note = 2'-O-methyladenosine-3'-phosphate
  modified_base 20: mod_base = OTHER; note = 2'-O-methylcytidine-3'-phosphate
  modified_base 21: mod_base = OTHER; note = 2'-O-methyluridine-3'-phosphate N-[tris(GalNAc-alkyl)-amidodecanoyl)]-4-hydroxyprolinol (Hyp-(GalNAc-alkyl)3)
ttgctgctgagaagattgact

SEQ ID NO: 682 - RNA, 21 nt, synthetic construct
  source 1..21: mol_type = other RNA
  modified_base 1: mod_base = OTHER; note = 2'-O-methylguanosine-3'-phosphorothioate
  modified_base 2: mod_base = OTHER; note = 2'-O-methylcytidine-3'-phosphorothioate
  modified_base 3: mod_base = OTHER; note = 2'-O-methyluridine-3'-phosphate
  modified_base 4: mod_base = OTHER; note = 2'-O-methylguanosine-3'-phosphate
  modified_base 5: mod_base = OTHER; note = 2'-O-methylcytidine-3'-phosphate
  modified_base 6: mod_base = OTHER; note = 2'-O-methyluridine-3'-phosphate
  modified_base 7: mod_base = OTHER; note = 2'-fluoroguanosine-3'-phosphate
  modified_base 8: mod_base = OTHER; note = 2'-O-methyladenosine-3'-phosphate
  modified_base 9: mod_base = OTHER; note = 2'-fluoroguanosine-3'-phosphate
  modified_base 10: mod_base = OTHER; note = 2'-fluoroadenosine-3'-phosphate
  modified_base 11: mod_base = OTHER; note = 2'-fluoroadenosine-3'-phosphate
  modified_base 12: mod_base = OTHER; note = 2'-O-methylguanosine-3'-phosphate
  modified_base 13: mod_base = OTHER; note = 2'-O-methyladenosine-3'-phosphate
  modified_base 14: mod_base = OTHER; note = 2'-O-methyluridine-3'-phosphate
  modified_base 15: mod_base = OTHER; note = 2'-O-methyluridine-3'-phosphate
  modified_base 16: mod_base = OTHER; note = 2'-O-methylguanosine-3'-phosphate
  modified_base 17: mod_base = OTHER; note = 2'-O-methyladenosine-3'-phosphate
  modified_base 18: mod_base = OTHER; note = 2'-O-methylcytidine-3'-phosphate
  modified_base 19: mod_base = OTHER; note = 2'-O-methyladenosine-3'-phosphate
  modified_base 20: mod_base = OTHER; note = 2'-O-methylguanosine-3'-phosphate
  modified_base 21: mod_base = OTHER; note = 2'-O-methyluridine-3'-phosphate N-[tris(GalNAc-alkyl)-amidodecanoyl)]-4-hydroxyprolinol (Hyp-(GalNAc-alkyl)3)
gctgctgagaagattgacagt

SEQ ID NO: 683 - RNA, 21 nt, synthetic construct
  source 1..21: mol_type = other RNA
  modified_base 1: mod_base = OTHER; note = 2'-O-methyladenosine-3'-phosphorothioate
  modified_base 2: mod_base = OTHER; note = 2'-O-methylcytidine-3'-phosphorothioate
  modified_base 3: mod_base = OTHER; note = 2'-O-methyladenosine-3'-phosphate
  modified_base 4: mod_base = OTHER; note = 2'-O-methylguanosine-3'-phosphate
  modified_base 5: mod_base = OTHER; note = 2'-O-methylguanosine-3'-phosphate
  modified_base 6: mod_base = OTHER; note = 2'-O-methyluridine-3'-phosphate
  modified_base 7: mod_base = OTHER; note = 2'-fluorouridine-3'-phosphate
  modified_base 8: mod_base = OTHER; note = 2'-O-methylcytidine-3'-phosphate
  modified_base 9: mod_base = OTHER; note = 2'-fluoroadenosine-3'-phosphate
  modified_base 10: mod_base = OTHER; note = 2'-fluorouridine-3'-phosphate
  modified_base 11: mod_base = OTHER; note = 2'-fluoroguanosine-3'-phosphate
  modified_base 12: mod_base = OTHER; note = 2'-O-methylcytidine-3'-phosphate
  modified_base 13: mod_base = OTHER; note = 2'-O-methyladenosine-3'-phosphate
  modified_base 14: mod_base = OTHER; note = 2'-O-methylguanosine-3'-phosphate
  modified_base 15: mod_base = OTHER; note = 2'-O-methylguanosine-3'-phosphate
  modified_base 16: mod_base = OTHER; note = 2'-O-methylcytidine-3'-phosphate
  modified_base 17: mod_base = OTHER; note = 2'-O-methyluridine-3'-phosphate
  modified_base 18: mod_base = OTHER; note = 2'-O-methylguanosine-3'-phosphate
  modified_base 19: mod_base = OTHER; note = 2'-O-methyluridine-3'-phosphate
  modified_base 20: mod_base = OTHER; note = 2'-O-methylguanosine-3'-phosphate
  modified_base 21: mod_base = OTHER; note = 2'-O-methyluridine-3'-phosphate N-[tris(GalNAc-alkyl)-amidodecanoyl)]-4-hydroxyprolinol (Hyp-(GalNAc-alkyl)3)
acaggttcatgcaggctgtgt

SEQ ID NO: 684 - RNA, 21 nt, synthetic construct
  source 1..21: mol_type = other RNA
  modified_base 1: mod_base = OTHER; note = 2'-O-methyladenosine-3'-phosphorothioate
  modified_base 2: mod_base = OTHER; note = 2'-O-methyluridine-3'-phosphorothioate
  modified_base 3: mod_base = OTHER; note = 2'-O-methylguanosine-3'-phosphate
  modified_base 4: mod_base = OTHER; note = 2'-O-methylcytidine-3'-phosphate
  modified_base 5: mod_base = OTHER; note = 2'-O-methyladenosine-3'-phosphate
  modified_base 6: mod_base = OTHER; note = 2'-O-methylguanosine-3'-phosphate
  modified_base 7: mod_base = OTHER; note = 2'-fluoroguanosine-3'-phosphate
  modified_base 8: mod_base = OTHER; note = 2'-O-methylcytidine-3'-phosphate
  modified_base 9: mod_base = OTHER; note = 2'-fluorouridine-3'-phosphate
  modified_base 10: mod_base = OTHER; note = 2'-fluoroguanosine-3'-phosphate
  modified_base 11: mod_base = OTHER; note = 2'-fluorouridine-3'-phosphate
  modified_base 12: mod_base = OTHER; note = 2'-O-methylguanosine-3'-phosphate
  modified_base 13: mod_base = OTHER; note = 2'-O-methyladenosine-3'-phosphate
  modified_base 14: mod_base = OTHER; note = 2'-O-methylcytidine-3'-phosphate
  modified_base 15: mod_base = OTHER; note = 2'-O-methyladenosine-3'-phosphate
  modified_base 16: mod_base = OTHER; note = 2'-O-methylguanosine-3'-phosphate
  modified_base 17: mod_base = OTHER; note = 2'-O-methylguanosine-3'-phosphate
  modified_base 18: mod_base = OTHER; note = 2'-O-methyladenosine-3'-phosphate
  modified_base 19: mod_base = OTHER; note = 2'-O-methyluridine-3'-phosphate
  modified_base 20: mod_base = OTHER; note = 2'-O-methylguanosine-3'-phosphate
  modified_base 21: mod_base = OTHER; note = 2'-O-methyluridine-3'-phosphate N-[tris(GalNAc-alkyl)-amidodecanoyl)]-4-hydroxyprolinol (Hyp-(GalNAc-alkyl)3)
atgcaggctgtgacaggatgt

SEQ ID NO: 685 - RNA, 21 nt, synthetic construct
  source 1..21: mol_type = other RNA
  modified_base 1: mod_base = OTHER; note = 2'-O-methylguanosine-3'-phosphorothioate
  modified_base 2: mod_base = OTHER; note = 2'-O-methylcytidine-3'-phosphorothioate
  modified_base 3: mod_base = OTHER; note = 2'-O-methyladenosine-3'-phosphate
  modified_base 4: mod_base = OTHER; note = 2'-O-methylguanosine-3'-phosphate
  modified_base 5: mod_base = OTHER; note = 2'-O-methylguanosine-3'-phosphate
  modified_base 6: mod_base = OTHER; note = 2'-O-methylcytidine-3'-phosphate
  modified_base 7: mod_base = OTHER; note = 2'-fluorouridine-3'-phosphate
  modified_base 8: mod_base = OTHER; note = 2'-O-methylguanosine-3'-phosphate
  modified_base 9: mod_base = OTHER; note = 2'-fluorouridine-3'-phosphate
  modified_base 10: mod_base = OTHER; note = 2'-fluoroguanosine-3'-phosphate
  modified_base 11: mod_base = OTHER; note = 2'-fluoroadenosine-3'-phosphate
  modified_base 12: mod_base = OTHER; note = 2'-O-methylcytidine-3'-phosphate
  modified_base 13: mod_base = OTHER; note = 2'-O-methyladenosine-3'-phosphate
  modified_base 14: mod_base = OTHER; note = 2'-O-methylguanosine-3'-phosphate
  modified_base 15: mod_base = OTHER; note = 2'-O-methylguanosine-3'-phosphate
  modified_base 16: mod_base = OTHER; note = 2'-O-methyladenosine-3'-phosphate
  modified_base 17: mod_base = OTHER; note = 2'-O-methyluridine-3'-phosphate
  modified_base 18: mod_base = OTHER; note = 2'-O-methylguanosine-3'-phosphate
  modified_base 19: mod_base = OTHER; note = 2'-O-methylguanosine-3'-phosphate
  modified_base 20: mod_base = OTHER; note = 2'-O-methyladenosine-3'-phosphate
  modified_base 21: mod_base = OTHER; note = 2'-O-methyluridine-3'-phosphate N-[tris(GalNAc-alkyl)-amidodecanoyl)]-4-hydroxyprolinol (Hyp-(GalNAc-alkyl)3)
gcaggctgtgacaggatggat

SEQ ID NO: 686 - RNA, 21 nt, synthetic construct
  source 1..21: mol_type = other RNA
  modified_base 1: mod_base = OTHER; note = 2'-O-methylguanosine-3'-phosphorothioate
  modified_base 2: mod_base = OTHER; note = 2'-O-methyladenosine-3'-phosphorothioate
  modified_base 3: mod_base = OTHER; note = 2'-O-methylcytidine-3'-phosphate
  modified_base 4: mod_base = OTHER; note = 2'-O-methyladenosine-3'-phosphate
  modified_base 5: mod_base = OTHER; note = 2'-O-methylguanosine-3'-phosphate
  modified_base 6: mod_base = OTHER; note = 2'-O-methylcytidine-3'-phosphate
  modified_base 7: mod_base = OTHER; note = 2'-fluoroadenosine-3'-phosphate
  modified_base 8: mod_base = OTHER; note = 2'-O-methylcytidine-3'-phosphate
  modified_base 9: mod_base = OTHER; note = 2'-fluorocytidine-3'-phosphate
  modified_base 10: mod_base = OTHER; note = 2'-fluorocytidine-3'-phosphate
  modified_base 11: mod_base = OTHER; note = 2'-fluorouridine-3'-phosphate
  modified_base 12: mod_base = OTHER; note = 2'-O-methylguanosine-3'-phosphate
  modified_base 13: mod_base = OTHER; note = 2'-O-methylguanosine-3'-phosphate
  modified_base 14: mod_base = OTHER; note = 2'-O-methylcytidine-3'-phosphate
  modified_base 15: mod_base = OTHER; note = 2'-O-methyluridine-3'-phosphate
  modified_base 16: mod_base = OTHER; note = 2'-O-methyluridine-3'-phosphate
  modified_base 17: mod_base = OTHER; note = 2'-O-methyluridine-3'-phosphate
  modified_base 18: mod_base = OTHER; note = 2'-O-methylcytidine-3'-phosphate
  modified_base 19: mod_base = OTHER; note = 2'-O-methyladenosine-3'-phosphate
  modified_base 20: mod_base = OTHER; note = 2'-O-methyladenosine-3'-phosphate
  modified_base 21: mod_base = OTHER; note = 2'-O-methyluridine-3'-phosphate N-[tris(GalNAc-alkyl)-amidodecanoyl)]-4-hydroxyprolinol (Hyp-(GalNAc-alkyl)3)
gacagcaccctggctttcaat

SEQ ID NO: 687 - RNA, 21 nt, synthetic construct
  source 1..21: mol_type = other RNA
  modified_base 1: mod_base = OTHER; note = 2'-O-methylcytidine-3'-phosphorothioate
  modified_base 2: mod_base = OTHER; note = 2'-O-methyluridine-3'-phosphorothioate
  modified_base 3: mod_base = OTHER; note = 2'-O-methylguanosine-3'-phosphate
  modified_base 4: mod_base = OTHER; note = 2'-O-methylguanosine-3'-phosphate
  modified_base 5: mod_base = OTHER; note = 2'-O-methylcytidine-3'-phosphate
  modified_base 6: mod_base = OTHER; note = 2'-O-methyluridine-3'-phosphate
  modified_base 7: mod_base = OTHER; note = 2'-fluorouridine-3'-phosphate
  modified_base 8: mod_base = OTHER; note = 2'-O-methyluridine-3'-phosphate
  modified_base 9: mod_base = OTHER; note = 2'-fluorocytidine-3'-phosphate
  modified_base 10: mod_base = OTHER; note = 2'-fluoroadenosine-3'-phosphate
  modified_base 11: mod_base = OTHER; note = 2'-fluoroadenosine-3'-phosphate
  modified_base 12: mod_base = OTHER; note = 2'-O-methylcytidine-3'-phosphate
  modified_base 13: mod_base = OTHER; note = 2'-O-methyladenosine-3'-phosphate
  modified_base 14: mod_base = OTHER; note = 2'-O-methylcytidine-3'-phosphate
  modified_base 15: mod_base = OTHER; note = 2'-O-methylcytidine-3'-phosphate
  modified_base 16: mod_base = OTHER; note = 2'-O-methyluridine-3'-phosphate
  modified_base 17: mod_base = OTHER; note = 2'-O-methyladenosine-3'-phosphate
  modified_base 18: mod_base = OTHER; note = 2'-O-methylcytidine-3'-phosphate
  modified_base 19: mod_base = OTHER; note = 2'-O-methylguanosine-3'-phosphate
  modified_base 20: mod_base = OTHER; note = 2'-O-methyluridine-3'-phosphate
  modified_base 21: mod_base = OTHER; note = 2'-O-methyluridine-3'-phosphate N-[tris(GalNAc-alkyl)-amidodecanoyl)]-4-hydroxyprolinol (Hyp-(GalNAc-alkyl)3)
ctggctttcaacacctacgtt

SEQ ID NO: 688 - RNA, 21 nt, synthetic construct
  source 1..21: mol_type = other RNA
  modified_base 1: mod_base = OTHER; note = 2'-O-methylguanosine-3'-phosphorothioate
  modified_base 2: mod_base = OTHER; note = 2'-O-methylcytidine-3'-phosphorothioate
  modified_base 3: mod_base = OTHER; note = 2'-O-methyluridine-3'-phosphate
  modified_base 4: mod_base = OTHER; note = 2'-O-methyluridine-3'-phosphate
  modified_base 5: mod_base = OTHER; note = 2'-O-methyluridine-3'-phosphate
  modified_base 6: mod_base = OTHER; note = 2'-O-methylcytidine-3'-phosphate
  modified_base 7: mod_base = OTHER; note = 2'-fluoroadenosine-3'-phosphate
  modified_base 8: mod_base = OTHER; note = 2'-O-methyladenosine-3'-phosphate
  modified_base 9: mod_base = OTHER; note = 2'-fluorocytidine-3'-phosphate
  modified_base 10: mod_base = OTHER; note = 2'-fluoroadenosine-3'-phosphate
  modified_base 11: mod_base = OTHER; note = 2'-fluorocytidine-3'-phosphate
  modified_base 12: mod_base = OTHER; note = 2'-O-methylcytidine-3'-phosphate
  modified_base 13: mod_base = OTHER; note = 2'-O-methyluridine-3'-phosphate
  modified_base 14: mod_base = OTHER; note = 2'-O-methyladenosine-3'-phosphate
  modified_base 15: mod_base = OTHER; note = 2'-O-methylcytidine-3'-phosphate
  modified_base 16: mod_base = OTHER; note = 2'-O-methylguanosine-3'-phosphate
  modified_base 17: mod_base = OTHER; note = 2'-O-methyluridine-3'-phosphate
  modified_base 18: mod_base = OTHER; note = 2'-O-methylcytidine-3'-phosphate
  modified_base 19: mod_base = OTHER; note = 2'-O-methylcytidine-3'-phosphate
  modified_base 20: mod_base = OTHER; note = 2'-O-methyladenosine-3'-phosphate
  modified_base 21: mod_base = OTHER; note = 2'-O-methyluridine-3'-phosphate N-[tris(GalNAc-alkyl)-amidodecanoyl)]-4-hydroxyprolinol (Hyp-(GalNAc-alkyl)3)
gctttcaacacctacgtccat

SEQ ID NO: 689 - RNA, 21 nt, synthetic construct
  source 1..21: mol_type = other RNA
  modified_base 1: mod_base = OTHER; note = 2'-O-methylcytidine-3'-phosphorothioate
  modified_base 2: mod_base = OTHER; note = 2'-O-methyladenosine-3'-phosphorothioate
  modified_base 3: mod_base = OTHER; note = 2'-O-methylcytidine-3'-phosphate
  modified_base 4: mod_base = OTHER; note = 2'-O-methylcytidine-3'-phosphate
  modified_base 5: mod_base = OTHER; note = 2'-O-methyluridine-3'-phosphate
  modified_base 6: mod_base = OTHER; note = 2'-O-methyladenosine-3'-phosphate
  modified_base 7: mod_base = OTHER; note = 2'-fluorocytidine-3'-phosphate
  modified_base 8: mod_base = OTHER; note = 2'-O-methylguanosine-3'-phosphate
  modified_base 9: mod_base = OTHER; note = 2'-fluorouridine-3'-phosphate
  modified_base 10: mod_base = OTHER; note = 2'-fluorocytidine-3'-phosphate
  modified_base 11: mod_base = OTHER; note = 2'-fluorocytidine-3'-phosphate
  modified_base 12: mod_base = OTHER; note = 2'-O-methyladenosine-3'-phosphate
  modified_base 13: mod_base = OTHER; note = 2'-O-methylcytidine-3'-phosphate
  modified_base 14: mod_base = OTHER; note = 2'-O-methyluridine-3'-phosphate
  modified_base 15: mod_base = OTHER; note = 2'-O-methyluridine-3'-phosphate
  modified_base 16: mod_base = OTHER; note = 2'-O-methylcytidine-3'-phosphate
  modified_base 17: mod_base = OTHER; note = 2'-O-methylcytidine-3'-phosphate
  modified_base 18: mod_base = OTHER; note = 2'-O-methyladenosine-3'-phosphate
  modified_base 19: mod_base = OTHER; note = 2'-O-methyladenosine-3'-phosphate
  modified_base 20: mod_base = OTHER; note = 2'-O-methylguanosine-3'-phosphate
  modified_base 21: mod_base = OTHER; note = 2'-O-methyluridine-3'-phosphate N-[tris(GalNAc-alkyl)-amidodecanoyl)]-4-hydroxyprolinol (Hyp-(GalNAc-alkyl)3)
cacctacgtccacttccaagt

SEQ ID NO: 690 - RNA, 21 nt, synthetic construct
  source 1..21: mol_type = other RNA
  modified_base 1: mod_base = OTHER; note = 2'-O-methyluridine-3'-phosphorothioate
  modified_base 2: mod_base = OTHER; note = 2'-O-methylcytidine-3'-phosphorothioate
  modified_base 3: mod_base = OTHER; note = 2'-O-methylcytidine-3'-phosphate
  modified_base 4: mod_base = OTHER; note = 2'-O-methyladenosine-3'-phosphate
  modified_base 5: mod_base = OTHER; note = 2'-O-methylcytidine-3'-phosphate
  modified_base 6: mod_base = OTHER; note = 2'-O-methyluridine-3'-phosphate
  modified_base 7: mod_base = OTHER; note = 2'-fluorouridine-3'-phosphate
  modified_base 8: mod_base = OTHER; note = 2'-O-methylcytidine-3'-phosphate
  modified_base 9: mod_base = OTHER; note = 2'-fluorocytidine-3'-phosphate
  modified_base 10: mod_base = OTHER; note = 2'-fluoroadenosine-3'-phosphate
  modified_base 11: mod_base = OTHER; note = 2'-fluoroadenosine-3'-phosphate
  modified_base 12: mod_base = OTHER; note = 2'-O-methylguanosine-3'-phosphate
  modified_base 13: mod_base = OTHER; note = 2'-O-methylguanosine-3'-phosphate
  modified_base 14: mod_base = OTHER; note = 2'-O-methylguanosine-3'-phosphate
  modified_base 15: mod_base = OTHER; note = 2'-O-methyladenosine-3'-phosphate
  modified_base 16: mod_base = OTHER; note = 2'-O-methyladenosine-3'-phosphate
  modified_base 17: mod_base = OTHER; note = 2'-O-methylguanosine-3'-phosphate
  modified_base 18: mod_base = OTHER; note = 2'-O-methyladenosine-3'-phosphate
  modified_base 19: mod_base = OTHER; note = 2'-O-methyluridine-3'-phosphate
  modified_base 20: mod_base = OTHER; note = 2'-O-methylguanosine-3'-phosphate
  modified_base 21: mod_base = OTHER; note = 2'-O-methyluridine-3'-phosphate N-[tris(GalNAc-alkyl)-amidodecanoyl)]-4-hydroxyprolinol (Hyp-(GalNAc-alkyl)3)
tccacttccaagggaagatgt

SEQ ID NO: 691 - RNA, 21 nt, synthetic construct
  source 1..21: mol_type = other RNA
  modified_base 1: mod_base = OTHER; note = 2'-O-methyladenosine-3'-phosphorothioate
  modified_base 2: mod_base = OTHER; note = 2'-O-methylcytidine-3'-phosphorothioate
  modified_base 3: mod_base = OTHER; note = 2'-O-methyluridine-3'-phosphate
  modified_base 4: mod_base = OTHER; note = 2'-O-methyluridine-3'-phosphate
  modified_base 5: mod_base = OTHER; note = 2'-O-methylcytidine-3'-phosphate
  modified_base 6: mod_base = OTHER; note = 2'-O-methylcytidine-3'-phosphate
  modified_base 7: mod_base = OTHER; note = 2'-fluoroadenosine-3'-phosphate
  modified_base 8: mod_base = OTHER; note = 2'-O-methyladenosine-3'-phosphate
  modified_base 9: mod_base = OTHER; note = 2'-fluoroguanosine-3'-phosphate
  modified_base 10: mod_base = OTHER; note = 2'-fluoroguanosine-3'-phosphate
  modified_base 11: mod_base = OTHER; note = 2'-fluoroguanosine-3'-phosphate
  modified_base 12: mod_base = OTHER; note = 2'-O-methyladenosine-3'-phosphate
  modified_base 13: mod_base = OTHER; note = 2'-O-methyladenosine-3'-phosphate
  modified_base 14: mod_base = OTHER; note = 2'-O-methylguanosine-3'-phosphate
  modified_base 15: mod_base = OTHER; note = 2'-O-methyladenosine-3'-phosphate
  modified_base 16: mod_base = OTHER; note = 2'-O-methyluridine-3'-phosphate
  modified_base 17: mod_base = OTHER; note = 2'-O-methylguanosine-3'-phosphate
  modified_base 18: mod_base = OTHER; note = 2'-O-methyladenosine-3'-phosphate
  modified_base 19: mod_base = OTHER; note = 2'-O-methyladenosine-3'-phosphate
  modified_base 20: mod_base = OTHER; note = 2'-O-methylguanosine-3'-phosphate
  modified_base 21: mod_base = OTHER; note = 2'-O-methyluridine-3'-phosphate N-[tris(GalNAc-alkyl)-amidodecanoyl)]-4-hydroxyprolinol (Hyp-(GalNAc-alkyl)3)
acttccaagggaagatgaagt

SEQ ID NO: 692 - RNA, 21 nt, synthetic construct
  source 1..21: mol_type = other RNA
  modified_base 1: mod_base = OTHER; note = 2'-O-methylcytidine-3'-phosphorothioate
  modified_base 2: mod_base = OTHER; note = 2'-O-methyluridine-3'-phosphorothioate
  modified_base 3: mod_base = OTHER; note = 2'-O-methyluridine-3'-phosphate
  modified_base 4: mod_base = OTHER; note = 2'-O-methylcytidine-3'-phosphate
  modified_base 5: mod_base = OTHER; note = 2'-O-methylcytidine-3'-phosphate
  modified_base 6: mod_base = OTHER; note = 2'-O-methyladenosine-3'-phosphate
  modified_base 7: mod_base = OTHER; note = 2'-fluoroadenosine-3'-phosphate
  modified_base 8: mod_base = OTHER; note = 2'-O-methylguanosine-3'-phosphate
  modified_base 9: mod_base = OTHER; note = 2'-fluoroguanosine-3'-phosphate
  modified_base 10: mod_base = OTHER; note = 2'-fluoroguanosine-3'-phosphate
  modified_base 11: mod_base = OTHER; note = 2'-fluoroadenosine-3'-phosphate
  modified_base 12: mod_base = OTHER; note = 2'-O-methyladenosine-3'-phosphate
  modified_base 13: mod_base = OTHER; note = 2'-O-methylguanosine-3'-phosphate
  modified_base 14: mod_base = OTHER; note = 2'-O-methyladenosine-3'-phosphate
  modified_base 15: mod_base = OTHER; note = 2'-O-methyluridine-3'-phosphate
  modified_base 16: mod_base = OTHER; note = 2'-O-methylguanosine-3'-phosphate
  modified_base 17: mod_base = OTHER; note = 2'-O-methyladenosine-3'-phosphate
  modified_base 18: mod_base = OTHER; note = 2'-O-methyladenosine-3'-phosphate
  modified_base 19: mod_base = OTHER; note = 2'-O-methylguanosine-3'-phosphate
  modified_base 20: mod_base = OTHER; note = 2'-O-methylguanosine-3'-phosphate
  modified_base 21: mod_base = OTHER; note = 2'-O-methyluridine-3'-phosphate N-[tris(GalNAc-alkyl)-amidodecanoyl)]-4-hydroxyprolinol (Hyp-(GalNAc-alkyl)3)
cttccaagggaagatgaaggt

SEQ ID NO: 693 - RNA, 21 nt, synthetic construct
  source 1..21: mol_type = other RNA
  modified_base 1: mod_base = OTHER; note = 2'-O-methyluridine-3'-phosphorothioate
  modified_base 2: mod_base = OTHER; note = 2'-O-methylcytidine-3'-phosphorothioate
  modified_base 3: mod_base = OTHER; note = 2'-O-methylcytidine-3'-phosphate
  modified_base 4: mod_base = OTHER; note = 2'-O-methyladenosine-3'-phosphate
  modified_base 5: mod_base = OTHER; note = 2'-O-methyladenosine-3'-phosphate
  modified_base 6: mod_base = OTHER; note = 2'-O-methylguanosine-3'-phosphate
  modified_base 7: mod_base = OTHER; note = 2'-fluoroguanosine-3'-phosphate
  modified_base 8: mod_base = OTHER; note = 2'-O-methylguanosine-3'-phosphate
  modified_base 9: mod_base = OTHER; note = 2'-fluoroadenosine-3'-phosphate
  modified_base 10: mod_base = OTHER; note = 2'-fluoroadenosine-3'-phosphate
  modified_base 11: mod_base = OTHER; note = 2'-fluoroguanosine-3'-phosphate
  modified_base 12: mod_base = OTHER; note = 2'-O-methyladenosine-3'-phosphate
  modified_base 13: mod_base = OTHER; note = 2'-O-methyluridine-3'-phosphate
  modified_base 14: mod_base = OTHER; note = 2'-O-methylguanosine-3'-phosphate
  modified_base 15: mod_base = OTHER; note = 2'-O-methyladenosine-3'-phosphate
  modified_base 16: mod_base = OTHER; note = 2'-O-methyladenosine-3'-phosphate
  modified_base 17: mod_base = OTHER; note = 2'-O-methylguanosine-3'-phosphate
  modified_base 18: mod_base = OTHER; note = 2'-O-methylguanosine-3'-phosphate
  modified_base 19: mod_base = OTHER; note = 2'-O-methylguanosine-3'-phosphate
  modified_base 20: mod_base = OTHER; note = 2'-O-methylcytidine-3'-phosphate
  modified_base 21: mod_base = OTHER; note = 2'-O-methyluridine-3'-phosphate N-[tris(GalNAc-alkyl)-amidodecanoyl)]-4-hydroxyprolinol (Hyp-(GalNAc-alkyl)3)
tccaagggaagatgaagggct

SEQ ID NO: 694 - RNA, 21 nt, synthetic construct
  source 1..21: mol_type = other RNA
  modified_base 1: mod_base = OTHER; note = 2'-O-methyladenosine-3'-phosphorothioate
  modified_base 2: mod_base = OTHER; note = 2'-O-methylguanosine-3'-phosphorothioate
  modified_base 3: mod_base = OTHER; note = 2'-O-methyladenosine-3'-phosphate
  modified_base 4: mod_base = OTHER; note = 2'-O-methyluridine-3'-phosphate
  modified_base 5: mod_base = OTHER; note = 2'-O-methylguanosine-3'-phosphate
  modified_base 6: mod_base = OTHER; note = 2'-O-methyladenosine-3'-phosphate
  modified_base 7: mod_base = OTHER; note = 2'-fluoroadenosine-3'-phosphate
  modified_base 8: mod_base = OTHER; note = 2'-O-methylguanosine-3'-phosphate
  modified_base 9: mod_base = OTHER; note = 2'-fluoroguanosine-3'-phosphate
  modified_base 10: mod_base = OTHER; note = 2'-fluoroguanosine-3'-phosphate
  modified_base 11: mod_base = OTHER; note = 2'-fluorocytidine-3'-phosphate
  modified_base 12: mod_base = OTHER; note = 2'-O-methyluridine-3'-phosphate
  modified_base 13: mod_base = OTHER; note = 2'-O-methyluridine-3'-phosphate
  modified_base 14: mod_base = OTHER; note = 2'-O-methylcytidine-3'-phosphate
  modified_base 15: mod_base = OTHER; note = 2'-O-methyluridine-3'-phosphate
  modified_base 16: mod_base = OTHER; note = 2'-O-methylcytidine-3'-phosphate
  modified_base 17: mod_base = OTHER; note = 2'-O-methylcytidine-3'-phosphate
  modified_base 18: mod_base = OTHER; note = 2'-O-methylcytidine-3'-phosphate
  modified_base 19: mod_base = OTHER; note = 2'-O-methyluridine-3'-phosphate
  modified_base 20: mod_base = OTHER; note = 2'-O-methylguanosine-3'-phosphate
  modified_base 21: mod_base = OTHER; note = 2'-O-methyluridine-3'-phosphate N-[tris(GalNAc-alkyl)-amidodecanoyl)]-4-hydroxyprolinol (Hyp-(GalNAc-alkyl)3)
agatgaagggcttctccctgt

SEQ ID NO: 695 - RNA, 21 nt, synthetic construct
  source 1..21: mol_type = other RNA
  modified_base 1: mod_base = OTHER; note = 2'-O-methylguanosine-3'-phosphorothioate
  modified_base 2: mod_base = OTHER; note = 2'-O-methylguanosine-3'-phosphorothioate
  modified_base 3: mod_base = OTHER; note = 2'-O-methyladenosine-3'-phosphate
  modified_base 4: mod_base = OTHER; note = 2'-O-methylcytidine-3'-phosphate
  modified_base 5: mod_base = OTHER; note = 2'-O-methyladenosine-3'-phosphate
  modified_base 6: mod_base = OTHER; note = 2'-O-methyladenosine-3'-phosphate
  modified_base 7: mod_base = OTHER; note = 2'-fluorocytidine-3'-phosphate
  modified_base 8: mod_base = OTHER; note = 2'-O-methyladenosine-3'-phosphate
  modified_base 9: mod_base = OTHER; note = 2'-fluoroguanosine-3'-phosphate
  modified_base 10: mod_base = OTHER; note = 2'-fluorocytidine-3'-phosphate
  modified_base 11: mod_base = OTHER; note = 2'-fluoroadenosine-3'-phosphate
  modified_base 12: mod_base = OTHER; note = 2'-O-methylcytidine-3'-phosphate
  modified_base 13: mod_base = OTHER; note = 2'-O-methylcytidine-3'-phosphate
  modified_base 14: mod_base = OTHER; note = 2'-O-methyluridine-3'-phosphate
  modified_base 15: mod_base = OTHER; note = 2'-O-methylcytidine-3'-phosphate
  modified_base 16: mod_base = OTHER; note = 2'-O-methyladenosine-3'-phosphate
  modified_base 17: mod_base = OTHER; note = 2'-O-methylguanosine-3'-phosphate
  modified_base 18: mod_base = OTHER; note = 2'-O-methyluridine-3'-phosphate
  modified_base 19: mod_base = OTHER; note = 2'-O-methylguanosine-3'-phosphate
  modified_base 20: mod_base = OTHER; note = 2'-O-methyluridine-3'-phosphate
  modified_base 21: mod_base = OTHER; note = 2'-O-methyluridine-3'-phosphate N-[tris(GalNAc-alkyl)-amidodecanoyl)]-4-hydroxyprolinol (Hyp-(GalNAc-alkyl)3)
ggacaacagcacctcagtgtt

SEQ ID NO: 696 - RNA, 21 nt, synthetic construct
  source 1..21: mol_type = other RNA
  modified_base 1: mod_base = OTHER; note = 2'-O-methylguanosine-3'-phosphorothioate
  modified_base 2: mod_base = OTHER; note = 2'-O-methyladenosine-3'-phosphorothioate
  modified_base 3: mod_base = OTHER; note = 2'-O-methylcytidine-3'-phosphate
  modified_base 4: mod_base = OTHER; note = 2'-O-methyladenosine-3'-phosphate
  modified_base 5: mod_base = OTHER; note = 2'-O-methyladenosine-3'-phosphate
  modified_base 6: mod_base = OTHER; note = 2'-O-methylcytidine-3'-phosphate
  modified_base 7: mod_base = OTHER; note = 2'-fluoroadenosine-3'-phosphate
  modified_base 8: mod_base = OTHER; note = 2'-O-methylguanosine-3'-phosphate
  modified_base 9: mod_base = OTHER; note = 2'-fluorocytidine-3'-phosphate
  modified_base 10: mod_base = OTHER; note = 2'-fluoroadenosine-3'-phosphate
  modified_base 11: mod_base = OTHER; note = 2'-fluorocytidine-3'-phosphate
  modified_base 12: mod_base = OTHER; note = 2'-O-methylcytidine-3'-phosphate
  modified_base 13: mod_base = OTHER; note = 2'-O-methyluridine-3'-phosphate
  modified_base 14: mod_base = OTHER; note = 2'-O-methylcytidine-3'-phosphate
  modified_base 15: mod_base = OTHER; note = 2'-O-methyladenosine-3'-phosphate
  modified_base 16: mod_base = OTHER; note = 2'-O-methylguanosine-3'-phosphate
  modified_base 17: mod_base = OTHER; note = 2'-O-methyluridine-3'-phosphate
  modified_base 18: mod_base = OTHER; note = 2'-O-methylguanosine-3'-phosphate
  modified_base 19: mod_base = OTHER; note = 2'-O-methyluridine-3'-phosphate
  modified_base 20: mod_base = OTHER; note = 2'-O-methylcytidine-3'-phosphate
  modified_base 21: mod_base = OTHER; note = 2'-O-methyluridine-3'-phosphate N-[tris(GalNAc-alkyl)-amidodecanoyl)]-4-hydroxyprolinol (Hyp-(GalNAc-alkyl)3)
gacaacagcacctcagtgtct

SEQ ID NO: 697 - RNA, 21 nt, synthetic construct
  source 1..21: mol_type = other RNA
  modified_base 1: mod_base = OTHER; note = 2'-O-methylcytidine-3'-phosphorothioate
  modified_base 2: mod_base = OTHER; note = 2'-O-methyladenosine-3'-phosphorothioate
  modified_base 3: mod_base = OTHER; note = 2'-O-methyladenosine-3'-phosphate
  modified_base 4: mod_base = OTHER; note = 2'-O-methylcytidine-3'-phosphate
  modified_base 5: mod_base = OTHER; note = 2'-O-methyladenosine-3'-phosphate
  modified_base 6: mod_base = OTHER; note = 2'-O-methylguanosine-3'-phosphate
  modified_base 7: mod_base = OTHER; note = 2'-fluorocytidine-3'-phosphate
  modified_base 8: mod_base = OTHER; note = 2'-O-methyladenosine-3'-phosphate
  modified_base 9: mod_base = OTHER; note = 2'-fluorocytidine-3'-phosphate
  modified_base 10: mod_base = OTHER; note = 2'-fluorocytidine-3'-phosphate
  modified_base 11: mod_base = OTHER; note = 2'-fluorouridine-3'-phosphate
  modified_base 12: mod_base = OTHER; note = 2'-O-methylcytidine-3'-phosphate
  modified_base 13: mod_base = OTHER; note = 2'-O-methyladenosine-3'-phosphate
  modified_base 14: mod_base = OTHER; note = 2'-O-methylguanosine-3'-phosphate
  modified_base 15: mod_base = OTHER; note = 2'-O-methyluridine-3'-phosphate
  modified_base 16: mod_base = OTHER; note = 2'-O-methylguanosine-3'-phosphate
  modified_base 17: mod_base = OTHER; note = 2'-O-methyluridine-3'-phosphate
  modified_base 18: mod_base = OTHER; note = 2'-O-methylcytidine-3'-phosphate
  modified_base 19: mod_base = OTHER; note = 2'-O-methyluridine-3'-phosphate
  modified_base 20: mod_base = OTHER; note = 2'-O-methylguanosine-3'-phosphate
  modified_base 21: mod_base = OTHER; note = 2'-O-methyluridine-3'-phosphate N-[tris(GalNAc-alkyl)-amidodecanoyl)]-4-hydroxyprolinol (Hyp-(GalNAc-alkyl)3)
caacagcacctcagtgtctgt

SEQ ID NO: 698 - RNA, 21 nt, synthetic construct
  source 1..21: mol_type = other RNA
  modified_base 1: mod_base = OTHER; note = 2'-O-methyladenosine-3'-phosphorothioate
  modified_base 2: mod_base = OTHER; note = 2'-O-methylcytidine-3'-phosphorothioate
  modified_base 3: mod_base = OTHER; note = 2'-O-methylcytidine-3'-phosphate
  modified_base 4: mod_base = OTHER; note = 2'-O-methyluridine-3'-phosphate
  modified_base 5: mod_base = OTHER; note = 2'-O-methylcytidine-3'-phosphate
  modified_base 6: mod_base = OTHER; note = 2'-O-methyladenosine-3'-phosphate
  modified_base 7: mod_base = OTHER; note = 2'-fluoroguanosine-3'-phosphate
  modified_base 8: mod_base = OTHER; note = 2'-O-methyluridine-3'-phosphate
  modified_base 9: mod_base = OTHER; note = 2'-fluoroguanosine-3'-phosphate
  modified_base 10: mod_base = OTHER; note = 2'-fluorouridine-3'-phosphate
  modified_base 11: mod_base = OTHER; note = 2'-fluorocytidine-3'-phosphate
  modified_base 12: mod_base = OTHER; note = 2'-O-methyluridine-3'-phosphate
  modified_base 13: mod_base = OTHER; note = 2'-O-methylguanosine-3'-phosphate
  modified_base 14: mod_base = OTHER; note = 2'-O-methyluridine-3'-phosphate
  modified_base 15: mod_base = OTHER; note = 2'-O-methyluridine-3'-phosphate
  modified_base 16: mod_base = OTHER; note = 2'-O-methylcytidine-3'-phosphate
  modified_base 17: mod_base = OTHER; note = 2'-O-methylcytidine-3'-phosphate
  modified_base 18: mod_base = OTHER; note = 2'-O-methylcytidine-3'-phosphate
  modified_base 19: mod_base = OTHER; note = 2'-O-methyladenosine-3'-phosphate
  modified_base 20: mod_base = OTHER; note = 2'-O-methyluridine-3'-phosphate
  modified_base 21: mod_base = OTHER; note = 2'-O-methyluridine-3'-phosphate N-[tris(GalNAc-alkyl)-amidodecanoyl)]-4-hydroxyprolinol (Hyp-(GalNAc-alkyl)3)
acctcagtgtctgttcccatt

SEQ ID NO: 699 - RNA, 21 nt, synthetic construct
  source 1..21: mol_type = other RNA
  modified_base 1: mod_base = OTHER; note = 2'-O-methylcytidine-3'-phosphorothioate
  modified_base 2: mod_base = OTHER; note = 2'-O-methyladenosine-3'-phosphorothioate
  modified_base 3: mod_base = OTHER; note = 2'-O-methylguanosine-3'-phosphate
  modified_base 4: mod_base = OTHER; note = 2'-O-methyluridine-3'-phosphate
  modified_base 5: mod_base = OTHER; note = 2'-O-methylguanosine-3'-phosphate
  modified_base 6: mod_base = OTHER; note = 2'-O-methyluridine-3'-phosphate
  modified_base 7: mod_base = OTHER; note = 2'-fluorocytidine-3'-phosphate
  modified_base 8: mod_base = OTHER; note = 2'-O-methyluridine-3'-phosphate
  modified_base 9: mod_base = OTHER; note = 2'-fluoroguanosine-3'-phosphate
  modified_base 10: mod_base = OTHER; note = 2'-fluorouridine-3'-phosphate
  modified_base 11: mod_base = OTHER; note = 2'-fluorouridine-3'-phosphate
  modified_base 12: mod_base = OTHER; note = 2'-O-methylcytidine-3'-phosphate
  modified_base 13: mod_base = OTHER; note = 2'-O-methylcytidine-3'-phosphate
  modified_base 14: mod_base = OTHER; note = 2'-O-methylcytidine-3'-phosphate
  modified_base 15: mod_base = OTHER; note = 2'-O-methyladenosine-3'-phosphate
  modified_base 16: mod_base = OTHER; note = 2'-O-methyluridine-3'-phosphate
  modified_base 17: mod_base = OTHER; note = 2'-O-methylguanosine-3'-phosphate
  modified_base 18: mod_base = OTHER; note = 2'-O-methylcytidine-3'-phosphate
  modified_base 19: mod_base = OTHER; note = 2'-O-methyluridine-3'-phosphate
  modified_base 20: mod_base = OTHER; note = 2'-O-methylcytidine-3'-phosphate
  modified_base 21: mod_base = OTHER; note = 2'-O-methyluridine-3'-phosphate N-[tris(GalNAc-alkyl)-amidodecanoyl)]-4-hydroxyprolinol (Hyp-(GalNAc-alkyl)3)
cagtgtctgttcccatgctct

SEQ ID NO: 700 - RNA, 21 nt, synthetic construct
  source 1..21: mol_type = other RNA
  modified_base 1: mod_base = OTHER; note = 2'-O-methylguanosine-3'-phosphorothioate
  modified_base 2: mod_base = OTHER; note = 2'-O-methyluridine-3'-phosphorothioate
  modified_base 3: mod_base = OTHER; note = 2'-O-methylcytidine-3'-phosphate
  modified_base 4: mod_base = OTHER; note = 2'-O-methyluridine-3'-phosphate
  modified_base 5: mod_base = OTHER; note = 2'-O-methylguanosine-3'-phosphate
  modified_base 6: mod_base = OTHER; note = 2'-O-methyluridine-3'-phosphate
  modified_base 7: mod_base = OTHER; note = 2'-fluorouridine-3'-phosphate
  modified_base 8: mod_base = OTHER; note = 2'-O-methylcytidine-3'-phosphate
  modified_base 9: mod_base = OTHER; note = 2'-fluorocytidine-3'-phosphate
  modified_base 10: mod_base = OTHER; note = 2'-fluorocytidine-3'-phosphate
  modified_base 11: mod_base = OTHER; note = 2'-fluoroadenosine-3'-phosphate
  modified_base 12: mod_base = OTHER; note = 2'-O-methyluridine-3'-phosphate
  modified_base 13: mod_base = OTHER; note = 2'-O-methylguanosine-3'-phosphate
  modified_base 14: mod_base = OTHER; note = 2'-O-methylcytidine-3'-phosphate
  modified_base 15: mod_base = OTHER; note = 2'-O-methyluridine-3'-phosphate
  modified_base 16: mod_base = OTHER; note = 2'-O-methylcytidine-3'-phosphate
  modified_base 17: mod_base = OTHER; note = 2'-O-methyluridine-3'-phosphate
  modified_base 18: mod_base = OTHER; note = 2'-O-methylcytidine-3'-phosphate
  modified_base 19: mod_base = OTHER; note = 2'-O-methyluridine-3'-phosphate
  modified_base 20: mod_base = OTHER; note = 2'-O-methylguanosine-3'-phosphate
  modified_base 21: mod_base = OTHER; note = 2'-O-methyluridine-3'-phosphate N-[tris(GalNAc-alkyl)-amidodecanoyl)]-4-hydroxyprolinol (Hyp-(GalNAc-alkyl)3)
gtctgttcccatgctctctgt

SEQ ID NO: 701 - RNA, 21 nt, synthetic construct
  source 1..21: mol_type = other RNA
  modified_base 1: mod_base = OTHER; note = 2'-O-methyluridine-3'-phosphorothioate
  modified_base 2: mod_base = OTHER; note = 2'-O-methylcytidine-3'-phosphorothioate
  modified_base 3: mod_base = OTHER; note = 2'-O-methyluridine-3'-phosphate
  modified_base 4: mod_base = OTHER; note = 2'-O-methylguanosine-3'-phosphate
  modified_base 5: mod_base = OTHER; note = 2'-O-methyluridine-3'-phosphate
  modified_base 6: mod_base = OTHER; note = 2'-O-methyluridine-3'-phosphate
  modified_base 7: mod_base = OTHER; note = 2'-fluorocytidine-3'-phosphate
  modified_base 8: mod_base = OTHER; note = 2'-O-methylcytidine-3'-phosphate
  modified_base 9: mod_base = OTHER; note = 2'-fluorocytidine-3'-phosphate
  modified_base 10: mod_base = OTHER; note = 2'-fluoroadenosine-3'-phosphate
  modified_base 11: mod_base = OTHER; note = 2'-fluorouridine-3'-phosphate
  modified_base 12: mod_base = OTHER; note = 2'-O-methylguanosine-3'-phosphate
  modified_base 13: mod_base = OTHER; note = 2'-O-methylcytidine-3'-phosphate
  modified_base 14: mod_base = OTHER; note = 2'-O-methyluridine-3'-phosphate
  modified_base 15: mod_base = OTHER; note = 2'-O-methylcytidine-3'-phosphate
  modified_base 16: mod_base = OTHER; note = 2'-O-methyluridine-3'-phosphate
  modified_base 17: mod_base = OTHER; note = 2'-O-methylcytidine-3'-phosphate
  modified_base 18: mod_base = OTHER; note = 2'-O-methyluridine-3'-phosphate
  modified_base 19: mod_base = OTHER; note = 2'-O-methylguanosine-3'-phosphate
  modified_base 20: mod_base = OTHER; note = 2'-O-methylguanosine-3'-phosphate
  modified_base 21: mod_base = OTHER; note = 2'-O-methyluridine-3'-phosphate N-[tris(GalNAc-alkyl)-amidodecanoyl)]-4-hydroxyprolinol (Hyp-(GalNAc-alkyl)3)
tctgttcccatgctctctggt

SEQ ID NO: 702 - RNA, 21 nt, synthetic construct
  source 1..21: mol_type = other RNA
  modified_base 1: mod_base = OTHER; note = 2'-O-methylguanosine-3'-phosphorothioate
  modified_base 2: mod_base = OTHER; note = 2'-O-methyladenosine-3'-phosphorothioate
  modified_base 3: mod_base = OTHER; note = 2'-O-methylcytidine-3'-phosphate
  modified_base 4: mod_base = OTHER; note = 2'-O-methyladenosine-3'-phosphate
  modified_base 5: mod_base = OTHER; note = 2'-O-methyluridine-3'-phosphate
  modified_base 6: mod_base = OTHER; note = 2'-O-methylcytidine-3'-phosphate
  modified_base 7: mod_base = OTHER; note = 2'-fluorocytidine-3'-phosphate
  modified_base 8: mod_base = OTHER; note = 2'-O-methyladenosine-3'-phosphate
  modified_base 9: mod_base = OTHER; note = 2'-fluoroguanosine-3'-phosphate
  modified_base 10: mod_base = OTHER; note = 2'-fluoroguanosine-3'-phosphate
  modified_base 11: mod_base = OTHER; note = 2'-fluoroadenosine-3'-phosphate
  modified_base 12: mod_base = OTHER; note = 2'-O-methylcytidine-3'-phosphate
  modified_base 13: mod_base = OTHER; note = 2'-O-methyladenosine-3'-phosphate
  modified_base 14: mod_base = OTHER; note = 2'-O-methyladenosine-3'-phosphate
  modified_base 15: mod_base = OTHER; note = 2'-O-methylcytidine-3'-phosphate
  modified_base 16: mod_base = OTHER; note = 2'-O-methyluridine-3'-phosphate
  modified_base 17: mod_base = OTHER; note = 2'-O-methyluridine-3'-phosphate
  modified_base 18: mod_base = OTHER; note = 2'-O-methylcytidine-3'-phosphate
  modified_base 19: mod_base = OTHER; note = 2'-O-methyluridine-3'-phosphate
  modified_base 20: mod_base = OTHER; note = 2'-O-methylcytidine-3'-phosphate
  modified_base 21: mod_base = OTHER; note = 2'-O-methyluridine-3'-phosphate N-[tris(GalNAc-alkyl)-amidodecanoyl)]-4-hydroxyprolinol (Hyp-(GalNAc-alkyl)3)
gacatccaggacaacttctct

SEQ ID NO: 703 - RNA, 21 nt, synthetic construct
  source 1..21: mol_type = other RNA
  modified_base 1: mod_base = OTHER; note = 2'-O-methyladenosine-3'-phosphorothioate
  modified_base 2: mod_base = OTHER; note = 2'-O-methylcytidine-3'-phosphorothioate
  modified_base 3: mod_base = OTHER; note = 2'-O-methyladenosine-3'-phosphate
  modified_base 4: mod_base = OTHER; note = 2'-O-methyluridine-3'-phosphate
  modified_base 5: mod_base = OTHER; note = 2'-O-methylcytidine-3'-phosphate
  modified_base 6: mod_base = OTHER; note = 2'-O-methylcytidine-3'-phosphate
  modified_base 7: mod_base = OTHER; note = 2'-fluoroadenosine-3'-phosphate
  modified_base 8: mod_base = OTHER; note = 2'-O-methylguanosine-3'-phosphate
  modified_base 9: mod_base = OTHER; note = 2'-fluoroguanosine-3'-phosphate
  modified_base 10: mod_base = OTHER; note = 2'-fluoroadenosine-3'-phosphate
  modified_base 11: mod_base = OTHER; note = 2'-fluorocytidine-3'-phosphate
  modified_base 12: mod_base = OTHER; note = 2'-O-methyladenosine-3'-phosphate
  modified_base 13: mod_base = OTHER; note = 2'-O-methyladenosine-3'-phosphate
  modified_base 14: mod_base = OTHER; note = 2'-O-methylcytidine-3'-phosphate
  modified_base 15: mod_base = OTHER; note = 2'-O-methyluridine-3'-phosphate
  modified_base 16: mod_base = OTHER; note = 2'-O-methyluridine-3'-phosphate
  modified_base 17: mod_base = OTHER; note = 2'-O-methylcytidine-3'-phosphate
  modified_base 18: mod_base = OTHER; note = 2'-O-methyluridine-3'-phosphate
  modified_base 19: mod_base = OTHER; note = 2'-O-methylcytidine-3'-phosphate
  modified_base 20: mod_base = OTHER; note = 2'-O-methylguanosine-3'-phosphate
  modified_base 21: mod_base = OTHER; note = 2'-O-methyluridine-3'-phosphate N-[tris(GalNAc-alkyl)-amidodecanoyl)]-4-hydroxyprolinol (Hyp-(GalNAc-alkyl)3)
acatccaggacaacttctcgt

SEQ ID NO: 704 - RNA, 21 nt, synthetic construct
  source 1..21: mol_type = other RNA
  modified_base 1: mod_base = OTHER; note = 2'-O-methylcytidine-3'-phosphorothioate
  modified_base 2: mod_base = OTHER; note = 2'-O-methyladenosine-3'-phosphorothioate
  modified_base 3: mod_base = OTHER; note = 2'-O-methyluridine-3'-phosphate
  modified_base 4: mod_base = OTHER; note = 2'-O-methylcytidine-3'-phosphate
  modified_base 5: mod_base = OTHER; note = 2'-O-methylcytidine-3'-phosphate
  modified_base 6: mod_base = OTHER; note = 2'-O-methyladenosine-3'-phosphate
  modified_base 7: mod_base = OTHER; note = 2'-fluoroguanosine-3'-phosphate
  modified_base 8: mod_base = OTHER; note = 2'-O-methylguanosine-3'-phosphate
  modified_base 9: mod_base = OTHER; note = 2'-fluoroadenosine-3'-phosphate
  modified_base 10: mod_base = OTHER; note = 2'-fluorocytidine-3'-phosphate
  modified_base 11: mod_base = OTHER; note = 2'-fluoroadenosine-3'-phosphate
  modified_base 12: mod_base = OTHER; note = 2'-O-methyladenosine-3'-phosphate
  modified_base 13: mod_base = OTHER; note = 2'-O-methylcytidine-3'-phosphate
  modified_base 14: mod_base = OTHER; note = 2'-O-methyluridine-3'-phosphate
  modified_base 15: mod_base = OTHER; note = 2'-O-methyluridine-3'-phosphate
  modified_base 16: mod_base = OTHER; note = 2'-O-methylcytidine-3'-phosphate
  modified_base 17: mod_base = OTHER; note = 2'-O-methyluridine-3'-phosphate
  modified_base 18: mod_base = OTHER; note = 2'-O-methylcytidine-3'-phosphate
  modified_base 19: mod_base = OTHER; note = 2'-O-methylguanosine-3'-phosphate
  modified_base 20: mod_base = OTHER; note = 2'-O-methylguanosine-3'-phosphate
  modified_base 21: mod_base = OTHER; note = 2'-O-methyluridine-3'-phosphate N-[tris(GalNAc-alkyl)-amidodecanoyl)]-4-hydroxyprolinol (Hyp-(GalNAc-alkyl)3)
catccaggacaacttctcggt

SEQ ID NO: 705 - RNA, 21 nt, synthetic construct
  source 1..21: mol_type = other RNA
  modified_base 1: mod_base = OTHER; note = 2'-O-methyladenosine-3'-phosphorothioate
  modified_base 2: mod_base = OTHER; note = 2'-O-methyluridine-3'-phosphorothioate
  modified_base 3: mod_base = OTHER; note = 2'-O-methylcytidine-3'-phosphate
  modified_base 4: mod_base = OTHER; note = 2'-O-methylcytidine-3'-phosphate
  modified_base 5: mod_base = OTHER; note = 2'-O-methyladenosine-3'-phosphate
  modified_base 6: mod_base = OTHER; note = 2'-O-methylguanosine-3'-phosphate
  modified_base 7: mod_base = OTHER; note = 2'-fluoroguanosine-3'-phosphate
  modified_base 8: mod_base = OTHER; note = 2'-O-methyladenosine-3'-phosphate
  modified_base 9: mod_base = OTHER; note = 2'-fluorocytidine-3'-phosphate
  modified_base 10: mod_base = OTHER; note = 2'-fluoroadenosine-3'-phosphate
  modified_base 11: mod_base = OTHER; note = 2'-fluoroadenosine-3'-phosphate
  modified_base 12: mod_base = OTHER; note = 2'-O-methylcytidine-3'-phosphate
  modified_base 13: mod_base = OTHER; note = 2'-O-methyluridine-3'-phosphate
  modified_base 14: mod_base = OTHER; note = 2'-O-methyluridine-3'-phosphate
  modified_base 15: mod_base = OTHER; note = 2'-O-methylcytidine-3'-phosphate
  modified_base 16: mod_base = OTHER; note = 2'-O-methyluridine-3'-phosphate
  modified_base 17: mod_base = OTHER; note = 2'-O-methylcytidine-3'-phosphate
  modified_base 18: mod_base = OTHER; note = 2'-O-methylguanosine-3'-phosphate
  modified_base 19: mod_base = OTHER; note = 2'-O-methylguanosine-3'-phosphate
  modified_base 20: mod_base = OTHER; note = 2'-O-methyluridine-3'-phosphate
  modified_base 21: mod_base = OTHER; note = 2'-O-methyluridine-3'-phosphate N-[tris(GalNAc-alkyl)-amidodecanoyl)]-4-hydroxyprolinol (Hyp-(GalNAc-alkyl)3)
atccaggacaacttctcggtt

SEQ ID NO: 706 - RNA, 21 nt, synthetic construct
  source 1..21: mol_type = other RNA
  modified_base 1: mod_base = OTHER; note = 2'-O-methyluridine-3'-phosphorothioate
  modified_base 2: mod_base = OTHER; note = 2'-O-methylcytidine-3'-phosphorothioate
  modified_base 3: mod_base = OTHER; note = 2'-O-methylcytidine-3'-phosphate
  modified_base 4: mod_base = OTHER; note = 2'-O-methyladenosine-3'-phosphate
  modified_base 5: mod_base = OTHER; note = 2'-O-methylguanosine-3'-phosphate
  modified_base 6: mod_base = OTHER; note = 2'-O-methylguanosine-3'-phosphate
  modified_base 7: mod_base = OTHER; note = 2'-fluoroadenosine-3'-phosphate
  modified_base 8: mod_base = OTHER; note = 2'-O-methylcytidine-3'-phosphate
  modified_base 9: mod_base = OTHER; note = 2'-fluoroadenosine-3'-phosphate
  modified_base 10: mod_base = OTHER; note = 2'-fluoroadenosine-3'-phosphate
  modified_base 11: mod_base = OTHER; note = 2'-fluorocytidine-3'-phosphate
  modified_base 12: mod_base = OTHER; note = 2'-O-methyluridine-3'-phosphate
  modified_base 13: mod_base = OTHER; note = 2'-O-methyluridine-3'-phosphate
  modified_base 14: mod_base = OTHER; note = 2'-O-methylcytidine-3'-phosphate
  modified_base 15: mod_base = OTHER; note = 2'-O-methyluridine-3'-phosphate
  modified_base 16: mod_base = OTHER; note = 2'-O-methylcytidine-3'-phosphate
  modified_base 17: mod_base = OTHER; note = 2'-O-methylguanosine-3'-phosphate
  modified_base 18: mod_base = OTHER; note = 2'-O-methylguanosine-3'-phosphate
  modified_base 19: mod_base = OTHER; note = 2'-O-methyluridine-3'-phosphate
  modified_base 20: mod_base = OTHER; note = 2'-O-methylguanosine-3'-phosphate
  modified_base 21: mod_base = OTHER; note = 2'-O-methyluridine-3'-phosphate N-[tris(GalNAc-alkyl)-amidodecanoyl)]-4-hydroxyprolinol (Hyp-(GalNAc-alkyl)3)
tccaggacaacttctcggtgt

SEQ ID NO: 707 - RNA, 21 nt, synthetic construct
  source 1..21: mol_type = other RNA
  modified_base 1: mod_base = OTHER; note = 2'-O-methylcytidine-3'-phosphorothioate
  modified_base 2: mod_base = OTHER; note = 2'-O-methylcytidine-3'-phosphorothioate
  modified_base 3: mod_base = OTHER; note = 2'-O-methyladenosine-3'-phosphate
  modified_base 4: mod_base = OTHER; note = 2'-O-methylguanosine-3'-phosphate
  modified_base 5: mod_base = OTHER; note = 2'-O-methylguanosine-3'-phosphate
  modified_base 6: mod_base = OTHER; note = 2'-O-methyladenosine-3'-phosphate
  modified_base 7: mod_base = OTHER; note = 2'-fluorocytidine-3'-phosphate
  modified_base 8: mod_base = OTHER; note = 2'-O-methyladenosine-3'-phosphate
  modified_base 9: mod_base = OTHER; note = 2'-fluoroadenosine-3'-phosphate
  modified_base 10: mod_base = OTHER; note = 2'-fluorocytidine-3'-phosphate
  modified_base 11: mod_base = OTHER; note = 2'-fluorouridine-3'-phosphate
  modified_base 12: mod_base = OTHER; note = 2'-O-methyluridine-3'-phosphate
  modified_base 13: mod_base = OTHER; note = 2'-O-methylcytidine-3'-phosphate
  modified_base 14: mod_base = OTHER; note = 2'-O-methyluridine-3'-phosphate
  modified_base 15: mod_base = OTHER; note = 2'-O-methylcytidine-3'-phosphate
  modified_base 16: mod_base = OTHER; note = 2'-O-methylguanosine-3'-phosphate
  modified_base 17: mod_base = OTHER; note = 2'-O-methylguanosine-3'-phosphate
  modified_base 18: mod_base = OTHER; note = 2'-O-methyluridine-3'-phosphate
  modified_base 19: mod_base = OTHER; note = 2'-O-methylguanosine-3'-phosphate
  modified_base 20: mod_base = OTHER; note = 2'-O-methyladenosine-3'-phosphate
  modified_base 21: mod_base = OTHER; note = 2'-O-methyluridine-3'-phosphate N-[tris(GalNAc-alkyl)-amidodecanoyl)]-4-hydroxyprolinol (Hyp-(GalNAc-alkyl)3)
ccaggacaacttctcggtgat

SEQ ID NO: 708 - RNA, 21 nt, synthetic construct
  source 1..21: mol_type = other RNA
  modified_base 1: mod_base = OTHER; note = 2'-O-methylcytidine-3'-phosphorothioate
  modified_base 2: mod_base = OTHER; note = 2'-O-methyladenosine-3'-phosphorothioate
  modified_base 3: mod_base = OTHER; note = 2'-O-methylguanosine-3'-phosphate
  modified_base 4: mod_base = OTHER; note = 2'-O-methylguanosine-3'-phosphate
  modified_base 5: mod_base = OTHER; note = 2'-O-methyladenosine-3'-phosphate
  modified_base 6: mod_base = OTHER; note = 2'-O-methylcytidine-3'-phosphate
  modified_base 7: mod_base = OTHER; note = 2'-fluoroadenosine-3'-phosphate
  modified_base 8: mod_base = OTHER; note = 2'-O-methyladenosine-3'-phosphate
  modified_base 9: mod_base = OTHER; note = 2'-fluorocytidine-3'-phosphate
  modified_base 10: mod_base = OTHER; note = 2'-fluorouridine-3'-phosphate
  modified_base 11: mod_base = OTHER; note = 2'-fluorouridine-3'-phosphate
  modified_base 12: mod_base = OTHER; note = 2'-O-methylcytidine-3'-phosphate
  modified_base 13: mod_base = OTHER; note = 2'-O-methyluridine-3'-phosphate
  modified_base 14: mod_base = OTHER; note = 2'-O-methylcytidine-3'-phosphate
  modified_base 15: mod_base = OTHER; note = 2'-O-methylguanosine-3'-phosphate
  modified_base 16: mod_base = OTHER; note = 2'-O-methylguanosine-3'-phosphate
  modified_base 17: mod_base = OTHER; note = 2'-O-methyluridine-3'-phosphate
  modified_base 18: mod_base = OTHER; note = 2'-O-methylguanosine-3'-phosphate
  modified_base 19: mod_base = OTHER; note = 2'-O-methyladenosine-3'-phosphate
  modified_base 20: mod_base = OTHER; note = 2'-O-methylcytidine-3'-phosphate
  modified_base 21: mod_base = OTHER; note = 2'-O-methyluridine-3'-phosphate N-[tris(GalNAc-alkyl)-amidodecanoyl)]-4-hydroxyprolinol (Hyp-(GalNAc-alkyl)3)
caggacaacttctcggtgact

SEQ ID NO: 709 - RNA, 21 nt, synthetic construct
  source 1..21: mol_type = other RNA
  modified_base 1: mod_base = OTHER; note = 2'-O-methyladenosine-3'-phosphorothioate
  modified_base 2: mod_base = OTHER; note = 2'-O-methylcytidine-3'-phosphorothioate
  modified_base 3: mod_base = OTHER; note = 2'-O-methyluridine-3'-phosphate
  modified_base 4: mod_base = OTHER; note = 2'-O-methyluridine-3'-phosphate
  modified_base 5: mod_base = OTHER; note = 2'-O-methylcytidine-3'-phosphate
  modified_base 6: mod_base = OTHER; note = 2'-O-methyluridine-3'-phosphate
  modified_base 7: mod_base = OTHER; note = 2'-fluorocytidine-3'-phosphate
  modified_base 8: mod_base = OTHER; note = 2'-O-methylguanosine-3'-phosphate
  modified_base 9: mod_base = OTHER; note = 2'-fluoroguanosine-3'-phosphate
  modified_base 10: mod_base = OTHER; note = 2'-fluorouridine-3'-phosphate
  modified_base 11: mod_base = OTHER; note = 2'-fluoroguanosine-3'-phosphate
  modified_base 12: mod_base = OTHER; note = 2'-O-methyladenosine-3'-phosphate
  modified_base 13: mod_base = OTHER; note = 2'-O-methylcytidine-3'-phosphate
  modified_base 14: mod_base = OTHER; note = 2'-O-methyluridine-3'-phosphate
  modified_base 15: mod_base = OTHER; note = 2'-O-methylcytidine-3'-phosphate
  modified_base 16: mod_base = OTHER; note = 2'-O-methyladenosine-3'-phosphate
  modified_base 17: mod_base = OTHER; note = 2'-O-methyladenosine-3'-phosphate
  modified_base 18: mod_base = OTHER; note = 2'-O-methylguanosine-3'-phosphate
  modified_base 19: mod_base = OTHER; note = 2'-O-methyluridine-3'-phosphate
  modified_base 20: mod_base = OTHER; note = 2'-O-methylguanosine-3'-phosphate
  modified_base 21: mod_base = OTHER; note = 2'-O-methyluridine-3'-phosphate N-[tris(GalNAc-alkyl)-amidodecanoyl)]-4-hydroxyprolinol (Hyp-(GalNAc-alkyl)3)
acttctcggtgactcaagtgt

SEQ ID NO: 710 - RNA, 21 nt, synthetic construct
  source 1..21: mol_type = other RNA
  modified_base 1: mod_base = OTHER; note = 2'-O-methylcytidine-3'-phosphorothioate
  modified_base 2: mod_base = OTHER; note = 2'-O-methyluridine-3'-phosphorothioate
  modified_base 3: mod_base = OTHER; note = 2'-O-methyluridine-3'-phosphate
  modified_base 4: mod_base = OTHER; note = 2'-O-methylcytidine-3'-phosphate
  modified_base 5: mod_base = OTHER; note = 2'-O-methyluridine-3'-phosphate
  modified_base 6: mod_base = OTHER; note = 2'-O-methylcytidine-3'-phosphate
  modified_base 7: mod_base = OTHER; note = 2'-fluoroguanosine-3'-phosphate
  modified_base 8: mod_base = OTHER; note = 2'-O-methylguanosine-3'-phosphate
  modified_base 9: mod_base = OTHER; note = 2'-fluorouridine-3'-phosphate
  modified_base 10: mod_base = OTHER; note = 2'-fluoroguanosine-3'-phosphate
  modified_base 11: mod_base = OTHER; note = 2'-fluoroadenosine-3'-phosphate
  modified_base 12: mod_base = OTHER; note = 2'-O-methylcytidine-3'-phosphate
  modified_base 13: mod_base = OTHER; note = 2'-O-methyluridine-3'-phosphate
  modified_base 14: mod_base = OTHER; note = 2'-O-methylcytidine-3'-phosphate
  modified_base 15: mod_base = OTHER; note = 2'-O-methyladenosine-3'-phosphate
  modified_base 16: mod_base = OTHER; note = 2'-O-methyladenosine-3'-phosphate
  modified_base 17: mod_base = OTHER; note = 2'-O-methylguanosine-3'-phosphate
  modified_base 18: mod_base = OTHER; note = 2'-O-methyluridine-3'-phosphate
  modified_base 19: mod_base = OTHER; note = 2'-O-methylguanosine-3'-phosphate
  modified_base 20: mod_base = OTHER; note = 2'-O-methylcytidine-3'-phosphate
  modified_base 21: mod_base = OTHER; note = 2'-O-methyluridine-3'-phosphate N-[tris(GalNAc-alkyl)-amidodecanoyl)]-4-hydroxyprolinol (Hyp-(GalNAc-alkyl)3)
cttctcggtgactcaagtgct

SEQ ID NO: 711 - RNA, 21 nt, synthetic construct
  source 1..21: mol_type = other RNA
  modified_base 1: mod_base = OTHER; note = 2'-O-methylguanosine-3'-phosphorothioate
  modified_base 2: mod_base = OTHER; note = 2'-O-methyladenosine-3'-phosphorothioate
  modified_base 3: mod_base = OTHER; note = 2'-O-methylcytidine-3'-phosphate
  modified_base 4: mod_base = OTHER; note = 2'-O-methyluridine-3'-phosphate
  modified_base 5: mod_base = OTHER; note = 2'-O-methylcytidine-3'-phosphate
  modified_base 6: mod_base = OTHER; note = 2'-O-methyladenosine-3'-phosphate
  modified_base 7: mod_base = OTHER; note = 2'-fluoroadenosine-3'-phosphate
  modified_base 8: mod_base = OTHER; note = 2'-O-methylguanosine-3'-phosphate
  modified_base 9: mod_base = OTHER; note = 2'-fluorouridine-3'-phosphate
  modified_base 10: mod_base = OTHER; note = 2'-fluoroguanosine-3'-phosphate
  modified_base 11: mod_base = OTHER; note = 2'-fluorocytidine-3'-phosphate
  modified_base 12: mod_base = OTHER; note = 2'-O-methylcytidine-3'-phosphate
  modified_base 13: mod_base = OTHER; note = 2'-O-methylcytidine-3'-phosphate
  modified_base 14: mod_base = OTHER; note = 2'-O-methyluridine-3'-phosphate
  modified_base 15: mod_base = OTHER; note = 2'-O-methyluridine-3'-phosphate
  modified_base 16: mod_base = OTHER; note = 2'-O-methylcytidine-3'-phosphate
  modified_base 17: mod_base = OTHER; note = 2'-O-methyladenosine-3'-phosphate
  modified_base 18: mod_base = OTHER; note = 2'-O-methylcytidine-3'-phosphate
  modified_base 19: mod_base = OTHER; note = 2'-O-methyluridine-3'-phosphate
  modified_base 20: mod_base = OTHER; note = 2'-O-methylguanosine-3'-phosphate
  modified_base 21: mod_base = OTHER; note = 2'-O-methyluridine-3'-phosphate N-[tris(GalNAc-alkyl)-amidodecanoyl)]-4-hydroxyprolinol (Hyp-(GalNAc-alkyl)3)
gactcaagtgcccttcactgt

SEQ ID NO: 712 - RNA, 21 nt, synthetic construct
  source 1..21: mol_type = other RNA
  modified_base 1: mod_base = OTHER; note = 2'-O-methylcytidine-3'-phosphorothioate
  modified_base 2: mod_base = OTHER; note = 2'-O-methyluridine-3'-phosphorothioate
  modified_base 3: mod_base = OTHER; note = 2'-O-methylcytidine-3'-phosphate
  modified_base 4: mod_base = OTHER; note = 2'-O-methyladenosine-3'-phosphate
  modified_base 5: mod_base = OTHER; note = 2'-O-methyladenosine-3'-phosphate
  modified_base 6: mod_base = OTHER; note = 2'-O-methylguanosine-3'-phosphate
  modified_base 7: mod_base = OTHER; note = 2'-fluorouridine-3'-phosphate
  modified_base 8: mod_base = OTHER; note = 2'-O-methylguanosine-3'-phosphate
  modified_base 9: mod_base = OTHER; note = 2'-fluorocytidine-3'-phosphate
  modified_base 10: mod_base = OTHER; note = 2'-fluorocytidine-3'-phosphate
  modified_base 11: mod_base = OTHER; note = 2'-fluorocytidine-3'-phosphate
  modified_base 12: mod_base = OTHER; note = 2'-O-methyluridine-3'-phosphate
  modified_base 13: mod_base = OTHER; note = 2'-O-methyluridine-3'-phosphate
  modified_base 14: mod_base = OTHER; note = 2'-O-methylcytidine-3'-phosphate
  modified_base 15: mod_base = OTHER; note = 2'-O-methyladenosine-3'-phosphate
  modified_base 16: mod_base = OTHER; note = 2'-O-methylcytidine-3'-phosphate
  modified_base 17: mod_base = OTHER; note = 2'-O-methyluridine-3'-phosphate
  modified_base 18: mod_base = OTHER; note = 2'-O-methylguanosine-3'-phosphate
  modified_base 19: mod_base = OTHER; note = 2'-O-methyladenosine-3'-phosphate
  modified_base 20: mod_base = OTHER; note = 2'-O-methylguanosine-3'-phosphate
  modified_base 21: mod_base = OTHER; note = 2'-O-methyluridine-3'-phosphate N-[tris(GalNAc-alkyl)-amidodecanoyl)]-4-hydroxyprolinol (Hyp-(GalNAc-alkyl)3)
ctcaagtgcccttcactgagt

SEQ ID NO: 713 - RNA, 21 nt, synthetic construct
  source 1..21: mol_type = other RNA
  modified_base 1: mod_base = OTHER; note = 2'-O-methylguanosine-3'-phosphorothioate
  modified_base 2: mod_base = OTHER; note = 2'-O-methylcytidine-3'-phosphorothioate
  modified_base 3: mod_base = OTHER; note = 2'-O-methyluridine-3'-phosphate
  modified_base 4: mod_base = OTHER; note = 2'-O-methylguanosine-3'-phosphate
  modified_base 5: mod_base = OTHER; note = 2'-O-methyladenosine-3'-phosphate
  modified_base 6: mod_base = OTHER; note = 2'-O-methyluridine-3'-phosphate
  modified_base 7: mod_base = OTHER; note = 2'-fluorocytidine-3'-phosphate
  modified_base 8: mod_base = OTHER; note = 2'-O-methylcytidine-3'-phosphate
  modified_base 9: mod_base = OTHER; note = 2'-fluoroadenosine-3'-phosphate
  modified_base 10: mod_base = OTHER; note = 2'-fluoroguanosine-3'-phosphate
  modified_base 11: mod_base = OTHER; note = 2'-fluorocytidine-3'-phosphate
  modified_base 12: mod_base = OTHER; note = 2'-O-methylcytidine-3'-phosphate
  modified_base 13: mod_base = OTHER; note = 2'-O-methyluridine-3'-phosphate
  modified_base 14: mod_base = OTHER; note = 2'-O-methylcytidine-3'-phosphate
  modified_base 15: mod_base = OTHER; note = 2'-O-methyladenosine-3'-phosphate
  modified_base 16: mod_base = OTHER; note = 2'-O-methylcytidine-3'-phosphate
  modified_base 17: mod_base = OTHER; note = 2'-O-methyluridine-3'-phosphate
  modified_base 18: mod_base = OTHER; note = 2'-O-methyladenosine-3'-phosphate
  modified_base 19: mod_base = OTHER; note = 2'-O-methyluridine-3'-phosphate
  modified_base 20: mod_base = OTHER; note = 2'-O-methylguanosine-3'-phosphate
  modified_base 21: mod_base = OTHER; note = 2'-O-methyluridine-3'-phosphate N-[tris(GalNAc-alkyl)-amidodecanoyl)]-4-hydroxyprolinol (Hyp-(GalNAc-alkyl)3)
gctgatccagcctcactatgt

SEQ ID NO: 714 - RNA, 21 nt, synthetic construct
  source 1..21: mol_type = other RNA
  modified_base 1: mod_base = OTHER; note = 2'-O-methylguanosine-3'-phosphorothioate
  modified_base 2: mod_base = OTHER; note = 2'-O-methyluridine-3'-phosphorothioate
  modified_base 3: mod_base = OTHER; note = 2'-O-methylguanosine-3'-phosphate
  modified_base 4: mod_base = OTHER; note = 2'-O-methylguanosine-3'-phosphate
  modified_base 5: mod_base = OTHER; note = 2'-O-methyladenosine-3'-phosphate
  modified_base 6: mod_base = OTHER; note = 2'-O-methylguanosine-3'-phosphate
  modified_base 7: mod_base = OTHER; note = 2'-fluoroguanosine-3'-phosphate
  modified_base 8: mod_base = OTHER; note = 2'-O-methylguanosine-3'-phosphate
  modified_base 9: mod_base = OTHER; note = 2'-fluorouridine-3'-phosphate
  modified_base 10: mod_base = OTHER; note = 2'-fluorocytidine-3'-phosphate
  modified_base 11: mod_base = OTHER; note = 2'-fluorouridine-3'-phosphate
  modified_base 12: mod_base = OTHER; note = 2'-O-methylcytidine-3'-phosphate
  modified_base 13: mod_base = OTHER; note = 2'-O-methyladenosine-3'-phosphate
  modified_base 14: mod_base = OTHER; note = 2'-O-methylcytidine-3'-phosphate
  modified_base 15: mod_base = OTHER; note = 2'-O-methyluridine-3'-phosphate
  modified_base 16: mod_base = OTHER; note = 2'-O-methyluridine-3'-phosphate
  modified_base 17: mod_base = OTHER; note = 2'-O-methyluridine-3'-phosphate
  modified_base 18: mod_base = OTHER; note = 2'-O-methylcytidine-3'-phosphate
  modified_base 19: mod_base = OTHER; note = 2'-O-methylcytidine-3'-phosphate
  modified_base 20: mod_base = OTHER; note = 2'-O-methyladenosine-3'-phosphate
  modified_base 21: mod_base = OTHER; note = 2'-O-methyluridine-3'-phosphate N-[tris(GalNAc-alkyl)-amidodecanoyl)]-4-hydroxyprolinol (Hyp-(GalNAc-alkyl)3)
gtggagggtctcactttccat

SEQ ID NO: 715 - RNA, 21 nt, synthetic construct
  source 1..21: mol_type = other RNA
  modified_base 1: mod_base = OTHER; note = 2'-O-methylcytidine-3'-phosphorothioate
  modified_base 2: mod_base = OTHER; note = 2'-O-methyluridine-3'-phosphorothioate
  modified_base 3: mod_base = OTHER; note = 2'-O-methylcytidine-3'-phosphate
  modified_base 4: mod_base = OTHER; note = 2'-O-methyladenosine-3'-phosphate
  modified_base 5: mod_base = OTHER; note = 2'-O-methylcytidine-3'-phosphate
  modified_base 6: mod_base = OTHER; note = 2'-O-methyluridine-3'-phosphate
  modified_base 7: mod_base = OTHER; note = 2'-fluorouridine-3'-phosphate
  modified_base 8: mod_base = OTHER; note = 2'-O-methyluridine-3'-phosphate
  modified_base 9: mod_base = OTHER; note = 2'-fluorocytidine-3'-phosphate
  modified_base 10: mod_base = OTHER; note = 2'-fluorocytidine-3'-phosphate
  modified_base 11: mod_base = OTHER; note = 2'-fluoroadenosine-3'-phosphate
  modified_base 12: mod_base = OTHER; note = 2'-O-methylguanosine-3'-phosphate
  modified_base 13: mod_base = OTHER; note = 2'-O-methylcytidine-3'-phosphate
  modified_base 14: mod_base = OTHER; note = 2'-O-methyladenosine-3'-phosphate
  modified_base 15: mod_base = OTHER; note = 2'-O-methyladenosine-3'-phosphate
  modified_base 16: mod_base = OTHER; note = 2'-O-methyladenosine-3'-phosphate
  modified_base 17: mod_base = OTHER; note = 2'-O-methyladenosine-3'-phosphate
  modified_base 18: mod_base = OTHER; note = 2'-O-methylcytidine-3'-phosphate
  modified_base 19: mod_base = OTHER; note = 2'-O-methyluridine-3'-phosphate
  modified_base 20: mod_base = OTHER; note = 2'-O-methylcytidine-3'-phosphate
  modified_base 21: mod_base = OTHER; note = 2'-O-methyluridine-3'-phosphate N-[tris(GalNAc-alkyl)-amidodecanoyl)]-4-hydroxyprolinol (Hyp-(GalNAc-alkyl)3)
ctcactttccagcaaaactct

SEQ ID NO: 716 - RNA, 21 nt, synthetic construct
  source 1..21: mol_type = other RNA
  modified_base 1: mod_base = OTHER; note = 2'-O-methylcytidine-3'-phosphorothioate
  modified_base 2: mod_base = OTHER; note = 2'-O-methyladenosine-3'-phosphorothioate
  modified_base 3: mod_base = OTHER; note = 2'-O-methylguanosine-3'-phosphate
  modified_base 4: mod_base = OTHER; note = 2'-O-methylcytidine-3'-phosphate
  modified_base 5: mod_base = OTHER; note = 2'-O-methyladenosine-3'-phosphate
  modified_base 6: mod_base = OTHER; note = 2'-O-methyladenosine-3'-phosphate
  modified_base 7: mod_base = OTHER; note = 2'-fluoroadenosine-3'-phosphate
  modified_base 8: mod_base = OTHER; note = 2'-O-methyladenosine-3'-phosphate
  modified_base 9: mod_base = OTHER; note = 2'-fluorocytidine-3'-phosphate
  modified_base 10: mod_base = OTHER; note = 2'-fluorouridine-3'-phosphate
  modified_base 11: mod_base = OTHER; note = 2'-fluorocytidine-3'-phosphate
  modified_base 12: mod_base = OTHER; note = 2'-O-methylcytidine-3'-phosphate
  modified_base 13: mod_base = OTHER; note = 2'-O-methylcytidine-3'-phosphate
  modified_base 14: mod_base = OTHER; note = 2'-O-methyluridine-3'-phosphate
  modified_base 15: mod_base = OTHER; note = 2'-O-methylcytidine-3'-phosphate
  modified_base 16: mod_base = OTHER; note = 2'-O-methyladenosine-3'-phosphate
  modified_base 17: mod_base = OTHER; note = 2'-O-methyladenosine-3'-phosphate
  modified_base 18: mod_base = OTHER; note = 2'-O-methylcytidine-3'-phosphate
  modified_base 19: mod_base = OTHER; note = 2'-O-methyluridine-3'-phosphate
  modified_base 20: mod_base = OTHER; note = 2'-O-methylguanosine-3'-phosphate
  modified_base 21: mod_base = OTHER; note = 2'-O-methyluridine-3'-phosphate N-[tris(GalNAc-alkyl)-amidodecanoyl)]-4-hydroxyprolinol (Hyp-(GalNAc-alkyl)3)
cagcaaaactccctcaactgt

SEQ ID NO: 717 - RNA, 21 nt, synthetic construct
  source 1..21: mol_type = other RNA
  modified_base 1: mod_base = OTHER; note = 2'-O-methyladenosine-3'-phosphorothioate
  modified_base 2: mod_base = OTHER; note = 2'-O-methylguanosine-3'-phosphorothioate
  modified_base 3: mod_base = OTHER; note = 2'-O-methylcytidine-3'-phosphate
  modified_base 4: mod_base = OTHER; note = 2'-O-methyladenosine-3'-phosphate
  modified_base 5: mod_base = OTHER; note = 2'-O-methyladenosine-3'-phosphate
  modified_base 6: mod_base = OTHER; note = 2'-O-methyladenosine-3'-phosphate
  modified_base 7: mod_base = OTHER; note = 2'-fluoroadenosine-3'-phosphate
  modified_base 8: mod_base = OTHER; note = 2'-O-methylcytidine-3'-phosphate
  modified_base 9: mod_base = OTHER; note = 2'-fluorouridine-3'-phosphate
  modified_base 10: mod_base = OTHER; note = 2'-fluorocytidine-3'-phosphate
  modified_base 11: mod_base = OTHER; note = 2'-fluorocytidine-3'-phosphate
  modified_base 12: mod_base = OTHER; note = 2'-O-methylcytidine-3'-phosphate
  modified_base 13: mod_base = OTHER; note = 2'-O-methyluridine-3'-phosphate
  modified_base 14: mod_base = OTHER; note = 2'-O-methylcytidine-3'-phosphate
  modified_base 15: mod_base = OTHER; note = 2'-O-methyladenosine-3'-phosphate
  modified_base 16: mod_base = OTHER; note = 2'-O-methyladenosine-3'-phosphate
  modified_base 17: mod_base = OTHER; note = 2'-O-methylcytidine-3'-phosphate
  modified_base 18: mod_base = OTHER; note = 2'-O-methyluridine-3'-phosphate
  modified_base 19: mod_base = OTHER; note = 2'-O-methylguanosine-3'-phosphate
  modified_base 20: mod_base = OTHER; note = 2'-O-methylguanosine-3'-phosphate
  modified_base 21: mod_base = OTHER; note = 2'-O-methyluridine-3'-phosphate N-[tris(GalNAc-alkyl)-amidodecanoyl)]-4-hydroxyprolinol (Hyp-(GalNAc-alkyl)3)
agcaaaactccctcaactggt

SEQ ID NO: 718 - RNA, 21 nt, synthetic construct
  source 1..21: mol_type = other RNA
  modified_base 1: mod_base = OTHER; note = 2'-O-methyladenosine-3'-phosphorothioate
  modified_base 2: mod_base = OTHER; note = 2'-O-methyladenosine-3'-phosphorothioate
  modified_base 3: mod_base = OTHER; note = 2'-O-methyladenosine-3'-phosphate
  modified_base 4: mod_base = OTHER; note = 2'-O-methyladenosine-3'-phosphate
  modified_base 5: mod_base = OTHER; note = 2'-O-methylcytidine-3'-phosphate
  modified_base 6: mod_base = OTHER; note = 2'-O-methyluridine-3'-phosphate
  modified_base 7: mod_base = OTHER; note = 2'-fluorocytidine-3'-phosphate
  modified_base 8: mod_base = OTHER; note = 2'-O-methylcytidine-3'-phosphate
  modified_base 9: mod_base = OTHER; note = 2'-fluorocytidine-3'-phosphate
  modified_base 10: mod_base = OTHER; note = 2'-fluorouridine-3'-phosphate
  modified_base 11: mod_base = OTHER; note = 2'-fluorocytidine-3'-phosphate
  modified_base 12: mod_base = OTHER; note = 2'-O-methyladenosine-3'-phosphate
  modified_base 13: mod_base = OTHER; note = 2'-O-methyladenosine-3'-phosphate
  modified_base 14: mod_base = OTHER; note = 2'-O-methylcytidine-3'-phosphate
  modified_base 15: mod_base = OTHER; note = 2'-O-methyluridine-3'-phosphate
  modified_base 16: mod_base = OTHER; note = 2'-O-methylguanosine-3'-phosphate
  modified_base 17: mod_base = OTHER; note = 2'-O-methylguanosine-3'-phosphate
  modified_base 18: mod_base = OTHER; note = 2'-O-methyladenosine-3'-phosphate
  modified_base 19: mod_base = OTHER; note = 2'-O-methyluridine-3'-phosphate
  modified_base 20: mod_base = OTHER; note = 2'-O-methylguanosine-3'-phosphate
  modified_base 21: mod_base = OTHER; note = 2'-O-methyluridine-3'-phosphate N-[tris(GalNAc-alkyl)-amidodecanoyl)]-4-hydroxyprolinol (Hyp-(GalNAc-alkyl)3)
aaaactccctcaactggatgt

SEQ ID NO: 719 - RNA, 21 nt, synthetic construct
  source 1..21: mol_type = other RNA
  modified_base 1: mod_base = OTHER; note = 2'-O-methyladenosine-3'-phosphorothioate
  modified_base 2: mod_base = OTHER; note = 2'-O-methylcytidine-3'-phosphorothioate
  modified_base 3: mod_base = OTHER; note = 2'-O-methyluridine-3'-phosphate
  modified_base 4: mod_base = OTHER; note = 2'-O-methylcytidine-3'-phosphate
  modified_base 5: mod_base = OTHER; note = 2'-O-methylcytidine-3'-phosphate
  modified_base 6: mod_base = OTHER; note = 2'-O-methylcytidine-3'-phosphate
  modified_base 7: mod_base = OTHER; note = 2'-fluorouridine-3'-phosphate
  modified_base 8: mod_base = OTHER; note = 2'-O-methylcytidine-3'-phosphate
  modified_base 9: mod_base = OTHER; note = 2'-fluoroadenosine-3'-phosphate
  modified_base 10: mod_base = OTHER; note = 2'-fluoroadenosine-3'-phosphate
  modified_base 11: mod_base = OTHER; note = 2'-fluorocytidine-3'-phosphate
  modified_base 12: mod_base = OTHER; note = 2'-O-methyluridine-3'-phosphate
  modified_base 13: mod_base = OTHER; note = 2'-O-methylguanosine-3'-phosphate
  modified_base 14: mod_base = OTHER; note = 2'-O-methylguanosine-3'-phosphate
  modified_base 15: mod_base = OTHER; note = 2'-O-methyladenosine-3'-phosphate
  modified_base 16: mod_base = OTHER; note = 2'-O-methyluridine-3'-phosphate
  modified_base 17: mod_base = OTHER; note = 2'-O-methylguanosine-3'-phosphate
  modified_base 18: mod_base = OTHER; note = 2'-O-methyladenosine-3'-phosphate
  modified_base 19: mod_base = OTHER; note = 2'-O-methyladenosine-3'-phosphate
  modified_base 20: mod_base = OTHER; note = 2'-O-methylguanosine-3'-phosphate
  modified_base 21: mod_base = OTHER; note = 2'-O-methyluridine-3'-phosphate N-[tris(GalNAc-alkyl)-amidodecanoyl)]-4-hydroxyprolinol (Hyp-(GalNAc-alkyl)3)
actccctcaactggatgaagt

SEQ ID NO: 720 - RNA, 21 nt, synthetic construct
  source 1..21: mol_type = other RNA
  modified_base 1: mod_base = OTHER; note = 2'-O-methylcytidine-3'-phosphorothioate
  modified_base 2: mod_base = OTHER; note = 2'-O-methyluridine-3'-phosphorothioate
  modified_base 3: mod_base = OTHER; note = 2'-O-methylguanosine-3'-phosphate
  modified_base 4: mod_base = OTHER; note = 2'-O-methylguanosine-3'-phosphate
  modified_base 5: mod_base = OTHER; note = 2'-O-methyladenosine-3'-phosphate
  modified_base 6: mod_base = OTHER; note = 2'-O-methyluridine-3'-phosphate
  modified_base 7: mod_base = OTHER; note = 2'-fluoroguanosine-3'-phosphate
  modified_base 8: mod_base = OTHER; note = 2'-O-methyladenosine-3'-phosphate
  modified_base 9: mod_base = OTHER; note = 2'-fluoroadenosine-3'-phosphate
  modified_base 10: mod_base = OTHER; note = 2'-fluoroguanosine-3'-phosphate
  modified_base 11: mod_base = OTHER; note = 2'-fluoroadenosine-3'-phosphate
  modified_base 12: mod_base = OTHER; note = 2'-O-methyladenosine-3'-phosphate
  modified_base 13: mod_base = OTHER; note = 2'-O-methyladenosine-3'-phosphate
  modified_base 14: mod_base = OTHER; note = 2'-O-methylcytidine-3'-phosphate
  modified_base 15: mod_base = OTHER; note = 2'-O-methyluridine-3'-phosphate
  modified_base 16: mod_base = OTHER; note = 2'-O-methyladenosine-3'-phosphate
  modified_base 17: mod_base = OTHER; note = 2'-O-methyluridine-3'-phosphate
  modified_base 18: mod_base = OTHER; note = 2'-O-methylcytidine-3'-phosphate
  modified_base 19: mod_base = OTHER; note = 2'-O-methyluridine-3'-phosphate
  modified_base 20: mod_base = OTHER; note = 2'-O-methylcytidine-3'-phosphate
  modified_base 21: mod_base = OTHER; note = 2'-O-methyluridine-3'-phosphate N-[tris(GalNAc-alkyl)-amidodecanoyl)]-4-hydroxyprolinol (Hyp-(GalNAc-alkyl)3)
ctggatgaagaaactatctct

SEQ ID NO: 721 - RNA, 21 nt, synthetic construct
  source 1..21: mol_type = other RNA
  modified_base 1: mod_base = OTHER; note = 2'-O-methyladenosine-3'-phosphorothioate
  modified_base 2: mod_base = OTHER; note = 2'-O-methylcytidine-3'-phosphorothioate
  modified_base 3: mod_base = OTHER; note = 2'-O-methyluridine-3'-phosphate
  modified_base 4: mod_base = OTHER; note = 2'-O-methylguanosine-3'-phosphate
  modified_base 5: mod_base = OTHER; note = 2'-O-methylguanosine-3'-phosphate
  modified_base 6: mod_base = OTHER; note = 2'-O-methyluridine-3'-phosphate
  modified_base 7: mod_base = OTHER; note = 2'-fluoroguanosine-3'-phosphate
  modified_base 8: mod_base = OTHER; note = 2'-O-methylcytidine-3'-phosphate
  modified_base 9: mod_base = OTHER; note = 2'-fluorouridine-3'-phosphate
  modified_base 10: mod_base = OTHER; note = 2'-fluoroguanosine-3'-phosphate
  modified_base 11: mod_base = OTHER; note = 2'-fluorocytidine-3'-phosphate
  modified_base 12: mod_base = OTHER; note = 2'-O-methyladenosine-3'-phosphate
  modified_base 13: mod_base = OTHER; note = 2'-O-methyladenosine-3'-phosphate
  modified_base 14: mod_base = OTHER; note = 2'-O-methylguanosine-3'-phosphate
  modified_base 15: mod_base = OTHER; note = 2'-O-methylguanosine-3'-phosphate
  modified_base 16: mod_base = OTHER; note = 2'-O-methyladenosine-3'-phosphate
  modified_base 17: mod_base = OTHER; note = 2'-O-methyluridine-3'-phosphate
  modified_base 18: mod_base = OTHER; note = 2'-O-methylcytidine-3'-phosphate
  modified_base 19: mod_base = OTHER; note = 2'-O-methyluridine-3'-phosphate
  modified_base 20: mod_base = OTHER; note = 2'-O-methyluridine-3'-phosphate
  modified_base 21: mod_base = OTHER; note = 2'-O-methyluridine-3'-phosphate N-[tris(GalNAc-alkyl)-amidodecanoyl)]-4-hydroxyprolinol (Hyp-(GalNAc-alkyl)3)
actggtgctgcaaggatcttt

SEQ ID NO: 722 - RNA, 21 nt, synthetic construct
  source 1..21: mol_type = other RNA
  modified_base 1: mod_base = OTHER; note = 2'-O-methylguanosine-3'-phosphorothioate
  modified_base 2: mod_base = OTHER; note = 2'-O-methylguanosine-3'-phosphorothioate
  modified_base 3: mod_base = OTHER; note = 2'-O-methyluridine-3'-phosphate
  modified_base 4: mod_base = OTHER; note = 2'-O-methylguanosine-3'-phosphate
  modified_base 5: mod_base = OTHER; note = 2'-O-methylcytidine-3'-phosphate
  modified_base 6: mod_base = OTHER; note = 2'-O-methyluridine-3'-phosphate
  modified_base 7: mod_base = OTHER; note = 2'-fluoroguanosine-3'-phosphate
  modified_base 8: mod_base = OTHER; note = 2'-O-methylcytidine-3'-phosphate
  modified_base 9: mod_base = OTHER; note = 2'-fluoroadenosine-3'-phosphate
  modified_base 10: mod_base = OTHER; note = 2'-fluoroadenosine-3'-phosphate
  modified_base 11: mod_base = OTHER; note = 2'-fluoroguanosine-3'-phosphate
  modified_base 12: mod_base = OTHER; note = 2'-O-methylguanosine-3'-phosphate
  modified_base 13: mod_base = OTHER; note = 2'-O-methyladenosine-3'-phosphate
  modified_base 14: mod_base = OTHER; note = 2'-O-methyluridine-3'-phosphate
  modified_base 15: mod_base = OTHER; note = 2'-O-methylcytidine-3'-phosphate
  modified_base 16: mod_base = OTHER; note = 2'-O-methyluridine-3'-phosphate
  modified_base 17: mod_base = OTHER; note = 2'-O-methyluridine-3'-phosphate
  modified_base 18: mod_base = OTHER; note = 2'-O-methyladenosine-3'-phosphate
  modified_base 19: mod_base = OTHER; note = 2'-O-methyluridine-3'-phosphate
  modified_base 20: mod_base = OTHER; note = 2'-O-methylguanosine-3'-phosphate
  modified_base 21: mod_base = OTHER; note = 2'-O-methyluridine-3'-phosphate N-[tris(GalNAc-alkyl)-amidodecanoyl)]-4-hydroxyprolinol (Hyp-(GalNAc-alkyl)3)
ggtgctgcaaggatcttatgt

SEQ ID NO: 723 - RNA, 21 nt, synthetic construct
  source 1..21: mol_type = other RNA
  modified_base 1: mod_base = OTHER; note = 2'-O-methylguanosine-3'-phosphorothioate
  modified_base 2: mod_base = OTHER; note = 2'-O-methyluridine-3'-phosphorothioate
  modified_base 3: mod_base = OTHER; note = 2'-O-methylguanosine-3'-phosphate
  modified_base 4: mod_base = OTHER; note = 2'-O-methylcytidine-3'-phosphate
  modified_base 5: mod_base = OTHER; note = 2'-O-methyluridine-3'-phosphate
  modified_base 6: mod_base = OTHER; note = 2'-O-methylguanosine-3'-phosphate
  modified_base 7: mod_base = OTHER; note = 2'-fluorocytidine-3'-phosphate
  modified_base 8: mod_base = OTHER; note = 2'-O-methyladenosine-3'-phosphate
  modified_base 9: mod_base = OTHER; note = 2'-fluoroadenosine-3'-phosphate
  modified_base 10: mod_base = OTHER; note = 2'-fluoroguanosine-3'-phosphate
  modified_base 11: mod_base = OTHER; note = 2'-fluoroguanosine-3'-phosphate
  modified_base 12: mod_base = OTHER; note = 2'-O-methyladenosine-3'-phosphate
  modified_base 13: mod_base = OTHER; note = 2'-O-methyluridine-3'-phosphate
  modified_base 14: mod_base = OTHER; note = 2'-O-methylcytidine-3'-phosphate
  modified_base 15: mod_base = OTHER; note = 2'-O-methyluridine-3'-phosphate
  modified_base 16: mod_base = OTHER; note = 2'-O-methyluridine-3'-phosphate
  modified_base 17: mod_base = OTHER; note = 2'-O-methyladenosine-3'-phosphate
  modified_base 18: mod_base = OTHER; note = 2'-O-methyluridine-3'-phosphate
  modified_base 19: mod_base = OTHER; note = 2'-O-methylguanosine-3'-phosphate
  modified_base 20: mod_base = OTHER; note = 2'-O-methyladenosine-3'-phosphate
  modified_base 21: mod_base = OTHER; note = 2'-O-methyluridine-3'-phosphate N-[tris(GalNAc-alkyl)-amidodecanoyl)]-4-hydroxyprolinol (Hyp-(GalNAc-alkyl)3)
gtgctgcaaggatcttatgat

SEQ ID NO: 724 - RNA, 21 nt, synthetic construct
  source 1..21: mol_type = other RNA
  modified_base 1: mod_base = OTHER; note = 2'-O-methyluridine-3'-phosphorothioate
  modified_base 2: mod_base = OTHER; note = 2'-O-methylguanosine-3'-phosphorothioate
  modified_base 3: mod_base = OTHER; note = 2'-O-methylcytidine-3'-phosphate
  modified_base 4: mod_base = OTHER; note = 2'-O-methyluridine-3'-phosphate
  modified_base 5: mod_base = OTHER; note = 2'-O-methylguanosine-3'-phosphate
  modified_base 6: mod_base = OTHER; note = 2'-O-methylcytidine-3'-phosphate
  modified_base 7: mod_base = OTHER; note = 2'-fluoroadenosine-3'-phosphate
  modified_base 8: mod_base = OTHER; note = 2'-O-methyladenosine-3'-phosphate
  modified_base 9: mod_base = OTHER; note = 2'-fluoroguanosine-3'-phosphate
  modified_base 10: mod_base = OTHER; note = 2'-fluoroguanosine-3'-phosphate
  modified_base 11: mod_base = OTHER; note = 2'-fluoroadenosine-3'-phosphate
  modified_base 12: mod_base = OTHER; note = 2'-O-methyluridine-3'-phosphate
  modified_base 13: mod_base = OTHER; note = 2'-O-methylcytidine-3'-phosphate
  modified_base 14: mod_base = OTHER; note = 2'-O-methyluridine-3'-phosphate
  modified_base 15: mod_base = OTHER; note = 2'-O-methyluridine-3'-phosphate
  modified_base 16: mod_base = OTHER; note = 2'-O-methyladenosine-3'-phosphate
  modified_base 17: mod_base = OTHER; note = 2'-O-methyluridine-3'-phosphate
  modified_base 18: mod_base = OTHER; note = 2'-O-methylguanosine-3'-phosphate
  modified_base 19: mod_base = OTHER; note = 2'-O-methyladenosine-3'-phosphate
  modified_base 20: mod_base = OTHER; note = 2'-O-methylcytidine-3'-phosphate
  modified_base 21: mod_base = OTHER; note = 2'-O-methyluridine-3'-phosphate N-[tris(GalNAc-alkyl)-amidodecanoyl)]-4-hydroxyprolinol (Hyp-(GalNAc-alkyl)3)
tgctgcaaggatcttatgact

SEQ ID NO: 725 - RNA, 21 nt, synthetic construct
  source 1..21: mol_type = other RNA
  modified_base 1: mod_base = OTHER; note = 2'-O-methylcytidine-3'-phosphorothioate
  modified_base 2: mod_base = OTHER; note = 2'-O-methyluridine-3'-phosphorothioate
  modified_base 3: mod_base = OTHER; note = 2'-O-methyluridine-3'-phosphate
  modified_base 4: mod_base = OTHER; note = 2'-O-methyladenosine-3'-phosphate
  modified_base 5: mod_base = OTHER; note = 2'-O-methyluridine-3'-phosphate
  modified_base 6: mod_base = OTHER; note = 2'-O-methylguanosine-3'-phosphate
  modified_base 7: mod_base = OTHER; note = 2'-fluoroadenosine-3'-phosphate
  modified_base 8: mod_base = OTHER; note = 2'-O-methylcytidine-3'-phosphate
  modified_base 9: mod_base = OTHER; note = 2'-fluorocytidine-3'-phosphate
  modified_base 10: mod_base = OTHER; note = 2'-fluorouridine-3'-phosphate
  modified_base 11: mod_base = OTHER; note = 2'-fluoroguanosine-3'-phosphate
  modified_base 12: mod_base = OTHER; note = 2'-O-methylcytidine-3'-phosphate
  modified_base 13: mod_base = OTHER; note = 2'-O-methyladenosine-3'-phosphate
  modified_base 14: mod_base = OTHER; note = 2'-O-methylguanosine-3'-phosphate
  modified_base 15: mod_base = OTHER; note = 2'-O-methylguanosine-3'-phosphate
  modified_base 16: mod_base = OTHER; note = 2'-O-methyladenosine-3'-phosphate
  modified_base 17: mod_base = OTHER; note = 2'-O-methylcytidine-3'-phosphate
  modified_base 18: mod_base = OTHER; note = 2'-O-methylcytidine-3'-phosphate
  modified_base 19: mod_base = OTHER; note = 2'-O-methyluridine-3'-phosphate
  modified_base 20: mod_base = OTHER; note = 2'-O-methylguanosine-3'-phosphate
  modified_base 21: mod_base = OTHER; note = 2'-O-methyluridine-3'-phosphate N-[tris(GalNAc-alkyl)-amidodecanoyl)]-4-hydroxyprolinol (Hyp-(GalNAc-alkyl)3)
cttatgacctgcaggacctgt

SEQ ID NO: 726 - RNA, 21 nt, synthetic construct
  source 1..21: mol_type = other RNA
  modified_base 1: mod_base = OTHER; note = 2'-O-methylcytidine-3'-phosphorothioate
  modified_base 2: mod_base = OTHER; note = 2'-O-methylguanosine-3'-phosphorothioate
  modified_base 3: mod_base = OTHER; note = 2'-O-methyladenosine-3'-phosphate
  modified_base 4: mod_base = OTHER; note = 2'-O-methylguanosine-3'-phosphate
  modified_base 5: mod_base = OTHER; note = 2'-O-methylcytidine-3'-phosphate
  modified_base 6: mod_base = OTHER; note = 2'-O-methyluridine-3'-phosphate
  modified_base 7: mod_base = OTHER; note = 2'-fluoroguanosine-3'-phosphate
  modified_base 8: mod_base = OTHER; note = 2'-O-methyladenosine-3'-phosphate
  modified_base 9: mod_base = OTHER; note = 2'-fluoroadenosine-3'-phosphate
  modified_base 10: mod_base = OTHER; note = 2'-fluorocytidine-3'-phosphate
  modified_base 11: mod_base = OTHER; note = 2'-fluorocytidine-3'-phosphate
  modified_base 12: mod_base = OTHER; note = 2'-O-methyluridine-3'-phosphate
  modified_base 13: mod_base = OTHER; note = 2'-O-methylguanosine-3'-phosphate
  modified_base 14: mod_base = OTHER; note = 2'-O-methylcytidine-3'-phosphate
  modified_base 15: mod_base = OTHER; note = 2'-O-methyladenosine-3'-phosphate
  modified_base 16: mod_base = OTHER; note = 2'-O-methyladenosine-3'-phosphate
  modified_base 17: mod_base = OTHER; note = 2'-O-methyladenosine-3'-phosphate
  modified_base 18: mod_base = OTHER; note = 2'-O-methyladenosine-3'-phosphate
  modified_base 19: mod_base = OTHER; note = 2'-O-methyladenosine-3'-phosphate
  modified_base 20: mod_base = OTHER; note = 2'-O-methyluridine-3'-phosphate
  modified_base 21: mod_base = OTHER; note = 2'-O-methyluridine-3'-phosphate N-[tris(GalNAc-alkyl)-amidodecanoyl)]-4-hydroxyprolinol (Hyp-(GalNAc-alkyl)3)
cgagctgaacctgcaaaaatt

SEQ ID NO: 727 - RNA, 21 nt, synthetic construct
  source 1..21: mol_type = other RNA
  modified_base 1: mod_base = OTHER; note = 2'-O-methylguanosine-3'-phosphorothioate
  modified_base 2: mod_base = OTHER; note = 2'-O-methyladenosine-3'-phosphorothioate
  modified_base 3: mod_base = OTHER; note = 2'-O-methylguanosine-3'-phosphate
  modified_base 4: mod_base = OTHER; note = 2'-O-methylcytidine-3'-phosphate
  modified_base 5: mod_base = OTHER; note = 2'-O-methyluridine-3'-phosphate
  modified_base 6: mod_base = OTHER; note = 2'-O-methylguanosine-3'-phosphate
  modified_base 7: mod_base = OTHER; note = 2'-fluoroadenosine-3'-phosphate
  modified_base 8: mod_base = OTHER; note = 2'-O-methyladenosine-3'-phosphate
  modified_base 9: mod_base = OTHER; note = 2'-fluorocytidine-3'-phosphate
  modified_base 10: mod_base = OTHER; note = 2'-fluorocytidine-3'-phosphate
  modified_base 11: mod_base = OTHER; note = 2'-fluorouridine-3'-phosphate
  modified_base 12: mod_base = OTHER; note = 2'-O-methylguanosine-3'-phosphate
  modified_base 13: mod_base = OTHER; note = 2'-O-methylcytidine-3'-phosphate
  modified_base 14: mod_base = OTHER; note = 2'-O-methyladenosine-3'-phosphate
  modified_base 15: mod_base = OTHER; note = 2'-O-methyladenosine-3'-phosphate
  modified_base 16: mod_base = OTHER; note = 2'-O-methyladenosine-3'-phosphate
  modified_base 17: mod_base = OTHER; note = 2'-O-methyladenosine-3'-phosphate
  modified_base 18: mod_base = OTHER; note = 2'-O-methyladenosine-3'-phosphate
  modified_base 19: mod_base = OTHER; note = 2'-O-methyluridine-3'-phosphate
  modified_base 20: mod_base = OTHER; note = 2'-O-methyluridine-3'-phosphate
  modified_base 21: mod_base = OTHER; note = 2'-O-methyluridine-3'-phosphate N-[tris(GalNAc-alkyl)-amidodecanoyl)]-4-hydroxyprolinol (Hyp-(GalNAc-alkyl)3)
gagctgaacctgcaaaaattt

SEQ ID NO: 728 - RNA, 21 nt, synthetic construct
  source 1..21: mol_type = other RNA
  modified_base 1: mod_base = OTHER; note = 2'-O-methyladenosine-3'-phosphorothioate
  modified_base 2: mod_base = OTHER; note = 2'-O-methylguanosine-3'-phosphorothioate
  modified_base 3: mod_base = OTHER; note = 2'-O-methylcytidine-3'-phosphate
  modified_base 4: mod_base = OTHER; note = 2'-O-methyluridine-3'-phosphate
  modified_base 5: mod_base = OTHER; note = 2'-O-methylguanosine-3'-phosphate
  modified_base 6: mod_base = OTHER; note = 2'-O-methyladenosine-3'-phosphate
  modified_base 7: mod_base = OTHER; note = 2'-fluoroadenosine-3'-phosphate
  modified_base 8: mod_base = OTHER; note = 2'-O-methylcytidine-3'-phosphate
  modified_base 9: mod_base = OTHER; note = 2'-fluorocytidine-3'-phosphate
  modified_base 10: mod_base = OTHER; note = 2'-fluorouridine-3'-phosphate
  modified_base 11: mod_base = OTHER; note = 2'-fluoroguanosine-3'-phosphate
  modified_base 12: mod_base = OTHER; note = 2'-O-methylcytidine-3'-phosphate
  modified_base 13: mod_base = OTHER; note = 2'-O-methyladenosine-3'-phosphate
  modified_base 14: mod_base = OTHER; note = 2'-O-methyladenosine-3'-phosphate
  modified_base 15: mod_base = OTHER; note = 2'-O-methyladenosine-3'-phosphate
  modified_base 16: mod_base = OTHER; note = 2'-O-methyladenosine-3'-phosphate
  modified_base 17: mod_base = OTHER; note = 2'-O-methyladenosine-3'-phosphate
  modified_base 18: mod_base = OTHER; note = 2'-O-methyluridine-3'-phosphate
  modified_base 19: mod_base = OTHER; note = 2'-O-methyluridine-3'-phosphate
  modified_base 20: mod_base = OTHER; note = 2'-O-methylguanosine-3'-phosphate
  modified_base 21: mod_base = OTHER; note = 2'-O-methyluridine-3'-phosphate N-[tris(GalNAc-alkyl)-amidodecanoyl)]-4-hydroxyprolinol (Hyp-(GalNAc-alkyl)3)
agctgaacctgcaaaaattgt

SEQ ID NO: 729 - RNA, 21 nt, synthetic construct
  source 1..21: mol_type = other RNA
  modified_base 1: mod_base = OTHER; note = 2'-O-methylguanosine-3'-phosphorothioate
  modified_base 2: mod_base = OTHER; note = 2'-O-methylcytidine-3'-phosphorothioate
  modified_base 3: mod_base = OTHER; note = 2'-O-methyluridine-3'-phosphate
  modified_base 4: mod_base = OTHER; note = 2'-O-methylguanosine-3'-phosphate
  modified_base 5: mod_base = OTHER; note = 2'-O-methyladenosine-3'-phosphate
  modified_base 6: mod_base = OTHER; note = 2'-O-methyladenosine-3'-phosphate
  modified_base 7: mod_base = OTHER; note = 2'-fluorocytidine-3'-phosphate
  modified_base 8: mod_base = OTHER; note = 2'-O-methylcytidine-3'-phosphate
  modified_base 9: mod_base = OTHER; note = 2'-fluorouridine-3'-phosphate
  modified_base 10: mod_base = OTHER; note = 2'-fluoroguanosine-3'-phosphate
  modified_base 11: mod_base = OTHER; note = 2'-fluorocytidine-3'-phosphate
  modified_base 12: mod_base = OTHER; note = 2'-O-methyladenosine-3'-phosphate
  modified_base 13: mod_base = OTHER; note = 2'-O-methyladenosine-3'-phosphate
  modified_base 14: mod_base = OTHER; note = 2'-O-methyladenosine-3'-phosphate
  modified_base 15: mod_base = OTHER; note = 2'-O-methyladenosine-3'-phosphate
  modified_base 16: mod_base = OTHER; note = 2'-O-methyladenosine-3'-phosphate
  modified_base 17: mod_base = OTHER; note = 2'-O-methyluridine-3'-phosphate
  modified_base 18: mod_base = OTHER; note = 2'-O-methyluridine-3'-phosphate
  modified_base 19: mod_base = OTHER; note = 2'-O-methylguanosine-3'-phosphate
  modified_base 20: mod_base = OTHER; note = 2'-O-methyladenosine-3'-phosphate
  modified_base 21: mod_base = OTHER; note = 2'-O-methyluridine-3'-phosphate N-[tris(GalNAc-alkyl)-amidodecanoyl)]-4-hydroxyprolinol (Hyp-(GalNAc-alkyl)3)
gctgaacctgcaaaaattgat

SEQ ID NO: 730 - RNA, 21 nt, synthetic construct
  source 1..21: mol_type = other RNA
  modified_base 1: mod_base = OTHER; note = 2'-O-methylcytidine-3'-phosphorothioate
  modified_base 2: mod_base = OTHER; note = 2'-O-methyluridine-3'-phosphorothioate
  modified_base 3: mod_base = OTHER; note = 2'-O-methylguanosine-3'-phosphate
  modified_base 4: mod_base = OTHER; note = 2'-O-methyladenosine-3'-phosphate
  modified_base 5: mod_base = OTHER; note = 2'-O-methyladenosine-3'-phosphate
  modified_base 6: mod_base = OTHER; note = 2'-O-methylcytidine-3'-phosphate
  modified_base 7: mod_base = OTHER; note = 2'-fluorocytidine-3'-phosphate
  modified_base 8: mod_base = OTHER; note = 2'-O-methyluridine-3'-phosphate
  modified_base 9: mod_base = OTHER; note = 2'-fluoroguanosine-3'-phosphate
  modified_base 10: mod_base = OTHER; note = 2'-fluorocytidine-3'-phosphate
  modified_base 11: mod_base = OTHER; note = 2'-fluoroadenosine-3'-phosphate
  modified_base 12: mod_base = OTHER; note = 2'-O-methyladenosine-3'-phosphate
  modified_base 13: mod_base = OTHER; note = 2'-O-methyladenosine-3'-phosphate
  modified_base 14: mod_base = OTHER; note = 2'-O-methyladenosine-3'-phosphate
  modified_base 15: mod_base = OTHER; note = 2'-O-methyladenosine-3'-phosphate
  modified_base 16: mod_base = OTHER; note = 2'-O-methyluridine-3'-phosphate
  modified_base 17: mod_base = OTHER; note = 2'-O-methyluridine-3'-phosphate
  modified_base 18: mod_base = OTHER; note = 2'-O-methylguanosine-3'-phosphate
  modified_base 19: mod_base = OTHER; note = 2'-O-methyladenosine-3'-phosphate
  modified_base 20: mod_base = OTHER; note = 2'-O-methylguanosine-3'-phosphate
  modified_base 21: mod_base = OTHER; note = 2'-O-methyluridine-3'-phosphate N-[tris(GalNAc-alkyl)-amidodecanoyl)]-4-hydroxyprolinol (Hyp-(GalNAc-alkyl)3)
ctgaacctgcaaaaattgagt

SEQ ID NO: 731 - RNA, 21 nt, synthetic construct
  source 1..21: mol_type = other RNA
  modified_base 1: mod_base = OTHER; note = 2'-O-methyluridine-3'-phosphorothioate
  modified_base 2: mod_base = OTHER; note = 2'-O-methylguanosine-3'-phosphorothioate
  modified_base 3: mod_base = OTHER; note = 2'-O-methyladenosine-3'-phosphate
  modified_base 4: mod_base = OTHER; note = 2'-O-methyladenosine-3'-phosphate
  modified_base 5: mod_base = OTHER; note = 2'-O-methylcytidine-3'-phosphate
  modified_base 6: mod_base = OTHER; note = 2'-O-methylcytidine-3'-phosphate
  modified_base 7: mod_base = OTHER; note = 2'-fluorouridine-3'-phosphate
  modified_base 8: mod_base = OTHER; note = 2'-O-methylguanosine-3'-phosphate
  modified_base 9: mod_base = OTHER; note = 2'-fluorocytidine-3'-phosphate
  modified_base 10: mod_base = OTHER; note = 2'-fluoroadenosine-3'-phosphate
  modified_base 11: mod_base = OTHER; note = 2'-fluoroadenosine-3'-phosphate
  modified_base 12: mod_base = OTHER; note = 2'-O-methyladenosine-3'-phosphate
  modified_base 13: mod_base = OTHER; note = 2'-O-methyladenosine-3'-phosphate
  modified_base 14: mod_base = OTHER; note = 2'-O-methyladenosine-3'-phosphate
  modified_base 15: mod_base = OTHER; note = 2'-O-methyluridine-3'-phosphate
  modified_base 16: mod_base = OTHER; note = 2'-O-methyluridine-3'-phosphate
  modified_base 17: mod_base = OTHER; note = 2'-O-methylguanosine-3'-phosphate
  modified_base 18: mod_base = OTHER; note = 2'-O-methyladenosine-3'-phosphate
  modified_base 19: mod_base = OTHER; note = 2'-O-methylguanosine-3'-phosphate
  modified_base 20: mod_base = OTHER; note = 2'-O-methylcytidine-3'-phosphate
  modified_base 21: mod_base = OTHER; note = 2'-O-methyluridine-3'-phosphate N-[tris(GalNAc-alkyl)-amidodecanoyl)]-4-hydroxyprolinol (Hyp-(GalNAc-alkyl)3)
tgaacctgcaaaaattgagct

SEQ ID NO: 732 - RNA, 21 nt, synthetic construct
  source 1..21: mol_type = other RNA
  modified_base 1: mod_base = OTHER; note = 2'-O-methyluridine-3'-phosphorothioate
  modified_base 2: mod_base = OTHER; note = 2'-O-methylguanosine-3'-phosphorothioate
  modified_base 3: mod_base = OTHER; note = 2'-O-methylcytidine-3'-phosphate
  modified_base 4: mod_base = OTHER; note = 2'-O-methyladenosine-3'-phosphate
  modified_base 5: mod_base = OTHER; note = 2'-O-methyladenosine-3'-phosphate
  modified_base 6: mod_base = OTHER; note = 2'-O-methyladenosine-3'-phosphate
  modified_base 7: mod_base = OTHER; note = 2'-fluoroadenosine-3'-phosphate
  modified_base 8: mod_base = OTHER; note = 2'-O-methyladenosine-3'-phosphate
  modified_base 9: mod_base = OTHER; note = 2'-fluorouridine-3'-phosphate
  modified_base 10: mod_base = OTHER; note = 2'-fluorouridine-3'-phosphate
  modified_base 11: mod_base = OTHER; note = 2'-fluoroguanosine-3'-phosphate
  modified_base 12: mod_base = OTHER; note = 2'-O-methyladenosine-3'-phosphate
  modified_base 13: mod_base = OTHER; note = 2'-O-methylguanosine-3'-phosphate
  modified_base 14: mod_base = OTHER; note = 2'-O-methylcytidine-3'-phosphate
  modified_base 15: mod_base = OTHER; note = 2'-O-methyladenosine-3'-phosphate
  modified_base 16: mod_base = OTHER; note = 2'-O-methyladenosine-3'-phosphate
  modified_base 17: mod_base = OTHER; note = 2'-O-methyluridine-3'-phosphate
  modified_base 18: mod_base = OTHER; note = 2'-O-methylguanosine-3'-phosphate
  modified_base 19: mod_base = OTHER; note = 2'-O-methyladenosine-3'-phosphate
  modified_base 20: mod_base = OTHER; note = 2'-O-methylcytidine-3'-phosphate
  modified_base 21: mod_base = OTHER; note = 2'-O-methyluridine-3'-phosphate N-[tris(GalNAc-alkyl)-amidodecanoyl)]-4-hydroxyprolinol (Hyp-(GalNAc-alkyl)3)
tgcaaaaattgagcaatgact

SEQ ID NO: 733 - RNA, 21 nt, synthetic construct
  source 1..21: mol_type = other RNA
  modified_base 1: mod_base = OTHER; note = 2'-O-methylcytidine-3'-phosphorothioate
  modified_base 2: mod_base = OTHER; note = 2'-O-methyladenosine-3'-phosphorothioate
  modified_base 3: mod_base = OTHER; note = 2'-O-methyladenosine-3'-phosphate
  modified_base 4: mod_base = OTHER; note = 2'-O-methyladenosine-3'-phosphate
  modified_base 5: mod_base = OTHER; note = 2'-O-methyladenosine-3'-phosphate
  modified_base 6: mod_base = OTHER; note = 2'-O-methyladenosine-3'-phosphate
  modified_base 7: mod_base = OTHER; note = 2'-fluorouridine-3'-phosphate
  modified_base 8: mod_base = OTHER; note = 2'-O-methyluridine-3'-phosphate
  modified_base 9: mod_base = OTHER; note = 2'-fluoroguanosine-3'-phosphate
  modified_base 10: mod_base = OTHER; note = 2'-fluoroadenosine-3'-phosphate
  modified_base 11: mod_base = OTHER; note = 2'-fluoroguanosine-3'-phosphate
  modified_base 12: mod_base = OTHER; note = 2'-O-methylcytidine-3'-phosphate
  modified_base 13: mod_base = OTHER; note = 2'-O-methyladenosine-3'-phosphate
  modified_base 14: mod_base = OTHER; note = 2'-O-methyladenosine-3'-phosphate
  modified_base 15: mod_base = OTHER; note = 2'-O-methyluridine-3'-phosphate
  modified_base 16: mod_base = OTHER; note = 2'-O-methylguanosine-3'-phosphate
  modified_base 17: mod_base = OTHER; note = 2'-O-methyladenosine-3'-phosphate
  modified_base 18: mod_base = OTHER; note = 2'-O-methylcytidine-3'-phosphate
  modified_base 19: mod_base = OTHER; note = 2'-O-methylcytidine-3'-phosphate
  modified_base 20: mod_base = OTHER; note = 2'-O-methylguanosine-3'-phosphate
  modified_base 21: mod_base = OTHER; note = 2'-O-methyluridine-3'-phosphate N-[tris(GalNAc-alkyl)-amidodecanoyl)]-4-hydroxyprolinol (Hyp-(GalNAc-alkyl)3)
caaaaattgagcaatgaccgt

SEQ ID NO: 734 - RNA, 21 nt, synthetic construct
  source 1..21: mol_type = other RNA
  modified_base 1: mod_base = OTHER; note = 2'-O-methyluridine-3'-phosphorothioate
  modified_base 2: mod_base = OTHER; note = 2'-O-methyluridine-3'-phosphorothioate
  modified_base 3: mod_base = OTHER; note = 2'-O-methylguanosine-3'-phosphate
  modified_base 4: mod_base = OTHER; note = 2'-O-methyladenosine-3'-phosphate
  modified_base 5: mod_base = OTHER; note = 2'-O-methylguanosine-3'-phosphate
  modified_base 6: mod_base = OTHER; note = 2'-O-methylcytidine-3'-phosphate
  modified_base 7: mod_base = OTHER; note = 2'-fluoroadenosine-3'-phosphate
  modified_base 8: mod_base = OTHER; note = 2'-O-methyladenosine-3'-phosphate
  modified_base 9: mod_base = OTHER; note = 2'-fluorouridine-3'-phosphate
  modified_base 10: mod_base = OTHER; note = 2'-fluoroguanosine-3'-phosphate
  modified_base 11: mod_base = OTHER; note = 2'-fluoroadenosine-3'-phosphate
  modified_base 12: mod_base = OTHER; note = 2'-O-methylcytidine-3'-phosphate
  modified_base 13: mod_base = OTHER; note = 2'-O-methylcytidine-3'-phosphate
  modified_base 14: mod_base = OTHER; note = 2'-O-methylguanosine-3'-phosphate
  modified_base 15: mod_base = OTHER; note = 2'-O-methylcytidine-3'-phosphate
  modified_base 16: mod_base = OTHER; note = 2'-O-methyladenosine-3'-phosphate
  modified_base 17: mod_base = OTHER; note = 2'-O-methyluridine-3'-phosphate
  modified_base 18: mod_base = OTHER; note = 2'-O-methylcytidine-3'-phosphate
  modified_base 19: mod_base = OTHER; note = 2'-O-methyladenosine-3'-phosphate
  modified_base 20: mod_base = OTHER; note = 2'-O-methylguanosine-3'-phosphate
  modified_base 21: mod_base = OTHER; note = 2'-O-methyluridine-3'-phosphate N-[tris(GalNAc-alkyl)-amidodecanoyl)]-4-hydroxyprolinol (Hyp-(GalNAc-alkyl)3)
ttgagcaatgaccgcatcagt

SEQ ID NO: 735 - RNA, 21 nt, synthetic construct
  source 1..21: mol_type = other RNA
  modified_base 1: mod_base = OTHER; note = 2'-O-methyluridine-3'-phosphorothioate
  modified_base 2: mod_base = OTHER; note = 2'-O-methylguanosine-3'-phosphorothioate
  modified_base 3: mod_base = OTHER; note = 2'-O-methyladenosine-3'-phosphate
  modified_base 4: mod_base = OTHER; note = 2'-O-methylguanosine-3'-phosphate
  modified_base 5: mod_base = OTHER; note = 2'-O-methylcytidine-3'-phosphate
  modified_base 6: mod_base = OTHER; note = 2'-O-methyladenosine-3'-phosphate
  modified_base 7: mod_base = OTHER; note = 2'-fluoroadenosine-3'-phosphate
  modified_base 8: mod_base = OTHER; note = 2'-O-methyluridine-3'-phosphate
  modified_base 9: mod_base = OTHER; note = 2'-fluoroguanosine-3'-phosphate
  modified_base 10: mod_base = OTHER; note = 2'-fluoroadenosine-3'-phosphate
  modified_base 11: mod_base = OTHER; note = 2'-fluorocytidine-3'-phosphate
  modified_base 12: mod_base = OTHER; note = 2'-O-methylcytidine-3'-phosphate
  modified_base 13: mod_base = OTHER; note = 2'-O-methylguanosine-3'-phosphate
  modified_base 14: mod_base = OTHER; note = 2'-O-methylcytidine-3'-phosphate
  modified_base 15: mod_base = OTHER; note = 2'-O-methyladenosine-3'-phosphate
  modified_base 16: mod_base = OTHER; note = 2'-O-methyluridine-3'-phosphate
  modified_base 17: mod_base = OTHER; note = 2'-O-methylcytidine-3'-phosphate
  modified_base 18: mod_base = OTHER; note = 2'-O-methyladenosine-3'-phosphate
  modified_base 19: mod_base = OTHER; note = 2'-O-methylguanosine-3'-phosphate
  modified_base 20: mod_base = OTHER; note = 2'-O-methylguanosine-3'-phosphate
  modified_base 21: mod_base = OTHER; note = 2'-O-methyluridine-3'-phosphate N-[tris(GalNAc-alkyl)-amidodecanoyl)]-4-hydroxyprolinol (Hyp-(GalNAc-alkyl)3)
tgagcaatgaccgcatcaggt

SEQ ID NO: 736 - RNA, 21 nt, synthetic construct
  source 1..21: mol_type = other RNA
  modified_base 1: mod_base = OTHER; note = 2'-O-methyladenosine-3'-phosphorothioate
  modified_base 2: mod_base = OTHER; note = 2'-O-methylguanosine-3'-phosphorothioate
  modified_base 3: mod_base = OTHER; note = 2'-O-methylcytidine-3'-phosphate
  modified_base 4: mod_base = OTHER; note = 2'-O-methyladenosine-3'-phosphate
  modified_base 5: mod_base = OTHER; note = 2'-O-methyladenosine-3'-phosphate
  modified_base 6: mod_base = OTHER; note = 2'-O-methyluridine-3'-phosphate
  modified_base 7: mod_base = OTHER; note = 2'-fluoroguanosine-3'-phosphate
  modified_base 8: mod_base = OTHER; note = 2'-O-methyladenosine-3'-phosphate
  modified_base 9: mod_base = OTHER; note = 2'-fluorocytidine-3'-phosphate
  modified_base 10: mod_base = OTHER; note = 2'-fluorocytidine-3'-phosphate
  modified_base 11: mod_base = OTHER; note = 2'-fluoroguanosine-3'-phosphate
  modified_base 12: mod_base = OTHER; note = 2'-O-methylcytidine-3'-phosphate
  modified_base 13: mod_base = OTHER; note = 2'-O-methyladenosine-3'-phosphate
  modified_base 14: mod_base = OTHER; note = 2'-O-methyluridine-3'-phosphate
  modified_base 15: mod_base = OTHER; note = 2'-O-methylcytidine-3'-phosphate
  modified_base 16: mod_base = OTHER; note = 2'-O-methyladenosine-3'-phosphate
  modified_base 17: mod_base = OTHER; note = 2'-O-methylguanosine-3'-phosphate
  modified_base 18: mod_base = OTHER; note = 2'-O-methylguanosine-3'-phosphate
  modified_base 19: mod_base = OTHER; note = 2'-O-methylguanosine-3'-phosphate
  modified_base 20: mod_base = OTHER; note = 2'-O-methyluridine-3'-phosphate
  modified_base 21: mod_base = OTHER; note = 2'-O-methyluridine-3'-phosphate N-[tris(GalNAc-alkyl)-amidodecanoyl)]-4-hydroxyprolinol (Hyp-(GalNAc-alkyl)3)
agcaatgaccgcatcagggtt

SEQ ID NO: 737 - RNA, 21 nt, synthetic construct
  source 1..21: mol_type = other RNA
  modified_base 1: mod_base = OTHER; note = 2'-O-methylguanosine-3'-phosphorothioate
  modified_base 2: mod_base = OTHER; note = 2'-O-methyladenosine-3'-phosphorothioate
  modified_base 3: mod_base = OTHER; note = 2'-O-methylguanosine-3'-phosphate
  modified_base 4: mod_base = OTHER; note = 2'-O-methylguanosine-3'-phosphate
  modified_base 5: mod_base = OTHER; note = 2'-O-methyluridine-3'-phosphate
  modified_base 6: mod_base = OTHER; note = 2'-O-methylguanosine-3'-phosphate
  modified_base 7: mod_base = OTHER; note = 2'-fluorocytidine-3'-phosphate
  modified_base 8: mod_base = OTHER; note = 2'-O-methyluridine-3'-phosphate
  modified_base 9: mod_base = OTHER; note = 2'-fluoroguanosine-3'-phosphate
  modified_base 10: mod_base = OTHER; note = 2'-fluoroadenosine-3'-phosphate
  modified_base 11: mod_base = OTHER; note = 2'-fluoroadenosine-3'-phosphate
  modified_base 12: mod_base = OTHER; note = 2'-O-methylcytidine-3'-phosphate
  modified_base 13: mod_base = OTHER; note = 2'-O-methyladenosine-3'-phosphate
  modified_base 14: mod_base = OTHER; note = 2'-O-methylguanosine-3'-phosphate
  modified_base 15: mod_base = OTHER; note = 2'-O-methylcytidine-3'-phosphate
  modified_base 16: mod_base = OTHER; note = 2'-O-methyladenosine-3'-phosphate
  modified_base 17: mod_base = OTHER; note = 2'-O-methyluridine-3'-phosphate
  modified_base 18: mod_base = OTHER; note = 2'-O-methyluridine-3'-phosphate
  modified_base 19: mod_base = OTHER; note = 2'-O-methyluridine-3'-phosphate
  modified_base 20: mod_base = OTHER; note = 2'-O-methyluridine-3'-phosphate
  modified_base 21: mod_base = OTHER; note = 2'-O-methyluridine-3'-phosphate N-[tris(GalNAc-alkyl)-amidodecanoyl)]-4-hydroxyprolinol (Hyp-(GalNAc-alkyl)3)
gaggtgctgaacagcattttt

SEQ ID NO: 738 - RNA, 21 nt, synthetic construct
  source 1..21: mol_type = other RNA
  modified_base 1: mod_base = OTHER; note = 2'-O-methyluridine-3'-phosphorothioate
  modified_base 2: mod_base = OTHER; note = 2'-O-methyluridine-3'-phosphorothioate
  modified_base 3: mod_base = OTHER; note = 2'-O-methylguanosine-3'-phosphate
  modified_base 4: mod_base = OTHER; note = 2'-O-methyladenosine-3'-phosphate
  modified_base 5: mod_base = OTHER; note = 2'-O-methylguanosine-3'-phosphate
  modified_base 6: mod_base = OTHER; note = 2'-O-methylcytidine-3'-phosphate
  modified_base 7: mod_base = OTHER; note = 2'-fluorouridine-3'-phosphate
  modified_base 8: mod_base = OTHER; note = 2'-O-methyluridine-3'-phosphate
  modified_base 9: mod_base = OTHER; note = 2'-fluoroguanosine-3'-phosphate
  modified_base 10: mod_base = OTHER; note = 2'-fluoroadenosine-3'-phosphate
  modified_base 11: mod_base = OTHER; note = 2'-fluoroadenosine-3'-phosphate
  modified_base 12: mod_base = OTHER; note = 2'-O-methylguanosine-3'-phosphate
  modified_base 13: mod_base = OTHER; note = 2'-O-methylcytidine-3'-phosphate
  modified_base 14: mod_base = OTHER; note = 2'-O-methylguanosine-3'-phosphate
  modified_base 15: mod_base = OTHER; note = 2'-O-methylguanosine-3'-phosphate
  modified_base 16: mod_base = OTHER; note = 2'-O-methyladenosine-3'-phosphate
  modified_base 17: mod_base = OTHER; note = 2'-O-methyluridine-3'-phosphate
  modified_base 18: mod_base = OTHER; note = 2'-O-methylguanosine-3'-phosphate
  modified_base 19: mod_base = OTHER; note = 2'-O-methyladenosine-3'-phosphate
  modified_base 20: mod_base = OTHER; note = 2'-O-methylguanosine-3'-phosphate
  modified_base 21: mod_base = OTHER; note = 2'-O-methyluridine-3'-phosphate N-[tris(GalNAc-alkyl)-amidodecanoyl)]-4-hydroxyprolinol (Hyp-(GalNAc-alkyl)3)
ttgagcttgaagcggatgagt

SEQ ID NO: 739 - RNA, 21 nt, synthetic construct
  source 1..21: mol_type = other RNA
  modified_base 1: mod_base = OTHER; note = 2'-O-methylguanosine-3'-phosphorothioate
  modified_base 2: mod_base = OTHER; note = 2'-O-methyluridine-3'-phosphorothioate
  modified_base 3: mod_base = OTHER; note = 2'-O-methylcytidine-3'-phosphate
  modified_base 4: mod_base = OTHER; note = 2'-O-methyluridine-3'-phosphate
  modified_base 5: mod_base = OTHER; note = 2'-O-methyladenosine-3'-phosphate
  modified_base 6: mod_base = OTHER; note = 2'-O-methylcytidine-3'-phosphate
  modified_base 7: mod_base = OTHER; note = 2'-fluorocytidine-3'-phosphate
  modified_base 8: mod_base = OTHER; note = 2'-O-methylcytidine-3'-phosphate
  modified_base 9: mod_base = OTHER; note = 2'-fluoroadenosine-3'-phosphate
  modified_base 10: mod_base = OTHER; note = 2'-fluoroadenosine-3'-phosphate
  modified_base 11: mod_base = OTHER; note = 2'-fluorocytidine-3'-phosphate
  modified_base 12: mod_base = OTHER; note = 2'-O-methyladenosine-3'-phosphate
  modified_base 13: mod_base = OTHER; note = 2'-O-methylguanosine-3'-phosphate
  modified_base 14: mod_base = OTHER; note = 2'-O-methylcytidine-3'-phosphate
  modified_base 15: mod_base = OTHER; note = 2'-O-methyluridine-3'-phosphate
  modified_base 16: mod_base = OTHER; note = 2'-O-methyluridine-3'-phosphate
  modified_base 17: mod_base = OTHER; note = 2'-O-methyladenosine-3'-phosphate
  modified_base 18: mod_base = OTHER; note = 2'-O-methyladenosine-3'-phosphate
  modified_base 19: mod_base = OTHER; note = 2'-O-methylcytidine-3'-phosphate
  modified_base 20: mod_base = OTHER; note = 2'-O-methyladenosine-3'-phosphate
  modified_base 21: mod_base = OTHER; note = 2'-O-methyluridine-3'-phosphate N-[tris(GalNAc-alkyl)-amidodecanoyl)]-4-hydroxyprolinol (Hyp-(GalNAc-alkyl)3)
gtctacccaacagcttaacat

SEQ ID NO: 740 - RNA, 21 nt, synthetic construct
  source 1..21: mol_type = other RNA
  modified_base 1: mod_base = OTHER; note = 2'-O-methyluridine-3'-phosphorothioate
  modified_base 2: mod_base = OTHER; note = 2'-O-methylcytidine-3'-phosphorothioate
  modified_base 3: mod_base = OTHER; note = 2'-O-methyluridine-3'-phosphate
  modified_base 4: mod_base = OTHER; note = 2'-O-methyladenosine-3'-phosphate
  modified_base 5: mod_base = OTHER; note = 2'-O-methylcytidine-3'-phosphate
  modified_base 6: mod_base = OTHER; note = 2'-O-methylcytidine-3'-phosphate
  modified_base 7: mod_base = OTHER; note = 2'-fluorocytidine-3'-phosphate
  modified_base 8: mod_base = OTHER; note = 2'-O-methyladenosine-3'-phosphate
  modified_base 9: mod_base = OTHER; note = 2'-fluoroadenosine-3'-phosphate
  modified_base 10: mod_base = OTHER; note = 2'-fluorocytidine-3'-phosphate
  modified_base 11: mod_base = OTHER; note = 2'-fluoroadenosine-3'-phosphate
  modified_base 12: mod_base = OTHER; note = 2'-O-methylguanosine-3'-phosphate
  modified_base 13: mod_base = OTHER; note = 2'-O-methylcytidine-3'-phosphate
  modified_base 14: mod_base = OTHER; note = 2'-O-methyluridine-3'-phosphate
  modified_base 15: mod_base = OTHER; note = 2'-O-methyluridine-3'-phosphate
  modified_base 16: mod_base = OTHER; note = 2'-O-methyladenosine-3'-phosphate
  modified_base 17: mod_base = OTHER; note = 2'-O-methyladenosine-3'-phosphate
  modified_base 18: mod_base = OTHER; note = 2'-O-methylcytidine-3'-phosphate
  modified_base 19: mod_base = OTHER; note = 2'-O-methyladenosine-3'-phosphate
  modified_base 20: mod_base = OTHER; note = 2'-O-methyladenosine-3'-phosphate
  modified_base 21: mod_base = OTHER; note = 2'-O-methyluridine-3'-phosphate N-[tris(GalNAc-alkyl)-amidodecanoyl)]-4-hydroxyprolinol (Hyp-(GalNAc-alkyl)3)
tctacccaacagcttaacaat

SEQ ID NO: 741 - RNA, 21 nt, synthetic construct
  source 1..21: mol_type = other RNA
  modified_base 1: mod_base = OTHER; note = 2'-O-methylcytidine-3'-phosphorothioate
  modified_base 2: mod_base = OTHER; note = 2'-O-methyluridine-3'-phosphorothioate
  modified_base 3: mod_base = OTHER; note = 2'-O-methyladenosine-3'-phosphate
  modified_base 4: mod_base = OTHER; note = 2'-O-methylcytidine-3'-phosphate
  modified_base 5: mod_base = OTHER; note = 2'-O-methylcytidine-3'-phosphate
  modified_base 6: mod_base = OTHER; note = 2'-O-methylcytidine-3'-phosphate
  modified_base 7: mod_base = OTHER; note = 2'-fluoroadenosine-3'-phosphate
  modified_base 8: mod_base = OTHER; note = 2'-O-methyladenosine-3'-phosphate
  modified_base 9: mod_base = OTHER; note = 2'-fluorocytidine-3'-phosphate
  modified_base 10: mod_base = OTHER; note = 2'-fluoroadenosine-3'-phosphate
  modified_base 11: mod_base = OTHER; note = 2'-fluoroguanosine-3'-phosphate
  modified_base 12: mod_base = OTHER; note = 2'-O-methylcytidine-3'-phosphate
  modified_base 13: mod_base = OTHER; note = 2'-O-methyluridine-3'-phosphate
  modified_base 14: mod_base = OTHER; note = 2'-O-methyluridine-3'-phosphate
  modified_base 15: mod_base = OTHER; note = 2'-O-methyladenosine-3'-phosphate
  modified_base 16: mod_base = OTHER; note = 2'-O-methyladenosine-3'-phosphate
  modified_base 17: mod_base = OTHER; note = 2'-O-methylcytidine-3'-phosphate
  modified_base 18: mod_base = OTHER; note = 2'-O-methyladenosine-3'-phosphate
  modified_base 19: mod_base = OTHER; note = 2'-O-methyladenosine-3'-phosphate
  modified_base 20: mod_base = OTHER; note = 2'-O-methylguanosine-3'-phosphate
  modified_base 21: mod_base = OTHER; note = 2'-O-methyluridine-3'-phosphate N-[tris(GalNAc-alkyl)-amidodecanoyl)]-4-hydroxyprolinol (Hyp-(GalNAc-alkyl)3)
ctacccaacagcttaacaagt

SEQ ID NO: 742 - RNA, 21 nt, synthetic construct
  source 1..21: mol_type = other RNA
  modified_base 1: mod_base = OTHER; note = 2'-O-methylcytidine-3'-phosphorothioate
  modified_base 2: mod_base = OTHER; note = 2'-O-methylcytidine-3'-phosphorothioate
  modified_base 3: mod_base = OTHER; note = 2'-O-methyladenosine-3'-phosphate
  modified_base 4: mod_base = OTHER; note = 2'-O-methyladenosine-3'-phosphate
  modified_base 5: mod_base = OTHER; note = 2'-O-methylcytidine-3'-phosphate
  modified_base 6: mod_base = OTHER; note = 2'-O-methyladenosine-3'-phosphate
  modified_base 7: mod_base = OTHER; note = 2'-fluoroguanosine-3'-phosphate
  modified_base 8: mod_base = OTHER; note = 2'-O-methylcytidine-3'-phosphate
  modified_base 9: mod_base = OTHER; note = 2'-fluorouridine-3'-phosphate
  modified_base 10: mod_base = OTHER; note = 2'-fluorouridine-3'-phosphate
  modified_base 11: mod_base = OTHER; note = 2'-fluoroadenosine-3'-phosphate
  modified_base 12: mod_base = OTHER; note = 2'-O-methyladenosine-3'-phosphate
  modified_base 13: mod_base = OTHER; note = 2'-O-methylcytidine-3'-phosphate
  modified_base 14: mod_base = OTHER; note = 2'-O-methyladenosine-3'-phosphate
  modified_base 15: mod_base = OTHER; note = 2'-O-methyladenosine-3'-phosphate
  modified_base 16: mod_base = OTHER; note = 2'-O-methylguanosine-3'-phosphate
  modified_base 17: mod_base = OTHER; note = 2'-O-methylcytidine-3'-phosphate
  modified_base 18: mod_base = OTHER; note = 2'-O-methylcytidine-3'-phosphate
  modified_base 19: mod_base = OTHER; note = 2'-O-methyluridine-3'-phosphate
  modified_base 20: mod_base = OTHER; note = 2'-O-methylguanosine-3'-phosphate
  modified_base 21: mod_base = OTHER; note = 2'-O-methyluridine-3'-phosphate N-[tris(GalNAc-alkyl)-amidodecanoyl)]-4-hydroxyprolinol (Hyp-(GalNAc-alkyl)3)
ccaacagcttaacaagcctgt

SEQ ID NO: 743 - RNA, 21 nt, synthetic construct
  source 1..21: mol_type = other RNA
  modified_base 1: mod_base = OTHER; note = 2'-O-methyladenosine-3'-phosphorothioate
  modified_base 2: mod_base = OTHER; note = 2'-O-methylcytidine-3'-phosphorothioate
  modified_base 3: mod_base = OTHER; note = 2'-O-methyladenosine-3'-phosphate
  modified_base 4: mod_base = OTHER; note = 2'-O-methylguanosine-3'-phosphate
  modified_base 5: mod_base = OTHER; note = 2'-O-methylcytidine-3'-phosphate
  modified_base 6: mod_base = OTHER; note = 2'-O-methyluridine-3'-phosphate
  modified_base 7: mod_base = OTHER; note = 2'-fluorouridine-3'-phosphate
  modified_base 8: mod_base = OTHER; note = 2'-O-methyladenosine-3'-phosphate
  modified_base 9: mod_base = OTHER; note = 2'-fluoroadenosine-3'-phosphate
  modified_base 10: mod_base = OTHER; note = 2'-fluorocytidine-3'-phosphate
  modified_base 11: mod_base = OTHER; note = 2'-fluoroadenosine-3'-phosphate
  modified_base 12: mod_base = OTHER; note = 2'-O-methyladenosine-3'-phosphate
  modified_base 13: mod_base = OTHER; note = 2'-O-methylguanosine-3'-phosphate
  modified_base 14: mod_base = OTHER; note = 2'-O-methylcytidine-3'-phosphate
  modified_base 15: mod_base = OTHER; note = 2'-O-methylcytidine-3'-phosphate
  modified_base 16: mod_base = OTHER; note = 2'-O-methyluridine-3'-phosphate
  modified_base 17: mod_base = OTHER; note = 2'-O-methylguanosine-3'-phosphate
  modified_base 18: mod_base = OTHER; note = 2'-O-methyladenosine-3'-phosphate
  modified_base 19: mod_base = OTHER; note = 2'-O-methylguanosine-3'-phosphate
  modified_base 20: mod_base = OTHER; note = 2'-O-methylguanosine-3'-phosphate
  modified_base 21: mod_base = OTHER; note = 2'-O-methyluridine-3'-phosphate N-[tris(GalNAc-alkyl)-amidodecanoyl)]-4-hydroxyprolinol (Hyp-(GalNAc-alkyl)3)
acagcttaacaagcctgaggt

SEQ ID NO: 744 - RNA, 21 nt, synthetic construct
  source 1..21: mol_type = other RNA
  modified_base 1: mod_base = OTHER; note = 2'-O-methylcytidine-3'-phosphorothioate
  modified_base 2: mod_base = OTHER; note = 2'-O-methyluridine-3'-phosphorothioate
  modified_base 3: mod_base = OTHER; note = 2'-O-methyluridine-3'-phosphate
  modified_base 4: mod_base = OTHER; note = 2'-O-methyladenosine-3'-phosphate
  modified_base 5: mod_base = OTHER; note = 2'-O-methyladenosine-3'-phosphate
  modified_base 6: mod_base = OTHER; note = 2'-O-methylcytidine-3'-phosphate
  modified_base 7: mod_base = OTHER; note = 2'-fluoroadenosine-3'-phosphate
  modified_base 8: mod_base = OTHER; note = 2'-O-methyladenosine-3'-phosphate
  modified_base 9: mod_base = OTHER; note = 2'-fluoroguanosine-3'-phosphate
  modified_base 10: mod_base = OTHER; note = 2'-fluorocytidine-3'-phosphate
  modified_base 11: mod_base = OTHER; note = 2'-fluorocytidine-3'-phosphate
  modified_base 12: mod_base = OTHER; note = 2'-O-methyluridine-3'-phosphate
  modified_base 13: mod_base = OTHER; note = 2'-O-methylguanosine-3'-phosphate
  modified_base 14: mod_base = OTHER; note = 2'-O-methyladenosine-3'-phosphate
  modified_base 15: mod_base = OTHER; note = 2'-O-methylguanosine-3'-phosphate
  modified_base 16: mod_base = OTHER; note = 2'-O-methylguanosine-3'-phosphate
  modified_base 17: mod_base = OTHER; note = 2'-O-methyluridine-3'-phosphate
  modified_base 18: mod_base = OTHER; note = 2'-O-methylcytidine-3'-phosphate
  modified_base 19: mod_base = OTHER; note = 2'-O-methyluridine-3'-phosphate
  modified_base 20: mod_base = OTHER; note = 2'-O-methyluridine-3'-phosphate
  modified_base 21: mod_base = OTHER; note = 2'-O-methyluridine-3'-phosphate N-[tris(GalNAc-alkyl)-amidodecanoyl)]-4-hydroxyprolinol (Hyp-(GalNAc-alkyl)3)
cttaacaagcctgaggtcttt

SEQ ID NO: 745 - RNA, 21 nt, synthetic construct
  source 1..21: mol_type = other RNA
  modified_base 1: mod_base = OTHER; note = 2'-O-methyluridine-3'-phosphorothioate
  modified_base 2: mod_base = OTHER; note = 2'-O-methyluridine-3'-phosphorothioate
  modified_base 3: mod_base = OTHER; note = 2'-O-methyladenosine-3'-phosphate
  modified_base 4: mod_base = OTHER; note = 2'-O-methyladenosine-3'-phosphate
  modified_base 5: mod_base = OTHER; note = 2'-O-methylcytidine-3'-phosphate
  modified_base 6: mod_base = OTHER; note = 2'-O-methyladenosine-3'-phosphate
  modified_base 7: mod_base = OTHER; note = 2'-fluoroadenosine-3'-phosphate
  modified_base 8: mod_base = OTHER; note = 2'-O-methylguanosine-3'-phosphate
  modified_base 9: mod_base = OTHER; note = 2'-fluorocytidine-3'-phosphate
  modified_base 10: mod_base = OTHER; note = 2'-fluorocytidine-3'-phosphate
  modified_base 11: mod_base = OTHER; note = 2'-fluorouridine-3'-phosphate
  modified_base 12: mod_base = OTHER; note = 2'-O-methylguanosine-3'-phosphate
  modified_base 13: mod_base = OTHER; note = 2'-O-methyladenosine-3'-phosphate
  modified_base 14: mod_base = OTHER; note = 2'-O-methylguanosine-3'-phosphate
  modified_base 15: mod_base = OTHER; note = 2'-O-methylguanosine-3'-phosphate
  modified_base 16: mod_base = OTHER; note = 2'-O-methyluridine-3'-phosphate
  modified_base 17: mod_base = OTHER; note = 2'-O-methylcytidine-3'-phosphate
  modified_base 18: mod_base = OTHER; note = 2'-O-methyluridine-3'-phosphate
  modified_base 19: mod_base = OTHER; note = 2'-O-methyluridine-3'-phosphate
  modified_base 20: mod_base = OTHER; note = 2'-O-methylguanosine-3'-phosphate
  modified_base 21: mod_base = OTHER; note = 2'-O-methyluridine-3'-phosphate N-[tris(GalNAc-alkyl)-amidodecanoyl)]-4-hydroxyprolinol (Hyp-(GalNAc-alkyl)3)
ttaacaagcctgaggtcttgt

SEQ ID NO: 746 - RNA, 21 nt, synthetic construct
  source 1..21: mol_type = other RNA
  modified_base 1: mod_base = OTHER; note = 2'-O-methyluridine-3'-phosphorothioate
  modified_base 2: mod_base = OTHER; note = 2'-O-methyladenosine-3'-phosphorothioate
  modified_base 3: mod_base = OTHER; note = 2'-O-methyladenosine-3'-phosphate
  modified_base 4: mod_base = OTHER; note = 2'-O-methylcytidine-3'-phosphate
  modified_base 5: mod_base = OTHER; note = 2'-O-methyladenosine-3'-phosphate
  modified_base 6: mod_base = OTHER; note = 2'-O-methyladenosine-3'-phosphate
  modified_base 7: mod_base = OTHER; note = 2'-fluoroguanosine-3'-phosphate
  modified_base 8: mod_base = OTHER; note = 2'-O-methylcytidine-3'-phosphate
  modified_base 9: mod_base = OTHER; note = 2'-fluorocytidine-3'-phosphate
  modified_base 10: mod_base = OTHER; note = 2'-fluorouridine-3'-phosphate
  modified_base 11: mod_base = OTHER; note = 2'-fluoroguanosine-3'-phosphate
  modified_base 12: mod_base = OTHER; note = 2'-O-methyladenosine-3'-phosphate
  modified_base 13: mod_base = OTHER; note = 2'-O-methylguanosine-3'-phosphate
  modified_base 14: mod_base = OTHER; note = 2'-O-methylguanosine-3'-phosphate
  modified_base 15: mod_base = OTHER; note = 2'-O-methyluridine-3'-phosphate
  modified_base 16: mod_base = OTHER; note = 2'-O-methylcytidine-3'-phosphate
  modified_base 17: mod_base = OTHER; note = 2'-O-methyluridine-3'-phosphate
  modified_base 18: mod_base = OTHER; note = 2'-O-methyluridine-3'-phosphate
  modified_base 19: mod_base = OTHER; note = 2'-O-methylguanosine-3'-phosphate
  modified_base 20: mod_base = OTHER; note = 2'-O-methylguanosine-3'-phosphate
  modified_base 21: mod_base = OTHER; note = 2'-O-methyluridine-3'-phosphate N-[tris(GalNAc-alkyl)-amidodecanoyl)]-4-hydroxyprolinol (Hyp-(GalNAc-alkyl)3)
taacaagcctgaggtcttggt

SEQ ID NO: 747 - RNA, 21 nt, synthetic construct
  source 1..21: mol_type = other RNA
  modified_base 1: mod_base = OTHER; note = 2'-O-methyladenosine-3'-phosphorothioate
  modified_base 2: mod_base = OTHER; note = 2'-O-methyladenosine-3'-phosphorothioate
  modified_base 3: mod_base = OTHER; note = 2'-O-methylcytidine-3'-phosphate
  modified_base 4: mod_base = OTHER; note = 2'-O-methyladenosine-3'-phosphate
  modified_base 5: mod_base = OTHER; note = 2'-O-methyladenosine-3'-phosphate
  modified_base 6: mod_base = OTHER; note = 2'-O-methylguanosine-3'-phosphate
  modified_base 7: mod_base = OTHER; note = 2'-fluorocytidine-3'-phosphate
  modified_base 8: mod_base = OTHER; note = 2'-O-methylcytidine-3'-phosphate
  modified_base 9: mod_base = OTHER; note = 2'-fluorouridine-3'-phosphate
  modified_base 10: mod_base = OTHER; note = 2'-fluoroguanosine-3'-phosphate
  modified_base 11: mod_base = OTHER; note = 2'-fluoroadenosine-3'-phosphate
  modified_base 12: mod_base = OTHER; note = 2'-O-methylguanosine-3'-phosphate
  modified_base 13: mod_base = OTHER; note = 2'-O-methylguanosine-3'-phosphate
  modified_base 14: mod_base = OTHER; note = 2'-O-methyluridine-3'-phosphate
  modified_base 15: mod_base = OTHER; note = 2'-O-methylcytidine-3'-phosphate
  modified_base 16: mod_base = OTHER; note = 2'-O-methyluridine-3'-phosphate
  modified_base 17: mod_base = OTHER; note = 2'-O-methyluridine-3'-phosphate
  modified_base 18: mod_base = OTHER; note = 2'-O-methylguanosine-3'-phosphate
  modified_base 19: mod_base = OTHER; note = 2'-O-methylguanosine-3'-phosphate
  modified_base 20: mod_base = OTHER; note = 2'-O-methyladenosine-3'-phosphate
  modified_base 21: mod_base = OTHER; note = 2'-O-methyluridine-3'-phosphate N-[tris(GalNAc-alkyl)-amidodecanoyl)]-4-hydroxyprolinol (Hyp-(GalNAc-alkyl)3)
aacaagcctgaggtcttggat

SEQ ID NO: 748 - RNA, 21 nt, synthetic construct
  source 1..21: mol_type = other RNA
  modified_base 1: mod_base = OTHER; note = 2'-O-methyladenosine-3'-phosphorothioate
  modified_base 2: mod_base = OTHER; note = 2'-O-methylcytidine-3'-phosphorothioate
  modified_base 3: mod_base = OTHER; note = 2'-O-methyladenosine-3'-phosphate
  modified_base 4: mod_base = OTHER; note = 2'-O-methyladenosine-3'-phosphate
  modified_base 5: mod_base = OTHER; note = 2'-O-methylguanosine-3'-phosphate
  modified_base 6: mod_base = OTHER; note = 2'-O-methylcytidine-3'-phosphate
  modified_base 7: mod_base = OTHER; note = 2'-fluorocytidine-3'-phosphate
  modified_base 8: mod_base = OTHER; note = 2'-O-methyluridine-3'-phosphate
  modified_base 9: mod_base = OTHER; note = 2'-fluoroguanosine-3'-phosphate
  modified_base 10: mod_base = OTHER; note = 2'-fluoroadenosine-3'-phosphate
  modified_base 11: mod_base = OTHER; note = 2'-fluoroguanosine-3'-phosphate
  modified_base 12: mod_base = OTHER; note = 2'-O-methylguanosine-3'-phosphate
  modified_base 13: mod_base = OTHER; note = 2'-O-methyluridine-3'-phosphate
  modified_base 14: mod_base = OTHER; note = 2'-O-methylcytidine-3'-phosphate
  modified_base 15: mod_base = OTHER; note = 2'-O-methyluridine-3'-phosphate
  modified_base 16: mod_base = OTHER; note = 2'-O-methyluridine-3'-phosphate
  modified_base 17: mod_base = OTHER; note = 2'-O-methylguanosine-3'-phosphate
  modified_base 18: mod_base = OTHER; note = 2'-O-methylguanosine-3'-phosphate
  modified_base 19: mod_base = OTHER; note = 2'-O-methyladenosine-3'-phosphate
  modified_base 20: mod_base = OTHER; note = 2'-O-methylguanosine-3'-phosphate
  modified_base 21: mod_base = OTHER; note = 2'-O-methyluridine-3'-phosphate N-[tris(GalNAc-alkyl)-amidodecanoyl)]-4-hydroxyprolinol (Hyp-(GalNAc-alkyl)3)
acaagcctgaggtcttggagt

SEQ ID NO: 749 - RNA, 21 nt, synthetic construct
  source 1..21: mol_type = other RNA
  modified_base 1: mod_base = OTHER; note = 2'-O-methylcytidine-3'-phosphorothioate
  modified_base 2: mod_base = OTHER; note = 2'-O-methyladenosine-3'-phosphorothioate
  modified_base 3: mod_base = OTHER; note = 2'-O-methyladenosine-3'-phosphate
  modified_base 4: mod_base = OTHER; note = 2'-O-methylguanosine-3'-phosphate
  modified_base 5: mod_base = OTHER; note = 2'-O-methylcytidine-3'-phosphate
  modified_base 6: mod_base = OTHER; note = 2'-O-methylcytidine-3'-phosphate
  modified_base 7: mod_base = OTHER; note = 2'-fluorouridine-3'-phosphate
  modified_base 8: mod_base = OTHER; note = 2'-O-methylguanosine-3'-phosphate
  modified_base 9: mod_base = OTHER; note = 2'-fluoroadenosine-3'-phosphate
  modified_base 10: mod_base = OTHER; note = 2'-fluoroguanosine-3'-phosphate
  modified_base 11: mod_base = OTHER; note = 2'-fluoroguanosine-3'-phosphate
  modified_base 12: mod_base = OTHER; note = 2'-O-methyluridine-3'-phosphate
  modified_base 13: mod_base = OTHER; note = 2'-O-methylcytidine-3'-phosphate
  modified_base 14: mod_base = OTHER; note = 2'-O-methyluridine-3'-phosphate
  modified_base 15: mod_base = OTHER; note = 2'-O-methyluridine-3'-phosphate
  modified_base 16: mod_base = OTHER; note = 2'-O-methylguanosine-3'-phosphate
  modified_base 17: mod_base = OTHER; note = 2'-O-methylguanosine-3'-phosphate
  modified_base 18: mod_base = OTHER; note = 2'-O-methyladenosine-3'-phosphate
  modified_base 19: mod_base = OTHER; note = 2'-O-methylguanosine-3'-phosphate
  modified_base 20: mod_base = OTHER; note = 2'-O-methylguanosine-3'-phosphate
  modified_base 21: mod_base = OTHER; note = 2'-O-methyluridine-3'-phosphate N-[tris(GalNAc-alkyl)-amidodecanoyl)]-4-hydroxyprolinol (Hyp-(GalNAc-alkyl)3)
caagcctgaggtcttggaggt

SEQ ID NO: 750 - RNA, 21 nt, synthetic construct
  source 1..21: mol_type = other RNA
  modified_base 1: mod_base = OTHER; note = 2'-O-methyladenosine-3'-phosphorothioate
  modified_base 2: mod_base = OTHER; note = 2'-O-methyladenosine-3'-phosphorothioate
  modified_base 3: mod_base = OTHER; note = 2'-O-methylcytidine-3'-phosphate
  modified_base 4: mod_base = OTHER; note = 2'-O-methylcytidine-3'-phosphate
  modified_base 5: mod_base = OTHER; note = 2'-O-methylguanosine-3'-phosphate
  modified_base 6: mod_base = OTHER; note = 2'-O-methylcytidine-3'-phosphate
  modified_base 7: mod_base = OTHER; note = 2'-fluorocytidine-3'-phosphate
  modified_base 8: mod_base = OTHER; note = 2'-O-methylcytidine-3'-phosphate
  modified_base 9: mod_base = OTHER; note = 2'-fluoroadenosine-3'-phosphate
  modified_base 10: mod_base = OTHER; note = 2'-fluorouridine-3'-phosphate
  modified_base 11: mod_base = OTHER; note = 2'-fluorouridine-3'-phosphate
  modified_base 12: mod_base = OTHER; note = 2'-O-methylcytidine-3'-phosphate
  modified_base 13: mod_base = OTHER; note = 2'-O-methylcytidine-3'-phosphate
  modified_base 14: mod_base = OTHER; note = 2'-O-methyluridine-3'-phosphate
  modified_base 15: mod_base = OTHER; note = 2'-O-methylguanosine-3'-phosphate
  modified_base 16: mod_base = OTHER; note = 2'-O-methyluridine-3'-phosphate
  modified_base 17: mod_base = OTHER; note = 2'-O-methyluridine-3'-phosphate
  modified_base 18: mod_base = OTHER; note = 2'-O-methyluridine-3'-phosphate
  modified_base 19: mod_base = OTHER; note = 2'-O-methylguanosine-3'-phosphate
  modified_base 20: mod_base = OTHER; note = 2'-O-methylcytidine-3'-phosphate
  modified_base 21: mod_base = OTHER; note = 2'-O-methyluridine-3'-phosphate N-[tris(GalNAc-alkyl)-amidodecanoyl)]-4-hydroxyprolinol (Hyp-(GalNAc-alkyl)3)
aaccgcccattcctgtttgct

SEQ ID NO: 751 - RNA, 21 nt, synthetic construct
  source 1..21: mol_type = other RNA
  modified_base 1: mod_base = OTHER; note = 2'-O-methyladenosine-3'-phosphorothioate
  modified_base 2: mod_base = OTHER; note = 2'-O-methylcytidine-3'-phosphorothioate
  modified_base 3: mod_base = OTHER; note = 2'-O-methylcytidine-3'-phosphate
  modified_base 4: mod_base = OTHER; note = 2'-O-methylguanosine-3'-phosphate
  modified_base 5: mod_base = OTHER; note = 2'-O-methylcytidine-3'-phosphate
  modified_base 6: mod_base = OTHER; note = 2'-O-methylcytidine-3'-phosphate
  modified_base 7: mod_base = OTHER; note = 2'-fluorocytidine-3'-phosphate
  modified_base 8: mod_base = OTHER; note = 2'-O-methyladenosine-3'-phosphate
  modified_base 9: mod_base = OTHER; note = 2'-fluorouridine-3'-phosphate
  modified_base 10: mod_base = OTHER; note = 2'-fluorouridine-3'-phosphate
  modified_base 11: mod_base = OTHER; note = 2'-fluorocytidine-3'-phosphate
  modified_base 12: mod_base = OTHER; note = 2'-O-methylcytidine-3'-phosphate
  modified_base 13: mod_base = OTHER; note = 2'-O-methyluridine-3'-phosphate
  modified_base 14: mod_base = OTHER; note = 2'-O-methylguanosine-3'-phosphate
  modified_base 15: mod_base = OTHER; note = 2'-O-methyluridine-3'-phosphate
  modified_base 16: mod_base = OTHER; note = 2'-O-methyluridine-3'-phosphate
  modified_base 17: mod_base = OTHER; note = 2'-O-methyluridine-3'-phosphate
  modified_base 18: mod_base = OTHER; note = 2'-O-methylguanosine-3'-phosphate
  modified_base 19: mod_base = OTHER; note = 2'-O-methylcytidine-3'-phosphate
  modified_base 20: mod_base = OTHER; note = 2'-O-methyluridine-3'-phosphate
  modified_base 21: mod_base = OTHER; note = 2'-O-methyluridine-3'-phosphate N-[tris(GalNAc-alkyl)-amidodecanoyl)]-4-hydroxyprolinol (Hyp-(GalNAc-alkyl)3)
accgcccattcctgtttgctt

SEQ ID NO: 752 - RNA, 21 nt, synthetic construct
  source 1..21: mol_type = other RNA
  modified_base 1: mod_base = OTHER; note = 2'-O-methylcytidine-3'-phosphorothioate
  modified_base 2: mod_base = OTHER; note = 2'-O-methylcytidine-3'-phosphorothioate
  modified_base 3: mod_base = OTHER; note = 2'-O-methylguanosine-3'-phosphate
  modified_base 4: mod_base = OTHER; note = 2'-O-methylcytidine-3'-phosphate
  modified_base 5: mod_base = OTHER; note = 2'-O-methylcytidine-3'-phosphate
  modified_base 6: mod_base = OTHER; note = 2'-O-methylcytidine-3'-phosphate
  modified_base 7: mod_base = OTHER; note = 2'-fluoroadenosine-3'-phosphate
  modified_base 8: mod_base = OTHER; note = 2'-O-methyluridine-3'-phosphate
  modified_base 9: mod_base = OTHER; note = 2'-fluorouridine-3'-phosphate
  modified_base 10: mod_base = OTHER; note = 2'-fluorocytidine-3'-phosphate
  modified_base 11: mod_base = OTHER; note = 2'-fluorocytidine-3'-phosphate
  modified_base 12: mod_base = OTHER; note = 2'-O-methyluridine-3'-phosphate
  modified_base 13: mod_base = OTHER; note = 2'-O-methylguanosine-3'-phosphate
  modified_base 14: mod_base = OTHER; note = 2'-O-methyluridine-3'-phosphate
  modified_base 15: mod_base = OTHER; note = 2'-O-methyluridine-3'-phosphate
  modified_base 16: mod_base = OTHER; note = 2'-O-methyluridine-3'-phosphate
  modified_base 17: mod_base = OTHER; note = 2'-O-methylguanosine-3'-phosphate
  modified_base 18: mod_base = OTHER; note = 2'-O-methylcytidine-3'-phosphate
  modified_base 19: mod_base = OTHER; note = 2'-O-methyluridine-3'-phosphate
  modified_base 20: mod_base = OTHER; note = 2'-O-methylguanosine-3'-phosphate
  modified_base 21: mod_base = OTHER; note = 2'-O-methyluridine-3'-phosphate N-[tris(GalNAc-alkyl)-amidodecanoyl)]-4-hydroxyprolinol (Hyp-(GalNAc-alkyl)3)
ccgcccattcctgtttgctgt

SEQ ID NO: 753 - RNA, 21 nt, synthetic construct
  source 1..21: mol_type = other RNA
  modified_base 1: mod_base = OTHER; note = 2'-O-methylcytidine-3'-phosphorothioate
  modified_base 2: mod_base = OTHER; note = 2'-O-methylguanosine-3'-phosphorothioate
  modified_base 3: mod_base = OTHER; note = 2'-O-methylcytidine-3'-phosphate
  modified_base 4: mod_base = OTHER; note = 2'-O-methylcytidine-3'-phosphate
  modified_base 5: mod_base = OTHER; note = 2'-O-methylcytidine-3'-phosphate
  modified_base 6: mod_base = OTHER; note = 2'-O-methyladenosine-3'-phosphate
  modified_base 7: mod_base = OTHER; note = 2'-fluorouridine-3'-phosphate
  modified_base 8: mod_base = OTHER; note = 2'-O-methyluridine-3'-phosphate
  modified_base 9: mod_base = OTHER; note = 2'-fluorocytidine-3'-phosphate
  modified_base 10: mod_base = OTHER; note = 2'-fluorocytidine-3'-phosphate
  modified_base 11: mod_base = OTHER; note = 2'-fluorouridine-3'-phosphate
  modified_base 12: mod_base = OTHER; note = 2'-O-methylguanosine-3'-phosphate
  modified_base 13: mod_base = OTHER; note = 2'-O-methyluridine-3'-phosphate
  modified_base 14: mod_base = OTHER; note = 2'-O-methyluridine-3'-phosphate
  modified_base 15: mod_base = OTHER; note = 2'-O-methyluridine-3'-phosphate
  modified_base 16: mod_base = OTHER; note = 2'-O-methylguanosine-3'-phosphate
  modified_base 17: mod_base = OTHER; note = 2'-O-methylcytidine-3'-phosphate
  modified_base 18: mod_base = OTHER; note = 2'-O-methyluridine-3'-phosphate
  modified_base 19: mod_base = OTHER; note = 2'-O-methylguanosine-3'-phosphate
  modified_base 20: mod_base = OTHER; note = 2'-O-methyluridine-3'-phosphate
  modified_base 21: mod_base = OTHER; note = 2'-O-methyluridine-3'-phosphate N-[tris(GalNAc-alkyl)-amidodecanoyl)]-4-hydroxyprolinol (Hyp-(GalNAc-alkyl)3)
cgcccattcctgtttgctgtt

SEQ ID NO: 754 - RNA, 21 nt, synthetic construct
  source 1..21: mol_type = other RNA
  modified_base 1: mod_base = OTHER; note = 2'-O-methyladenosine-3'-phosphorothioate
  modified_base 2: mod_base = OTHER; note = 2'-O-methyluridine-3'-phosphorothioate
  modified_base 3: mod_base = OTHER; note = 2'-O-methyluridine-3'-phosphate
  modified_base 4: mod_base = OTHER; note = 2'-O-methylcytidine-3'-phosphate
  modified_base 5: mod_base = OTHER; note = 2'-O-methylcytidine-3'-phosphate
  modified_base 6: mod_base = OTHER; note = 2'-O-methyluridine-3'-phosphate
  modified_base 7: mod_base = OTHER; note = 2'-fluoroguanosine-3'-phosphate
  modified_base 8: mod_base = OTHER; note = 2'-O-methyluridine-3'-phosphate
  modified_base 9: mod_base = OTHER; note = 2'-fluorouridine-3'-phosphate
  modified_base 10: mod_base = OTHER; note = 2'-fluorouridine-3'-phosphate
  modified_base 11: mod_base = OTHER; note = 2'-fluoroguanosine-3'-phosphate
  modified_base 12: mod_base = OTHER; note = 2'-O-methylcytidine-3'-phosphate
  modified_base 13: mod_base = OTHER; note = 2'-O-methyluridine-3'-phosphate
  modified_base 14: mod_base = OTHER; note = 2'-O-methylguanosine-3'-phosphate
  modified_base 15: mod_base = OTHER; note = 2'-O-methyluridine-3'-phosphate
  modified_base 16: mod_base = OTHER; note = 2'-O-methylguanosine-3'-phosphate
  modified_base 17: mod_base = OTHER; note = 2'-O-methyluridine-3'-phosphate
  modified_base 18: mod_base = OTHER; note = 2'-O-methyladenosine-3'-phosphate
  modified_base 19: mod_base = OTHER; note = 2'-O-methyluridine-3'-phosphate
  modified_base 20: mod_base = OTHER; note = 2'-O-methylguanosine-3'-phosphate
  modified_base 21: mod_base = OTHER; note = 2'-O-methyluridine-3'-phosphate N-[tris(GalNAc-alkyl)-amidodecanoyl)]-4-hydroxyprolinol (Hyp-(GalNAc-alkyl)3)
attcctgtttgctgtgtatgt

SEQ ID NO: 755 - RNA, 21 nt, synthetic construct
  source 1..21: mol_type = other RNA
  modified_base 1: mod_base = OTHER; note = 2'-O-methyluridine-3'-phosphorothioate
  modified_base 2: mod_base = OTHER; note = 2'-O-methylcytidine-3'-phosphorothioate
  modified_base 3: mod_base = OTHER; note = 2'-O-methylcytidine-3'-phosphate
  modified_base 4: mod_base = OTHER; note = 2'-O-methyluridine-3'-phosphate
  modified_base 5: mod_base = OTHER; note = 2'-O-methylguanosine-3'-phosphate
  modified_base 6: mod_base = OTHER; note = 2'-O-methyluridine-3'-phosphate
  modified_base 7: mod_base = OTHER; note = 2'-fluorouridine-3'-phosphate
  modified_base 8: mod_base = OTHER; note = 2'-O-methyluridine-3'-phosphate
  modified_base 9: mod_base = OTHER; note = 2'-fluoroguanosine-3'-phosphate
  modified_base 10: mod_base = OTHER; note = 2'-fluorocytidine-3'-phosphate
  modified_base 11: mod_base = OTHER; note = 2'-fluorouridine-3'-phosphate
  modified_base 12: mod_base = OTHER; note = 2'-O-methylguanosine-3'-phosphate
  modified_base 13: mod_base = OTHER; note = 2'-O-methyluridine-3'-phosphate
  modified_base 14: mod_base = OTHER; note = 2'-O-methylguanosine-3'-phosphate
  modified_base 15: mod_base = OTHER; note = 2'-O-methyluridine-3'-phosphate
  modified_base 16: mod_base = OTHER; note = 2'-O-methyladenosine-3'-phosphate
  modified_base 17: mod_base = OTHER; note = 2'-O-methyluridine-3'-phosphate
  modified_base 18: mod_base = OTHER; note = 2'-O-methylguanosine-3'-phosphate
  modified_base 19: mod_base = OTHER; note = 2'-O-methyladenosine-3'-phosphate
  modified_base 20: mod_base = OTHER; note = 2'-O-methyluridine-3'-phosphate
  modified_base 21: mod_base = OTHER; note = 2'-O-methyluridine-3'-phosphate N-[tris(GalNAc-alkyl)-amidodecanoyl)]-4-hydroxyprolinol (Hyp-(GalNAc-alkyl)3)
tcctgtttgctgtgtatgatt

SEQ ID NO: 756 - RNA, 21 nt, synthetic construct
  source 1..21: mol_type = other RNA
  modified_base 1: mod_base = OTHER; note = 2'-O-methyluridine-3'-phosphorothioate
  modified_base 2: mod_base = OTHER; note = 2'-O-methylguanosine-3'-phosphorothioate
  modified_base 3: mod_base = OTHER; note = 2'-O-methylcytidine-3'-phosphate
  modified_base 4: mod_base = OTHER; note = 2'-O-methyluridine-3'-phosphate
  modified_base 5: mod_base = OTHER; note = 2'-O-methylguanosine-3'-phosphate
  modified_base 6: mod_base = OTHER; note = 2'-O-methyluridine-3'-phosphate
  modified_base 7: mod_base = OTHER; note = 2'-fluoroguanosine-3'-phosphate
  modified_base 8: mod_base = OTHER; note = 2'-O-methyluridine-3'-phosphate
  modified_base 9: mod_base = OTHER; note = 2'-fluoroadenosine-3'-phosphate
  modified_base 10: mod_base = OTHER; note = 2'-fluorouridine-3'-phosphate
  modified_base 11: mod_base = OTHER; note = 2'-fluoroguanosine-3'-phosphate
  modified_base 12: mod_base = OTHER; note = 2'-O-methyladenosine-3'-phosphate
  modified_base 13: mod_base = OTHER; note = 2'-O-methyluridine-3'-phosphate
  modified_base 14: mod_base = OTHER; note = 2'-O-methylcytidine-3'-phosphate
  modified_base 15: mod_base = OTHER; note = 2'-O-methyladenosine-3'-phosphate
  modified_base 16: mod_base = OTHER; note = 2'-O-methyladenosine-3'-phosphate
  modified_base 17: mod_base = OTHER; note = 2'-O-methyladenosine-3'-phosphate
  modified_base 18: mod_base = OTHER; note = 2'-O-methylguanosine-3'-phosphate
  modified_base 19: mod_base = OTHER; note = 2'-O-methylcytidine-3'-phosphate
  modified_base 20: mod_base = OTHER; note = 2'-O-methylguanosine-3'-phosphate
  modified_base 21: mod_base = OTHER; note = 2'-O-methyluridine-3'-phosphate N-[tris(GalNAc-alkyl)-amidodecanoyl)]-4-hydroxyprolinol (Hyp-(GalNAc-alkyl)3)
tgctgtgtatgatcaaagcgt

SEQ ID NO: 757 - RNA, 21 nt, synthetic construct
  source 1..21: mol_type = other RNA
  modified_base 1: mod_base = OTHER; note = 2'-O-methylguanosine-3'-phosphorothioate
  modified_base 2: mod_base = OTHER; note = 2'-O-methylcytidine-3'-phosphorothioate
  modified_base 3: mod_base = OTHER; note = 2'-O-methyluridine-3'-phosphate
  modified_base 4: mod_base = OTHER; note = 2'-O-methylguanosine-3'-phosphate
  modified_base 5: mod_base = OTHER; note = 2'-O-methyluridine-3'-phosphate
  modified_base 6: mod_base = OTHER; note = 2'-O-methylguanosine-3'-phosphate
  modified_base 7: mod_base = OTHER; note = 2'-fluorouridine-3'-phosphate
  modified_base 8: mod_base = OTHER; note = 2'-O-methyladenosine-3'-phosphate
  modified_base 9: mod_base = OTHER; note = 2'-fluorouridine-3'-phosphate
  modified_base 10: mod_base = OTHER; note = 2'-fluoroguanosine-3'-phosphate
  modified_base 11: mod_base = OTHER; note = 2'-fluoroadenosine-3'-phosphate
  modified_base 12: mod_base = OTHER; note = 2'-O-methyluridine-3'-phosphate
  modified_base 13: mod_base = OTHER; note = 2'-O-methylcytidine-3'-phosphate
  modified_base 14: mod_base = OTHER; note = 2'-O-methyladenosine-3'-phosphate
  modified_base 15: mod_base = OTHER; note = 2'-O-methyladenosine-3'-phosphate
  modified_base 16: mod_base = OTHER; note = 2'-O-methyladenosine-3'-phosphate
  modified_base 17: mod_base = OTHER; note = 2'-O-methylguanosine-3'-phosphate
  modified_base 18: mod_base = OTHER; note = 2'-O-methylcytidine-3'-phosphate
  modified_base 19: mod_base = OTHER; note = 2'-O-methylguanosine-3'-phosphate
  modified_base 20: mod_base = OTHER; note = 2'-O-methylcytidine-3'-phosphate
  modified_base 21: mod_base = OTHER; note = 2'-O-methyluridine-3'-phosphate N-[tris(GalNAc-alkyl)-amidodecanoyl)]-4-hydroxyprolinol (Hyp-(GalNAc-alkyl)3)
gctgtgtatgatcaaagcgct

SEQ ID NO: 758 - RNA, 21 nt, synthetic construct
  source 1..21: mol_type = other RNA
  modified_base 1: mod_base = OTHER; note = 2'-O-methylcytidine-3'-phosphorothioate
  modified_base 2: mod_base = OTHER; note = 2'-O-methyluridine-3'-phosphorothioate
  modified_base 3: mod_base = OTHER; note = 2'-O-methylguanosine-3'-phosphate
  modified_base 4: mod_base = OTHER; note = 2'-O-methyluridine-3'-phosphate
  modified_base 5: mod_base = OTHER; note = 2'-O-methylguanosine-3'-phosphate
  modified_base 6: mod_base = OTHER; note = 2'-O-methyluridine-3'-phosphate
  modified_base 7: mod_base = OTHER; note = 2'-fluoroadenosine-3'-phosphate
  modified_base 8: mod_base = OTHER; note = 2'-O-methyluridine-3'-phosphate
  modified_base 9: mod_base = OTHER; note = 2'-fluoroguanosine-3'-phosphate
  modified_base 10: mod_base = OTHER; note = 2'-fluoroadenosine-3'-phosphate
  modified_base 11: mod_base = OTHER; note = 2'-fluorouridine-3'-phosphate
  modified_base 12: mod_base = OTHER; note = 2'-O-methylcytidine-3'-phosphate
  modified_base 13: mod_base = OTHER; note = 2'-O-methyladenosine-3'-phosphate
  modified_base 14: mod_base = OTHER; note = 2'-O-methyladenosine-3'-phosphate
  modified_base 15: mod_base = OTHER; note = 2'-O-methyladenosine-3'-phosphate
  modified_base 16: mod_base = OTHER; note = 2'-O-methylguanosine-3'-phosphate
  modified_base 17: mod_base = OTHER; note = 2'-O-methylcytidine-3'-phosphate
  modified_base 18: mod_base = OTHER; note = 2'-O-methylguanosine-3'-phosphate
  modified_base 19: mod_base = OTHER; note = 2'-O-methylcytidine-3'-phosphate
  modified_base 20: mod_base = OTHER; note = 2'-O-methylcytidine-3'-phosphate
  modified_base 21: mod_base = OTHER; note = 2'-O-methyluridine-3'-phosphate N-[tris(GalNAc-alkyl)-amidodecanoyl)]-4-hydroxyprolinol (Hyp-(GalNAc-alkyl)3)
ctgtgtatgatcaaagcgcct

SEQ ID NO: 759 - RNA, 21 nt, synthetic construct
  source 1..21: mol_type = other RNA
  modified_base 1: mod_base = OTHER; note = 2'-O-methyladenosine-3'-phosphorothioate
  modified_base 2: mod_base = OTHER; note = 2'-O-methylguanosine-3'-phosphorothioate
  modified_base 3: mod_base = OTHER; note = 2'-O-methylguanosine-3'-phosphate
  modified_base 4: mod_base = OTHER; note = 2'-O-methylcytidine-3'-phosphate
  modified_base 5: mod_base = OTHER; note = 2'-O-methylcytidine-3'-phosphate
  modified_base 6: mod_base = OTHER; note = 2'-O-methyladenosine-3'-phosphate
  modified_base 7: mod_base = OTHER; note = 2'-fluoroguanosine-3'-phosphate
  modified_base 8: mod_base = OTHER; note = 2'-O-methylcytidine-3'-phosphate
  modified_base 9: mod_base = OTHER; note = 2'-fluoroadenosine-3'-phosphate
  modified_base 10: mod_base = OTHER; note = 2'-fluoroguanosine-3'-phosphate
  modified_base 11: mod_base = OTHER; note = 2'-fluorocytidine-3'-phosphate
  modified_base 12: mod_base = OTHER; note = 2'-O-methyladenosine-3'-phosphate
  modified_base 13: mod_base = OTHER; note = 2'-O-methylguanosine-3'-phosphate
  modified_base 14: mod_base = OTHER; note = 2'-O-methyladenosine-3'-phosphate
  modified_base 15: mod_base = OTHER; note = 2'-O-methyluridine-3'-phosphate
  modified_base 16: mod_base = OTHER; note = 2'-O-methyladenosine-3'-phosphate
  modified_base 17: mod_base = OTHER; note = 2'-O-methyladenosine-3'-phosphate
  modified_base 18: mod_base = OTHER; note = 2'-O-methylcytidine-3'-phosphate
  modified_base 19: mod_base = OTHER; note = 2'-O-methyladenosine-3'-phosphate
  modified_base 20: mod_base = OTHER; note = 2'-O-methyladenosine-3'-phosphate
  modified_base 21: mod_base = OTHER; note = 2'-O-methyluridine-3'-phosphate N-[tris(GalNAc-alkyl)-amidodecanoyl)]-4-hydroxyprolinol (Hyp-(GalNAc-alkyl)3)
aggccagcagcagataacaat

SEQ ID NO: 760 - RNA, 21 nt, synthetic construct
  source 1..21: mol_type = other RNA
  modified_base 1: mod_base = OTHER; note = 2'-O-methylcytidine-3'-phosphorothioate
  modified_base 2: mod_base = OTHER; note = 2'-O-methylguanosine-3'-phosphorothioate
  modified_base 3: mod_base = OTHER; note = 2'-O-methylguanosine-3'-phosphate
  modified_base 4: mod_base = OTHER; note = 2'-O-methyladenosine-3'-phosphate
  modified_base 5: mod_base = OTHER; note = 2'-O-methylcytidine-3'-phosphate
  modified_base 6: mod_base = OTHER; note = 2'-O-methyladenosine-3'-phosphate
  modified_base 7: mod_base = OTHER; note = 2'-fluoroadenosine-3'-phosphate
  modified_base 8: mod_base = OTHER; note = 2'-O-methyladenosine-3'-phosphate
  modified_base 9: mod_base = OTHER; note = 2'-fluorouridine-3'-phosphate
  modified_base 10: mod_base = OTHER; note = 2'-fluorocytidine-3'-phosphate
  modified_base 11: mod_base = OTHER; note = 2'-fluoroadenosine-3'-phosphate
  modified_base 12: mod_base = OTHER; note = 2'-O-methylguanosine-3'-phosphate
  modified_base 13: mod_base = OTHER; note = 2'-O-methylcytidine-3'-phosphate
  modified_base 14: mod_base = OTHER; note = 2'-O-methylguanosine-3'-phosphate
  modified_base 15: mod_base = OTHER; note = 2'-O-methyladenosine-3'-phosphate
  modified_base 16: mod_base = OTHER; note = 2'-O-methyluridine-3'-phosphate
  modified_base 17: mod_base = OTHER; note = 2'-O-methylguanosine-3'-phosphate
  modified_base 18: mod_base = OTHER; note = 2'-O-methyluridine-3'-phosphate
  modified_base 19: mod_base = OTHER; note = 2'-O-methylguanosine-3'-phosphate
  modified_base 20: mod_base = OTHER; note = 2'-O-methyluridine-3'-phosphate
  modified_base 21: mod_base = OTHER; note = 2'-O-methyluridine-3'-phosphate N-[tris(GalNAc-alkyl)-amidodecanoyl)]-4-hydroxyprolinol (Hyp-(GalNAc-alkyl)3)
cggacaaatcagcgatgtgtt

SEQ ID NO: 761 - RNA, 21 nt, synthetic construct
  source 1..21: mol_type = other RNA
  modified_base 1: mod_base = OTHER; note = 2'-O-methylguanosine-3'-phosphorothioate
  modified_base 2: mod_base = OTHER; note = 2'-O-methylguanosine-3'-phosphorothioate
  modified_base 3: mod_base = OTHER; note = 2'-O-methyladenosine-3'-phosphate
  modified_base 4: mod_base = OTHER; note = 2'-O-methylcytidine-3'-phosphate
  modified_base 5: mod_base = OTHER; note = 2'-O-methyladenosine-3'-phosphate
  modified_base 6: mod_base = OTHER; note = 2'-O-methyladenosine-3'-phosphate
  modified_base 7: mod_base = OTHER; note = 2'-fluoroadenosine-3'-phosphate
  modified_base 8: mod_base = OTHER; note = 2'-O-methyluridine-3'-phosphate
  modified_base 9: mod_base = OTHER; note = 2'-fluorocytidine-3'-phosphate
  modified_base 10: mod_base = OTHER; note = 2'-fluoroadenosine-3'-phosphate
  modified_base 11: mod_base = OTHER; note = 2'-fluoroguanosine-3'-phosphate
  modified_base 12: mod_base = OTHER; note = 2'-O-methylcytidine-3'-phosphate
  modified_base 13: mod_base = OTHER; note = 2'-O-methylguanosine-3'-phosphate
  modified_base 14: mod_base = OTHER; note = 2'-O-methyladenosine-3'-phosphate
  modified_base 15: mod_base = OTHER; note = 2'-O-methyluridine-3'-phosphate
  modified_base 16: mod_base = OTHER; note = 2'-O-methylguanosine-3'-phosphate
  modified_base 17: mod_base = OTHER; note = 2'-O-methyluridine-3'-phosphate
  modified_base 18: mod_base = OTHER; note = 2'-O-methylguanosine-3'-phosphate
  modified_base 19: mod_base = OTHER; note = 2'-O-methyluridine-3'-phosphate
  modified_base 20: mod_base = OTHER; note = 2'-O-methylcytidine-3'-phosphate
  modified_base 21: mod_base = OTHER; note = 2'-O-methyluridine-3'-phosphate N-[tris(GalNAc-alkyl)-amidodecanoyl)]-4-hydroxyprolinol (Hyp-(GalNAc-alkyl)3)
ggacaaatcagcgatgtgtct

SEQ ID NO: 762 - RNA, 21 nt, synthetic construct
  source 1..21: mol_type = other RNA
  modified_base 1: mod_base = OTHER; note = 2'-O-methylcytidine-3'-phosphorothioate
  modified_base 2: mod_base = OTHER; note = 2'-O-methyluridine-3'-phosphorothioate
  modified_base 3: mod_base = OTHER; note = 2'-O-methylcytidine-3'-phosphate
  modified_base 4: mod_base = OTHER; note = 2'-O-methylcytidine-3'-phosphate
  modified_base 5: mod_base = OTHER; note = 2'-O-methylcytidine-3'-phosphate
  modified_base 6: mod_base = OTHER; note = 2'-O-methyladenosine-3'-phosphate
  modified_base 7: mod_base = OTHER; note = 2'-fluorocytidine-3'-phosphate
  modified_base 8: mod_base = OTHER; note = 2'-O-methylcytidine-3'-phosphate
  modified_base 9: mod_base = OTHER; note = 2'-fluorouridine-3'-phosphate
  modified_base 10: mod_base = OTHER; note = 2'-fluorouridine-3'-phosphate
  modified_base 11: mod_base = OTHER; note = 2'-fluorouridine-3'-phosphate
  modified_base 12: mod_base = OTHER; note = 2'-O-methyluridine-3'-phosphate
  modified_base 13: mod_base = OTHER; note = 2'-O-methylcytidine-3'-phosphate
  modified_base 14: mod_base = OTHER; note = 2'-O-methyluridine-3'-phosphate
  modified_base 15: mod_base = OTHER; note = 2'-O-methyluridine-3'-phosphate
  modified_base 16: mod_base = OTHER; note = 2'-O-methylcytidine-3'-phosphate
  modified_base 17: mod_base = OTHER; note = 2'-O-methyluridine-3'-phosphate
  modified_base 18: mod_base = OTHER; note = 2'-O-methyladenosine-3'-phosphate
  modified_base 19: mod_base = OTHER; note = 2'-O-methyladenosine-3'-phosphate
  modified_base 20: mod_base = OTHER; note = 2'-O-methyluridine-3'-phosphate
  modified_base 21: mod_base = OTHER; note = 2'-O-methyluridine-3'-phosphate N-[tris(GalNAc-alkyl)-amidodecanoyl)]-4-hydroxyprolinol (Hyp-(GalNAc-alkyl)3)
ctcccaccttttcttctaatt

SEQ ID NO: 763 - RNA, 21 nt, synthetic construct
  source 1..21: mol_type = other RNA
  modified_base 1: mod_base = OTHER; note = 2'-O-methyluridine-3'-phosphorothioate
  modified_base 2: mod_base = OTHER; note = 2'-O-methylcytidine-3'-phosphorothioate
  modified_base 3: mod_base = OTHER; note = 2'-O-methylcytidine-3'-phosphate
  modified_base 4: mod_base = OTHER; note = 2'-O-methylcytidine-3'-phosphate
  modified_base 5: mod_base = OTHER; note = 2'-O-methyladenosine-3'-phosphate
  modified_base 6: mod_base = OTHER; note = 2'-O-methylcytidine-3'-phosphate
  modified_base 7: mod_base = OTHER; note = 2'-fluorocytidine-3'-phosphate
  modified_base 8: mod_base = OTHER; note = 2'-O-methyluridine-3'-phosphate
  modified_base 9: mod_base = OTHER; note = 2'-fluorouridine-3'-phosphate
  modified_base 10: mod_base = OTHER; note = 2'-fluorouridine-3'-phosphate
  modified_base 11: mod_base = OTHER; note = 2'-fluorouridine-3'-phosphate
  modified_base 12: mod_base = OTHER; note = 2'-O-methylcytidine-3'-phosphate
  modified_base 13: mod_base = OTHER; note = 2'-O-methyluridine-3'-phosphate
  modified_base 14: mod_base = OTHER; note = 2'-O-methyluridine-3'-phosphate
  modified_base 15: mod_base = OTHER; note = 2'-O-methylcytidine-3'-phosphate
  modified_base 16: mod_base = OTHER; note = 2'-O-methyluridine-3'-phosphate
  modified_base 17: mod_base = OTHER; note = 2'-O-methyladenosine-3'-phosphate
  modified_base 18: mod_base = OTHER; note = 2'-O-methyladenosine-3'-phosphate
  modified_base 19: mod_base = OTHER; note = 2'-O-methyluridine-3'-phosphate
  modified_base 20: mod_base = OTHER; note = 2'-O-methylguanosine-3'-phosphate
  modified_base 21: mod_base = OTHER; note = 2'-O-methyluridine-3'-phosphate N-[tris(GalNAc-alkyl)-amidodecanoyl)]-4-hydroxyprolinol (Hyp-(GalNAc-alkyl)3)
tcccaccttttcttctaatgt

SEQ ID NO: 764 - RNA, 21 nt, synthetic construct
  source 1..21: mol_type = other RNA
  modified_base 1: mod_base = OTHER; note = 2'-O-methylcytidine-3'-phosphorothioate
  modified_base 2: mod_base = OTHER; note = 2'-O-methylcytidine-3'-phosphorothioate
  modified_base 3: mod_base = OTHER; note = 2'-O-methylcytidine-3'-phosphate
  modified_base 4: mod_base = OTHER; note = 2'-O-methyladenosine-3'-phosphate
  modified_base 5: mod_base = OTHER; note = 2'-O-methylcytidine-3'-phosphate
  modified_base 6: mod_base = OTHER; note = 2'-O-methylcytidine-3'-phosphate
  modified_base 7: mod_base = OTHER; note = 2'-fluorouridine-3'-phosphate
  modified_base 8: mod_base = OTHER; note = 2'-O-methyluridine-3'-phosphate
  modified_base 9: mod_base = OTHER; note = 2'-fluorouridine-3'-phosphate
  modified_base 10: mod_base = OTHER; note = 2'-fluorouridine-3'-phosphate
  modified_base 11: mod_base = OTHER; note = 2'-fluorocytidine-3'-phosphate
  modified_base 12: mod_base = OTHER; note = 2'-O-methyluridine-3'-phosphate
  modified_base 13: mod_base = OTHER; note = 2'-O-methyluridine-3'-phosphate
  modified_base 14: mod_base = OTHER; note = 2'-O-methylcytidine-3'-phosphate
  modified_base 15: mod_base = OTHER; note = 2'-O-methyluridine-3'-phosphate
  modified_base 16: mod_base = OTHER; note = 2'-O-methyladenosine-3'-phosphate
  modified_base 17: mod_base = OTHER; note = 2'-O-methyladenosine-3'-phosphate
  modified_base 18: mod_base = OTHER; note = 2'-O-methyluridine-3'-phosphate
  modified_base 19: mod_base = OTHER; note = 2'-O-methylguanosine-3'-phosphate
  modified_base 20: mod_base = OTHER; note = 2'-O-methyladenosine-3'-phosphate
  modified_base 21: mod_base = OTHER; note = 2'-O-methyluridine-3'-phosphate N-[tris(GalNAc-alkyl)-amidodecanoyl)]-4-hydroxyprolinol (Hyp-(GalNAc-alkyl)3)
cccaccttttcttctaatgat

SEQ ID NO: 765 - RNA, 21 nt, synthetic construct
  source 1..21: mol_type = other RNA
  modified_base 1: mod_base = OTHER; note = 2'-O-methyluridine-3'-phosphorothioate
  modified_base 2: mod_base = OTHER; note = 2'-O-methyluridine-3'-phosphorothioate
  modified_base 3: mod_base = OTHER; note = 2'-O-methyluridine-3'-phosphate
  modified_base 4: mod_base = OTHER; note = 2'-O-methyluridine-3'-phosphate
  modified_base 5: mod_base = OTHER; note = 2'-O-methylcytidine-3'-phosphate
  modified_base 6: mod_base = OTHER; note = 2'-O-methyluridine-3'-phosphate
  modified_base 7: mod_base = OTHER; note = 2'-fluorouridine-3'-phosphate
  modified_base 8: mod_base = OTHER; note = 2'-O-methylcytidine-3'-phosphate
  modified_base 9: mod_base = OTHER; note = 2'-fluorouridine-3'-phosphate
  modified_base 10: mod_base = OTHER; note = 2'-fluoroadenosine-3'-phosphate
  modified_base 11: mod_base = OTHER; note = 2'-fluoroadenosine-3'-phosphate
  modified_base 12: mod_base = OTHER; note = 2'-O-methyluridine-3'-phosphate
  modified_base 13: mod_base = OTHER; note = 2'-O-methylguanosine-3'-phosphate
  modified_base 14: mod_base = OTHER; note = 2'-O-methyladenosine-3'-phosphate
  modified_base 15: mod_base = OTHER; note = 2'-O-methylguanosine-3'-phosphate
  modified_base 16: mod_base = OTHER; note = 2'-O-methyluridine-3'-phosphate
  modified_base 17: mod_base = OTHER; note = 2'-O-methylcytidine-3'-phosphate
  modified_base 18: mod_base = OTHER; note = 2'-O-methylguanosine-3'-phosphate
  modified_base 19: mod_base = OTHER; note = 2'-O-methyladenosine-3'-phosphate
  modified_base 20: mod_base = OTHER; note = 2'-O-methylcytidine-3'-phosphate
  modified_base 21: mod_base = OTHER; note = 2'-O-methyluridine-3'-phosphate N-[tris(GalNAc-alkyl)-amidodecanoyl)]-4-hydroxyprolinol (Hyp-(GalNAc-alkyl)3)
ttttcttctaatgagtcgact

SEQ ID NO: 766 - RNA, 21 nt, synthetic construct
  source 1..21: mol_type = other RNA
  modified_base 1: mod_base = OTHER; note = 2'-O-methyluridine-3'-phosphorothioate
  modified_base 2: mod_base = OTHER; note = 2'-O-methyluridine-3'-phosphorothioate
  modified_base 3: mod_base = OTHER; note = 2'-O-methyluridine-3'-phosphate
  modified_base 4: mod_base = OTHER; note = 2'-O-methylcytidine-3'-phosphate
  modified_base 5: mod_base = OTHER; note = 2'-O-methyluridine-3'-phosphate
  modified_base 6: mod_base = OTHER; note = 2'-O-methyluridine-3'-phosphate
  modified_base 7: mod_base = OTHER; note = 2'-fluorocytidine-3'-phosphate
  modified_base 8: mod_base = OTHER; note = 2'-O-methyluridine-3'-phosphate
  modified_base 9: mod_base = OTHER; note = 2'-fluoroadenosine-3'-phosphate
  modified_base 10: mod_base = OTHER; note = 2'-fluoroadenosine-3'-phosphate
  modified_base 11: mod_base = OTHER; note = 2'-fluorouridine-3'-phosphate
  modified_base 12: mod_base = OTHER; note = 2'-O-methylguanosine-3'-phosphate
  modified_base 13: mod_base = OTHER; note = 2'-O-methyladenosine-3'-phosphate
  modified_base 14: mod_base = OTHER; note = 2'-O-methylguanosine-3'-phosphate
  modified_base 15: mod_base = OTHER; note = 2'-O-methyluridine-3'-phosphate
  modified_base 16: mod_base = OTHER; note = 2'-O-methylcytidine-3'-phosphate
  modified_base 17: mod_base = OTHER; note = 2'-O-methylguanosine-3'-phosphate
  modified_base 18: mod_base = OTHER; note = 2'-O-methyladenosine-3'-phosphate
  modified_base 19: mod_base = OTHER; note = 2'-O-methylcytidine-3'-phosphate
  modified_base 20: mod_base = OTHER; note = 2'-O-methyluridine-3'-phosphate
  modified_base 21: mod_base = OTHER; note = 2'-O-methyluridine-3'-phosphate N-[tris(GalNAc-alkyl)-amidodecanoyl)]-4-hydroxyprolinol (Hyp-(GalNAc-alkyl)3)
tttcttctaatgagtcgactt

SEQ ID NO: 767 - RNA, 21 nt, synthetic construct
  source 1..21: mol_type = other RNA
  modified_base 1: mod_base = OTHER; note = 2'-O-methyluridine-3'-phosphorothioate
  modified_base 2: mod_base = OTHER; note = 2'-O-methyluridine-3'-phosphorothioate
  modified_base 3: mod_base = OTHER; note = 2'-O-methylcytidine-3'-phosphate
  modified_base 4: mod_base = OTHER; note = 2'-O-methyluridine-3'-phosphate
  modified_base 5: mod_base = OTHER; note = 2'-O-methyluridine-3'-phosphate
  modified_base 6: mod_base = OTHER; note = 2'-O-methylcytidine-3'-phosphate
  modified_base 7: mod_base = OTHER; note = 2'-fluorouridine-3'-phosphate
  modified_base 8: mod_base = OTHER; note = 2'-O-methyladenosine-3'-phosphate
  modified_base 9: mod_base = OTHER; note = 2'-fluoroadenosine-3'-phosphate
  modified_base 10: mod_base = OTHER; note = 2'-fluorouridine-3'-phosphate
  modified_base 11: mod_base = OTHER; note = 2'-fluoroguanosine-3'-phosphate
  modified_base 12: mod_base = OTHER; note = 2'-O-methyladenosine-3'-phosphate
  modified_base 13: mod_base = OTHER; note = 2'-O-methylguanosine-3'-phosphate
  modified_base 14: mod_base = OTHER; note = 2'-O-methyluridine-3'-phosphate
  modified_base 15: mod_base = OTHER; note = 2'-O-methylcytidine-3'-phosphate
  modified_base 16: mod_base = OTHER; note = 2'-O-methylguanosine-3'-phosphate
  modified_base 17: mod_base = OTHER; note = 2'-O-methyladenosine-3'-phosphate
  modified_base 18: mod_base = OTHER; note = 2'-O-methylcytidine-3'-phosphate
  modified_base 19: mod_base = OTHER; note = 2'-O-methyluridine-3'-phosphate
  modified_base 20: mod_base = OTHER; note = 2'-O-methyluridine-3'-phosphate
  modified_base 21: mod_base = OTHER; note = 2'-O-methyluridine-3'-phosphate N-[tris(GalNAc-alkyl)-amidodecanoyl)]-4-hydroxyprolinol (Hyp-(GalNAc-alkyl)3)
ttcttctaatgagtcgacttt

SEQ ID NO: 768 - RNA, 21 nt, synthetic construct
  source 1..21: mol_type = other RNA
  modified_base 1: mod_base = OTHER; note = 2'-O-methylcytidine-3'-phosphorothioate
  modified_base 2: mod_base = OTHER; note = 2'-O-methyluridine-3'-phosphorothioate
  modified_base 3: mod_base = OTHER; note = 2'-O-methyluridine-3'-phosphate
  modified_base 4: mod_base = OTHER; note = 2'-O-methylcytidine-3'-phosphate
  modified_base 5: mod_base = OTHER; note = 2'-O-methyluridine-3'-phosphate
  modified_base 6: mod_base = OTHER; note = 2'-O-methyladenosine-3'-phosphate
  modified_base 7: mod_base = OTHER; note = 2'-fluoroadenosine-3'-phosphate
  modified_base 8: mod_base = OTHER; note = 2'-O-methyluridine-3'-phosphate
  modified_base 9: mod_base = OTHER; note = 2'-fluoroguanosine-3'-phosphate
  modified_base 10: mod_base = OTHER; note = 2'-fluoroadenosine-3'-phosphate
  modified_base 11: mod_base = OTHER; note = 2'-fluoroguanosine-3'-phosphate
  modified_base 12: mod_base = OTHER; note = 2'-O-methyluridine-3'-phosphate
  modified_base 13: mod_base = OTHER; note = 2'-O-methylcytidine-3'-phosphate
  modified_base 14: mod_base = OTHER; note = 2'-O-methylguanosine-3'-phosphate
  modified_base 15: mod_base = OTHER; note = 2'-O-methyladenosine-3'-phosphate
  modified_base 16: mod_base = OTHER; note = 2'-O-methylcytidine-3'-phosphate
  modified_base 17: mod_base = OTHER; note = 2'-O-methyluridine-3'-phosphate
  modified_base 18: mod_base = OTHER; note = 2'-O-methyluridine-3'-phosphate
  modified_base 19: mod_base = OTHER; note = 2'-O-methyluridine-3'-phosphate
  modified_base 20: mod_base = OTHER; note = 2'-O-methylguanosine-3'-phosphate
  modified_base 21: mod_base = OTHER; note = 2'-O-methyluridine-3'-phosphate N-[tris(GalNAc-alkyl)-amidodecanoyl)]-4-hydroxyprolinol (Hyp-(GalNAc-alkyl)3)
cttctaatgagtcgactttgt

SEQ ID NO: 769 - RNA, 21 nt, synthetic construct
  source 1..21: mol_type = other RNA
  modified_base 1: mod_base = OTHER; note = 2'-O-methyluridine-3'-phosphorothioate
  modified_base 2: mod_base = OTHER; note = 2'-O-methyluridine-3'-phosphorothioate
  modified_base 3: mod_base = OTHER; note = 2'-O-methylcytidine-3'-phosphate
  modified_base 4: mod_base = OTHER; note = 2'-O-methyluridine-3'-phosphate
  modified_base 5: mod_base = OTHER; note = 2'-O-methyladenosine-3'-phosphate
  modified_base 6: mod_base = OTHER; note = 2'-O-methyladenosine-3'-phosphate
  modified_base 7: mod_base = OTHER; note = 2'-fluorouridine-3'-phosphate
  modified_base 8: mod_base = OTHER; note = 2'-O-methylguanosine-3'-phosphate
  modified_base 9: mod_base = OTHER; note = 2'-fluoroadenosine-3'-phosphate
  modified_base 10: mod_base = OTHER; note = 2'-fluoroguanosine-3'-phosphate
  modified_base 11: mod_base = OTHER; note = 2'-fluorouridine-3'-phosphate
  modified_base 12: mod_base = OTHER; note = 2'-O-methylcytidine-3'-phosphate
  modified_base 13: mod_base = OTHER; note = 2'-O-methylguanosine-3'-phosphate
  modified_base 14: mod_base = OTHER; note = 2'-O-methyladenosine-3'-phosphate
  modified_base 15: mod_base = OTHER; note = 2'-O-methylcytidine-3'-phosphate
  modified_base 16: mod_base = OTHER; note = 2'-O-methyluridine-3'-phosphate
  modified_base 17: mod_base = OTHER; note = 2'-O-methyluridine-3'-phosphate
  modified_base 18: mod_base = OTHER; note = 2'-O-methyluridine-3'-phosphate
  modified_base 19: mod_base = OTHER; note = 2'-O-methylguanosine-3'-phosphate
  modified_base 20: mod_base = OTHER; note = 2'-O-methyladenosine-3'-phosphate
  modified_base 21: mod_base = OTHER; note = 2'-O-methyluridine-3'-phosphate N-[tris(GalNAc-alkyl)-amidodecanoyl)]-4-hydroxyprolinol (Hyp-(GalNAc-alkyl)3)
ttctaatgagtcgactttgat

SEQ ID NO: 770 - RNA, 21 nt, synthetic construct
  source 1..21: mol_type = other RNA
  modified_base 1: mod_base = OTHER; note = 2'-O-methyluridine-3'-phosphorothioate
  modified_base 2: mod_base = OTHER; note = 2'-O-methylcytidine-3'-phosphorothioate
  modified_base 3: mod_base = OTHER; note = 2'-O-methyluridine-3'-phosphate
  modified_base 4: mod_base = OTHER; note = 2'-O-methyladenosine-3'-phosphate
  modified_base 5: mod_base = OTHER; note = 2'-O-methyladenosine-3'-phosphate
  modified_base 6: mod_base = OTHER; note = 2'-O-methyluridine-3'-phosphate
  modified_base 7: mod_base = OTHER; note = 2'-fluoroguanosine-3'-phosphate
  modified_base 8: mod_base = OTHER; note = 2'-O-methyladenosine-3'-phosphate
  modified_base 9: mod_base = OTHER; note = 2'-fluoroguanosine-3'-phosphate
  modified_base 10: mod_base = OTHER; note = 2'-fluorouridine-3'-phosphate
  modified_base 11: mod_base = OTHER; note = 2'-fluorocytidine-3'-phosphate
  modified_base 12: mod_base = OTHER; note = 2'-O-methylguanosine-3'-phosphate
  modified_base 13: mod_base = OTHER; note = 2'-O-methyladenosine-3'-phosphate
  modified_base 14: mod_base = OTHER; note = 2'-O-methylcytidine-3'-phosphate
  modified_base 15: mod_base = OTHER; note = 2'-O-methyluridine-3'-phosphate
  modified_base 16: mod_base = OTHER; note = 2'-O-methyluridine-3'-phosphate
  modified_base 17: mod_base = OTHER; note = 2'-O-methyluridine-3'-phosphate
  modified_base 18: mod_base = OTHER; note = 2'-O-methylguanosine-3'-phosphate
  modified_base 19: mod_base = OTHER; note = 2'-O-methyladenosine-3'-phosphate
  modified_base 20: mod_base = OTHER; note = 2'-O-methylguanosine-3'-phosphate
  modified_base 21: mod_base = OTHER; note = 2'-O-methyluridine-3'-phosphate N-[tris(GalNAc-alkyl)-amidodecanoyl)]-4-hydroxyprolinol (Hyp-(GalNAc-alkyl)3)
tctaatgagtcgactttgagt

SEQ ID NO: 771 - RNA, 21 nt, synthetic construct
  source 1..21: mol_type = other RNA
  modified_base 1: mod_base = OTHER; note = 2'-O-methylcytidine-3'-phosphorothioate
  modified_base 2: mod_base = OTHER; note = 2'-O-methyluridine-3'-phosphorothioate
  modified_base 3: mod_base = OTHER; note = 2'-O-methyladenosine-3'-phosphate
  modified_base 4: mod_base = OTHER; note = 2'-O-methyladenosine-3'-phosphate
  modified_base 5: mod_base = OTHER; note = 2'-O-methyluridine-3'-phosphate
  modified_base 6: mod_base = OTHER; note = 2'-O-methylguanosine-3'-phosphate
  modified_base 7: mod_base = OTHER; note = 2'-fluoroadenosine-3'-phosphate
  modified_base 8: mod_base = OTHER; note = 2'-O-methylguanosine-3'-phosphate
  modified_base 9: mod_base = OTHER; note = 2'-fluorouridine-3'-phosphate
  modified_base 10: mod_base = OTHER; note = 2'-fluorocytidine-3'-phosphate
  modified_base 11: mod_base = OTHER; note = 2'-fluoroguanosine-3'-phosphate
  modified_base 12: mod_base = OTHER; note = 2'-O-methyladenosine-3'-phosphate
  modified_base 13: mod_base = OTHER; note = 2'-O-methylcytidine-3'-phosphate
  modified_base 14: mod_base = OTHER; note = 2'-O-methyluridine-3'-phosphate
  modified_base 15: mod_base = OTHER; note = 2'-O-methyluridine-3'-phosphate
  modified_base 16: mod_base = OTHER; note = 2'-O-methyluridine-3'-phosphate
  modified_base 17: mod_base = OTHER; note = 2'-O-methylguanosine-3'-phosphate
  modified_base 18: mod_base = OTHER; note = 2'-O-methyladenosine-3'-phosphate
  modified_base 19: mod_base = OTHER; note = 2'-O-methylguanosine-3'-phosphate
  modified_base 20: mod_base = OTHER; note = 2'-O-methylcytidine-3'-phosphate
  modified_base 21: mod_base = OTHER; note = 2'-O-methyluridine-3'-phosphate N-[tris(GalNAc-alkyl)-amidodecanoyl)]-4-hydroxyprolinol (Hyp-(GalNAc-alkyl)3)
ctaatgagtcgactttgagct

SEQ ID NO: 772 - RNA, 21 nt, synthetic construct
  source 1..21: mol_type = other RNA
  modified_base 1: mod_base = OTHER; note = 2'-O-methyluridine-3'-phosphorothioate
  modified_base 2: mod_base = OTHER; note = 2'-O-methyladenosine-3'-phosphorothioate
  modified_base 3: mod_base = OTHER; note = 2'-O-methyladenosine-3'-phosphate
  modified_base 4: mod_base = OTHER; note = 2'-O-methyluridine-3'-phosphate
  modified_base 5: mod_base = OTHER; note = 2'-O-methylguanosine-3'-phosphate
  modified_base 6: mod_base = OTHER; note = 2'-O-methyladenosine-3'-phosphate
  modified_base 7: mod_base = OTHER; note = 2'-fluoroguanosine-3'-phosphate
  modified_base 8: mod_base = OTHER; note = 2'-O-methyluridine-3'-phosphate
  modified_base 9: mod_base = OTHER; note = 2'-fluorocytidine-3'-phosphate
  modified_base 10: mod_base = OTHER; note = 2'-fluoroguanosine-3'-phosphate
  modified_base 11: mod_base = OTHER; note = 2'-fluoroadenosine-3'-phosphate
  modified_base 12: mod_base = OTHER; note = 2'-O-methylcytidine-3'-phosphate
  modified_base 13: mod_base = OTHER; note = 2'-O-methyluridine-3'-phosphate
  modified_base 14: mod_base = OTHER; note = 2'-O-methyluridine-3'-phosphate
  modified_base 15: mod_base = OTHER; note = 2'-O-methyluridine-3'-phosphate
  modified_base 16: mod_base = OTHER; note = 2'-O-methylguanosine-3'-phosphate
  modified_base 17: mod_base = OTHER; note = 2'-O-methyladenosine-3'-phosphate
  modified_base 18: mod_base = OTHER; note = 2'-O-methylguanosine-3'-phosphate
  modified_base 19: mod_base = OTHER; note = 2'-O-methylcytidine-3'-phosphate
  modified_base 20: mod_base = OTHER; note = 2'-O-methyluridine-3'-phosphate
  modified_base 21: mod_base = OTHER; note = 2'-O-methyluridine-3'-phosphate N-[tris(GalNAc-alkyl)-amidodecanoyl)]-4-hydroxyprolinol (Hyp-(GalNAc-alkyl)3)
taatgagtcgactttgagctt

SEQ ID NO: 773 - RNA, 21 nt, synthetic construct
  source 1..21: mol_type = other RNA
  modified_base 1: mod_base = OTHER; note = 2'-O-methylguanosine-3'-phosphorothioate
  modified_base 2: mod_base = OTHER; note = 2'-O-methyladenosine-3'-phosphorothioate
  modified_base 3: mod_base = OTHER; note = 2'-O-methylcytidine-3'-phosphate
  modified_base 4: mod_base = OTHER; note = 2'-O-methyluridine-3'-phosphate
  modified_base 5: mod_base = OTHER; note = 2'-O-methyluridine-3'-phosphate
  modified_base 6: mod_base = OTHER; note = 2'-O-methyluridine-3'-phosphate
  modified_base 7: mod_base = OTHER; note = 2'-fluoroguanosine-3'-phosphate
  modified_base 8: mod_base = OTHER; note = 2'-O-methyladenosine-3'-phosphate
  modified_base 9: mod_base = OTHER; note = 2'-fluoroguanosine-3'-phosphate
  modified_base 10: mod_base = OTHER; note = 2'-fluorocytidine-3'-phosphate
  modified_base 11: mod_base = OTHER; note = 2'-fluorouridine-3'-phosphate
  modified_base 12: mod_base = OTHER; note = 2'-O-methylguanosine-3'-phosphate
  modified_base 13: mod_base = OTHER; note = 2'-O-methylguanosine-3'-phosphate
  modified_base 14: mod_base = OTHER; note = 2'-O-methyladenosine-3'-phosphate
  modified_base 15: mod_base = OTHER; note = 2'-O-methyladenosine-3'-phosphate
  modified_base 16: mod_base = OTHER; note = 2'-O-methyladenosine-3'-phosphate
  modified_base 17: mod_base = OTHER; note = 2'-O-methylguanosine-3'-phosphate
  modified_base 18: mod_base = OTHER; note = 2'-O-methylcytidine-3'-phosphate
  modified_base 19: mod_base = OTHER; note = 2'-O-methyladenosine-3'-phosphate
  modified_base 20: mod_base = OTHER; note = 2'-O-methylguanosine-3'-phosphate
  modified_base 21: mod_base = OTHER; note = 2'-O-methyluridine-3'-phosphate N-[tris(GalNAc-alkyl)-amidodecanoyl)]-4-hydroxyprolinol (Hyp-(GalNAc-alkyl)3)
gactttgagctggaaagcagt

SEQ ID NO: 774 - RNA, 21 nt, synthetic construct
  source 1..21: mol_type = other RNA
  modified_base 1: mod_base = OTHER; note = 2'-O-methylguanosine-3'-phosphorothioate
  modified_base 2: mod_base = OTHER; note = 2'-O-methyladenosine-3'-phosphorothioate
  modified_base 3: mod_base = OTHER; note = 2'-O-methylguanosine-3'-phosphate
  modified_base 4: mod_base = OTHER; note = 2'-O-methylcytidine-3'-phosphate
  modified_base 5: mod_base = OTHER; note = 2'-O-methyluridine-3'-phosphate
  modified_base 6: mod_base = OTHER; note = 2'-O-methylguanosine-3'-phosphate
  modified_base 7: mod_base = OTHER; note = 2'-fluoroguanosine-3'-phosphate
  modified_base 8: mod_base = OTHER; note = 2'-O-methyladenosine-3'-phosphate
  modified_base 9: mod_base = OTHER; note = 2'-fluoroadenosine-3'-phosphate
  modified_base 10: mod_base = OTHER; note = 2'-fluoroadenosine-3'-phosphate
  modified_base 11: mod_base = OTHER; note = 2'-fluoroguanosine-3'-phosphate
  modified_base 12: mod_base = OTHER; note = 2'-O-methylcytidine-3'-phosphate
  modified_base 13: mod_base = OTHER; note = 2'-O-methyladenosine-3'-phosphate
  modified_base 14: mod_base = OTHER; note = 2'-O-methylguanosine-3'-phosphate
  modified_base 15: mod_base = OTHER; note = 2'-O-methylcytidine-3'-phosphate
  modified_base 16: mod_base = OTHER; note = 2'-O-methylcytidine-3'-phosphate
  modified_base 17: mod_base = OTHER; note = 2'-O-methylguanosine-3'-phosphate
  modified_base 18: mod_base = OTHER; note = 2'-O-methyluridine-3'-phosphate
  modified_base 19: mod_base = OTHER; note = 2'-O-methyluridine-3'-phosphate
  modified_base 20: mod_base = OTHER; note = 2'-O-methyluridine-3'-phosphate
  modified_base 21: mod_base = OTHER; note = 2'-O-methyluridine-3'-phosphate N-[tris(GalNAc-alkyl)-amidodecanoyl)]-4-hydroxyprolinol (Hyp-(GalNAc-alkyl)3)
gagctggaaagcagccgtttt

SEQ ID NO: 775 - RNA, 21 nt, synthetic construct
  source 1..21: mol_type = other RNA
  modified_base 1: mod_base = OTHER; note = 2'-O-methyladenosine-3'-phosphorothioate
  modified_base 2: mod_base = OTHER; note = 2'-O-methylguanosine-3'-phosphorothioate
  modified_base 3: mod_base = OTHER; note = 2'-O-methylcytidine-3'-phosphate
  modified_base 4: mod_base = OTHER; note = 2'-O-methyluridine-3'-phosphate
  modified_base 5: mod_base = OTHER; note = 2'-O-methylguanosine-3'-phosphate
  modified_base 6: mod_base = OTHER; note = 2'-O-methylguanosine-3'-phosphate
  modified_base 7: mod_base = OTHER; note = 2'-fluoroadenosine-3'-phosphate
  modified_base 8: mod_base = OTHER; note = 2'-O-methyladenosine-3'-phosphate
  modified_base 9: mod_base = OTHER; note = 2'-fluoroadenosine-3'-phosphate
  modified_base 10: mod_base = OTHER; note = 2'-fluoroguanosine-3'-phosphate
  modified_base 11: mod_base = OTHER; note = 2'-fluorocytidine-3'-phosphate
  modified_base 12: mod_base = OTHER; note = 2'-O-methyladenosine-3'-phosphate
  modified_base 13: mod_base = OTHER; note = 2'-O-methylguanosine-3'-phosphate
  modified_base 14: mod_base = OTHER; note = 2'-O-methylcytidine-3'-phosphate
  modified_base 15: mod_base = OTHER; note = 2'-O-methylcytidine-3'-phosphate
  modified_base 16: mod_base = OTHER; note = 2'-O-methylguanosine-3'-phosphate
  modified_base 17: mod_base = OTHER; note = 2'-O-methyluridine-3'-phosphate
  modified_base 18: mod_base = OTHER; note = 2'-O-methyluridine-3'-phosphate
  modified_base 19: mod_base = OTHER; note = 2'-O-methyluridine-3'-phosphate
  modified_base 20: mod_base = OTHER; note = 2'-O-methylcytidine-3'-phosphate
  modified_base 21: mod_base = OTHER; note = 2'-O-methyluridine-3'-phosphate N-[tris(GalNAc-alkyl)-amidodecanoyl)]-4-hydroxyprolinol (Hyp-(GalNAc-alkyl)3)
agctggaaagcagccgtttct

SEQ ID NO: 776 - RNA, 21 nt, synthetic construct
  source 1..21: mol_type = other RNA
  modified_base 1: mod_base = OTHER; note = 2'-O-methylguanosine-3'-phosphorothioate
  modified_base 2: mod_base = OTHER; note = 2'-O-methylcytidine-3'-phosphorothioate
  modified_base 3: mod_base = OTHER; note = 2'-O-methyluridine-3'-phosphate
  modified_base 4: mod_base = OTHER; note = 2'-O-methylguanosine-3'-phosphate
  modified_base 5: mod_base = OTHER; note = 2'-O-methylguanosine-3'-phosphate
  modified_base 6: mod_base = OTHER; note = 2'-O-methyladenosine-3'-phosphate
  modified_base 7: mod_base = OTHER; note = 2'-fluoroadenosine-3'-phosphate
  modified_base 8: mod_base = OTHER; note = 2'-O-methyladenosine-3'-phosphate
  modified_base 9: mod_base = OTHER; note = 2'-fluoroguanosine-3'-phosphate
  modified_base 10: mod_base = OTHER; note = 2'-fluorocytidine-3'-phosphate
  modified_base 11: mod_base = OTHER; note = 2'-fluoroadenosine-3'-phosphate
  modified_base 12: mod_base = OTHER; note = 2'-O-methylguanosine-3'-phosphate
  modified_base 13: mod_base = OTHER; note = 2'-O-methylcytidine-3'-phosphate
  modified_base 14: mod_base = OTHER; note = 2'-O-methylcytidine-3'-phosphate
  modified_base 15: mod_base = OTHER; note = 2'-O-methylguanosine-3'-phosphate
  modified_base 16: mod_base = OTHER; note = 2'-O-methyluridine-3'-phosphate
  modified_base 17: mod_base = OTHER; note = 2'-O-methyluridine-3'-phosphate
  modified_base 18: mod_base = OTHER; note = 2'-O-methyluridine-3'-phosphate
  modified_base 19: mod_base = OTHER; note = 2'-O-methylcytidine-3'-phosphate
  modified_base 20: mod_base = OTHER; note = 2'-O-methyluridine-3'-phosphate
  modified_base 21: mod_base = OTHER; note = 2'-O-methyluridine-3'-phosphate N-[tris(GalNAc-alkyl)-amidodecanoyl)]-4-hydroxyprolinol (Hyp-(GalNAc-alkyl)3)
gctggaaagcagccgtttctt

SEQ ID NO: 777 - RNA, 21 nt, synthetic construct
  source 1..21: mol_type = other RNA
  modified_base 1: mod_base = OTHER; note = 2'-O-methylcytidine-3'-phosphorothioate
  modified_base 2: mod_base = OTHER; note = 2'-O-methyluridine-3'-phosphorothioate
  modified_base 3: mod_base = OTHER; note = 2'-O-methylguanosine-3'-phosphate
  modified_base 4: mod_base = OTHER; note = 2'-O-methylguanosine-3'-phosphate
  modified_base 5: mod_base = OTHER; note = 2'-O-methyladenosine-3'-phosphate
  modified_base 6: mod_base = OTHER; note = 2'-O-methyladenosine-3'-phosphate
  modified_base 7: mod_base = OTHER; note = 2'-fluoroadenosine-3'-phosphate
  modified_base 8: mod_base = OTHER; note = 2'-O-methylguanosine-3'-phosphate
  modified_base 9: mod_base = OTHER; note = 2'-fluorocytidine-3'-phosphate
  modified_base 10: mod_base = OTHER; note = 2'-fluoroadenosine-3'-phosphate
  modified_base 11: mod_base = OTHER; note = 2'-fluoroguanosine-3'-phosphate
  modified_base 12: mod_base = OTHER; note = 2'-O-methylcytidine-3'-phosphate
  modified_base 13: mod_base = OTHER; note = 2'-O-methylcytidine-3'-phosphate
  modified_base 14: mod_base = OTHER; note = 2'-O-methylguanosine-3'-phosphate
  modified_base 15: mod_base = OTHER; note = 2'-O-methyluridine-3'-phosphate
  modified_base 16: mod_base = OTHER; note = 2'-O-methyluridine-3'-phosphate
  modified_base 17: mod_base = OTHER; note = 2'-O-methyluridine-3'-phosphate
  modified_base 18: mod_base = OTHER; note = 2'-O-methylcytidine-3'-phosphate
  modified_base 19: mod_base = OTHER; note = 2'-O-methyluridine-3'-phosphate
  modified_base 20: mod_base = OTHER; note = 2'-O-methylcytidine-3'-phosphate
  modified_base 21: mod_base = OTHER; note = 2'-O-methyluridine-3'-phosphate N-[tris(GalNAc-alkyl)-amidodecanoyl)]-4-hydroxyprolinol (Hyp-(GalNAc-alkyl)3)
ctggaaagcagccgtttctct

SEQ ID NO: 778 - RNA, 21 nt, synthetic construct
  source 1..21: mol_type = other RNA
  modified_base 1: mod_base = OTHER; note = 2'-O-methylguanosine-3'-phosphorothioate
  modified_base 2: mod_base = OTHER; note = 2'-O-methylguanosine-3'-phosphorothioate
  modified_base 3: mod_base = OTHER; note = 2'-O-methyladenosine-3'-phosphate
  modified_base 4: mod_base = OTHER; note = 2'-O-methyladenosine-3'-phosphate
  modified_base 5: mod_base = OTHER; note = 2'-O-methyladenosine-3'-phosphate
  modified_base 6: mod_base = OTHER; note = 2'-O-methylguanosine-3'-phosphate
  modified_base 7: mod_base = OTHER; note = 2'-fluorocytidine-3'-phosphate
  modified_base 8: mod_base = OTHER; note = 2'-O-methyladenosine-3'-phosphate
  modified_base 9: mod_base = OTHER; note = 2'-fluoroguanosine-3'-phosphate
  modified_base 10: mod_base = OTHER; note = 2'-fluorocytidine-3'-phosphate
  modified_base 11: mod_base = OTHER; note = 2'-fluorocytidine-3'-phosphate
  modified_base 12: mod_base = OTHER; note = 2'-O-methylguanosine-3'-phosphate
  modified_base 13: mod_base = OTHER; note = 2'-O-methyluridine-3'-phosphate
  modified_base 14: mod_base = OTHER; note = 2'-O-methyluridine-3'-phosphate
  modified_base 15: mod_base = OTHER; note = 2'-O-methyluridine-3'-phosphate
  modified_base 16: mod_base = OTHER; note = 2'-O-methylcytidine-3'-phosphate
  modified_base 17: mod_base = OTHER; note = 2'-O-methyluridine-3'-phosphate
  modified_base 18: mod_base = OTHER; note = 2'-O-methylcytidine-3'-phosphate
  modified_base 19: mod_base = OTHER; note = 2'-O-methylcytidine-3'-phosphate
  modified_base 20: mod_base = OTHER; note = 2'-O-methyluridine-3'-phosphate
  modified_base 21: mod_base = OTHER; note = 2'-O-methyluridine-3'-phosphate N-[tris(GalNAc-alkyl)-amidodecanoyl)]-4-hydroxyprolinol (Hyp-(GalNAc-alkyl)3)
ggaaagcagccgtttctcctt

SEQ ID NO: 779 - RNA, 21 nt, synthetic construct
  source 1..21: mol_type = other RNA
  modified_base 1: mod_base = OTHER; note = 2'-O-methyladenosine-3'-phosphorothioate
  modified_base 2: mod_base = OTHER; note = 2'-O-methyladenosine-3'-phosphorothioate
  modified_base 3: mod_base = OTHER; note = 2'-O-methyladenosine-3'-phosphate
  modified_base 4: mod_base = OTHER; note = 2'-O-methylguanosine-3'-phosphate
  modified_base 5: mod_base = OTHER; note = 2'-O-methylcytidine-3'-phosphate
  modified_base 6: mod_base = OTHER; note = 2'-O-methyladenosine-3'-phosphate
  modified_base 7: mod_base = OTHER; note = 2'-fluoroguanosine-3'-phosphate
  modified_base 8: mod_base = OTHER; note = 2'-O-methylcytidine-3'-phosphate
  modified_base 9: mod_base = OTHER; note = 2'-fluorocytidine-3'-phosphate
  modified_base 10: mod_base = OTHER; note = 2'-fluoroguanosine-3'-phosphate
  modified_base 11: mod_base = OTHER; note = 2'-fluorouridine-3'-phosphate
  modified_base 12: mod_base = OTHER; note = 2'-O-methyluridine-3'-phosphate
  modified_base 13: mod_base = OTHER; note = 2'-O-methyluridine-3'-phosphate
  modified_base 14: mod_base = OTHER; note = 2'-O-methylcytidine-3'-phosphate
  modified_base 15: mod_base = OTHER; note = 2'-O-methyluridine-3'-phosphate
  modified_base 16: mod_base = OTHER; note = 2'-O-methylcytidine-3'-phosphate
  modified_base 17: mod_base = OTHER; note = 2'-O-methylcytidine-3'-phosphate
  modified_base 18: mod_base = OTHER; note = 2'-O-methyluridine-3'-phosphate
  modified_base 19: mod_base = OTHER; note = 2'-O-methyluridine-3'-phosphate
  modified_base 20: mod_base = OTHER; note = 2'-O-methylguanosine-3'-phosphate
  modified_base 21: mod_base = OTHER; note = 2'-O-methyluridine-3'-phosphate N-[tris(GalNAc-alkyl)-amidodecanoyl)]-4-hydroxyprolinol (Hyp-(GalNAc-alkyl)3)
aaagcagccgtttctccttgt

SEQ ID NO: 780 - RNA, 21 nt, synthetic construct
  source 1..21: mol_type = other RNA
  modified_base 1: mod_base = OTHER; note = 2'-O-methyladenosine-3'-phosphorothioate
  modified_base 2: mod_base = OTHER; note = 2'-O-methylguanosine-3'-phosphorothioate
  modified_base 3: mod_base = OTHER; note = 2'-O-methylcytidine-3'-phosphate
  modified_base 4: mod_base = OTHER; note = 2'-O-methyladenosine-3'-phosphate
  modified_base 5: mod_base = OTHER; note = 2'-O-methylguanosine-3'-phosphate
  modified_base 6: mod_base = OTHER; note = 2'-O-methylcytidine-3'-phosphate
  modified_base 7: mod_base = OTHER; note = 2'-fluorocytidine-3'-phosphate
  modified_base 8: mod_base = OTHER; note = 2'-O-methylguanosine-3'-phosphate
  modified_base 9: mod_base = OTHER; note = 2'-fluorouridine-3'-phosphate
  modified_base 10: mod_base = OTHER; note = 2'-fluorouridine-3'-phosphate
  modified_base 11: mod_base = OTHER; note = 2'-fluorouridine-3'-phosphate
  modified_base 12: mod_base = OTHER; note = 2'-O-methylcytidine-3'-phosphate
  modified_base 13: mod_base = OTHER; note = 2'-O-methyluridine-3'-phosphate
  modified_base 14: mod_base = OTHER; note = 2'-O-methylcytidine-3'-phosphate
  modified_base 15: mod_base = OTHER; note = 2'-O-methylcytidine-3'-phosphate
  modified_base 16: mod_base = OTHER; note = 2'-O-methyluridine-3'-phosphate
  modified_base 17: mod_base = OTHER; note = 2'-O-methyluridine-3'-phosphate
  modified_base 18: mod_base = OTHER; note = 2'-O-methylguanosine-3'-phosphate
  modified_base 19: mod_base = OTHER; note = 2'-O-methylguanosine-3'-phosphate
  modified_base 20: mod_base = OTHER; note = 2'-O-methyluridine-3'-phosphate
  modified_base 21: mod_base = OTHER; note = 2'-O-methyluridine-3'-phosphate N-[tris(GalNAc-alkyl)-amidodecanoyl)]-4-hydroxyprolinol (Hyp-(GalNAc-alkyl)3)
agcagccgtttctccttggtt

SEQ ID NO: 781 - RNA, 21 nt, synthetic construct
  source 1..21: mol_type = other RNA
  modified_base 1: mod_base = OTHER; note = 2'-O-methylguanosine-3'-phosphorothioate
  modified_base 2: mod_base = OTHER; note = 2'-O-methylcytidine-3'-phosphorothioate
  modified_base 3: mod_base = OTHER; note = 2'-O-methyladenosine-3'-phosphate
  modified_base 4: mod_base = OTHER; note = 2'-O-methylguanosine-3'-phosphate
  modified_base 5: mod_base = OTHER; note = 2'-O-methylcytidine-3'-phosphate
  modified_base 6: mod_base = OTHER; note = 2'-O-methylcytidine-3'-phosphate
  modified_base 7: mod_base = OTHER; note = 2'-fluoroguanosine-3'-phosphate
  modified_base 8: mod_base = OTHER; note = 2'-O-methyluridine-3'-phosphate
  modified_base 9: mod_base = OTHER; note = 2'-fluorouridine-3'-phosphate
  modified_base 10: mod_base = OTHER; note = 2'-fluorouridine-3'-phosphate
  modified_base 11: mod_base = OTHER; note = 2'-fluorocytidine-3'-phosphate
  modified_base 12: mod_base = OTHER; note = 2'-O-methyluridine-3'-phosphate
  modified_base 13: mod_base = OTHER; note = 2'-O-methylcytidine-3'-phosphate
  modified_base 14: mod_base = OTHER; note = 2'-O-methylcytidine-3'-phosphate
  modified_base 15: mod_base = OTHER; note = 2'-O-methyluridine-3'-phosphate
  modified_base 16: mod_base = OTHER; note = 2'-O-methyluridine-3'-phosphate
  modified_base 17: mod_base = OTHER; note = 2'-O-methylguanosine-3'-phosphate
  modified_base 18: mod_base = OTHER; note = 2'-O-methylguanosine-3'-phosphate
  modified_base 19: mod_base = OTHER; note = 2'-O-methyluridine-3'-phosphate
  modified_base 20: mod_base = OTHER; note = 2'-O-methylcytidine-3'-phosphate
  modified_base 21: mod_base = OTHER; note = 2'-O-methyluridine-3'-phosphate N-[tris(GalNAc-alkyl)-amidodecanoyl)]-4-hydroxyprolinol (Hyp-(GalNAc-alkyl)3)
gcagccgtttctccttggtct

SEQ ID NO: 782 - RNA, 21 nt, synthetic construct
  source 1..21: mol_type = other RNA
  modified_base 1: mod_base = OTHER; note = 2'-O-methylcytidine-3'-phosphorothioate
  modified_base 2: mod_base = OTHER; note = 2'-O-methyladenosine-3'-phosphorothioate
  modified_base 3: mod_base = OTHER; note = 2'-O-methylguanosine-3'-phosphate
  modified_base 4: mod_base = OTHER; note = 2'-O-methylcytidine-3'-phosphate
  modified_base 5: mod_base = OTHER; note = 2'-O-methylcytidine-3'-phosphate
  modified_base 6: mod_base = OTHER; note = 2'-O-methylguanosine-3'-phosphate
  modified_base 7: mod_base = OTHER; note = 2'-fluorouridine-3'-phosphate
  modified_base 8: mod_base = OTHER; note = 2'-O-methyluridine-3'-phosphate
  modified_base 9: mod_base = OTHER; note = 2'-fluorouridine-3'-phosphate
  modified_base 10: mod_base = OTHER; note = 2'-fluorocytidine-3'-phosphate
  modified_base 11: mod_base = OTHER; note = 2'-fluorouridine-3'-phosphate
  modified_base 12: mod_base = OTHER; note = 2'-O-methylcytidine-3'-phosphate
  modified_base 13: mod_base = OTHER; note = 2'-O-methylcytidine-3'-phosphate
  modified_base 14: mod_base = OTHER; note = 2'-O-methyluridine-3'-phosphate
  modified_base 15: mod_base = OTHER; note = 2'-O-methyluridine-3'-phosphate
  modified_base 16: mod_base = OTHER; note = 2'-O-methylguanosine-3'-phosphate
  modified_base 17: mod_base = OTHER; note = 2'-O-methylguanosine-3'-phosphate
  modified_base 18: mod_base = OTHER; note = 2'-O-methyluridine-3'-phosphate
  modified_base 19: mod_base = OTHER; note = 2'-O-methylcytidine-3'-phosphate
  modified_base 20: mod_base = OTHER; note = 2'-O-methyluridine-3'-phosphate
  modified_base 21: mod_base = OTHER; note = 2'-O-methyluridine-3'-phosphate N-[tris(GalNAc-alkyl)-amidodecanoyl)]-4-hydroxyprolinol (Hyp-(GalNAc-alkyl)3)
cagccgtttctccttggtctt

SEQ ID NO: 783 - RNA, 21 nt, synthetic construct
  source 1..21: mol_type = other RNA
  modified_base 1: mod_base = OTHER; note = 2'-O-methylcytidine-3'-phosphorothioate
  modified_base 2: mod_base = OTHER; note = 2'-O-methylguanosine-3'-phosphorothioate
  modified_base 3: mod_base = OTHER; note = 2'-O-methyluridine-3'-phosphate
  modified_base 4: mod_base = OTHER; note = 2'-O-methyluridine-3'-phosphate
  modified_base 5: mod_base = OTHER; note = 2'-O-methyluridine-3'-phosphate
  modified_base 6: mod_base = OTHER; note = 2'-O-methylcytidine-3'-phosphate
  modified_base 7: mod_base = OTHER; note = 2'-fluorouridine-3'-phosphate
  modified_base 8: mod_base = OTHER; note = 2'-O-methylcytidine-3'-phosphate
  modified_base 9: mod_base = OTHER; note = 2'-fluorocytidine-3'-phosphate
  modified_base 10: mod_base = OTHER; note = 2'-fluorouridine-3'-phosphate
  modified_base 11: mod_base = OTHER; note = 2'-fluorouridine-3'-phosphate
  modified_base 12: mod_base = OTHER; note = 2'-O-methylguanosine-3'-phosphate
  modified_base 13: mod_base = OTHER; note = 2'-O-methylguanosine-3'-phosphate
  modified_base 14: mod_base = OTHER; note = 2'-O-methyluridine-3'-phosphate
  modified_base 15: mod_base = OTHER; note = 2'-O-methylcytidine-3'-phosphate
  modified_base 16: mod_base = OTHER; note = 2'-O-methyluridine-3'-phosphate
  modified_base 17: mod_base = OTHER; note = 2'-O-methyladenosine-3'-phosphate
  modified_base 18: mod_base = OTHER; note = 2'-O-methyladenosine-3'-phosphate
  modified_base 19: mod_base = OTHER; note = 2'-O-methylguanosine-3'-phosphate
  modified_base 20: mod_base = OTHER; note = 2'-O-methyluridine-3'-phosphate
  modified_base 21: mod_base = OTHER; note = 2'-O-methyluridine-3'-phosphate N-[tris(GalNAc-alkyl)-amidodecanoyl)]-4-hydroxyprolinol (Hyp-(GalNAc-alkyl)3)
cgtttctccttggtctaagtt

SEQ ID NO: 784 - RNA, 21 nt, synthetic construct
  source 1..21: mol_type = other RNA
  modified_base 1: mod_base = OTHER; note = 2'-O-methylguanosine-3'-phosphorothioate
  modified_base 2: mod_base = OTHER; note = 2'-O-methyluridine-3'-phosphorothioate
  modified_base 3: mod_base = OTHER; note = 2'-O-methyluridine-3'-phosphate
  modified_base 4: mod_base = OTHER; note = 2'-O-methyluridine-3'-phosphate
  modified_base 5: mod_base = OTHER; note = 2'-O-methylcytidine-3'-phosphate
  modified_base 6: mod_base = OTHER; note = 2'-O-methyluridine-3'-phosphate
  modified_base 7: mod_base = OTHER; note = 2'-fluorocytidine-3'-phosphate
  modified_base 8: mod_base = OTHER; note = 2'-O-methylcytidine-3'-phosphate
  modified_base 9: mod_base = OTHER; note = 2'-fluorouridine-3'-phosphate
  modified_base 10: mod_base = OTHER; note = 2'-fluorouridine-3'-phosphate
  modified_base 11: mod_base = OTHER; note = 2'-fluoroguanosine-3'-phosphate
  modified_base 12: mod_base = OTHER; note = 2'-O-methylguanosine-3'-phosphate
  modified_base 13: mod_base = OTHER; note = 2'-O-methyluridine-3'-phosphate
  modified_base 14: mod_base = OTHER; note = 2'-O-methylcytidine-3'-phosphate
  modified_base 15: mod_base = OTHER; note = 2'-O-methyluridine-3'-phosphate
  modified_base 16: mod_base = OTHER; note = 2'-O-methyladenosine-3'-phosphate
  modified_base 17: mod_base = OTHER; note = 2'-O-methyladenosine-3'-phosphate
  modified_base 18: mod_base = OTHER; note = 2'-O-methylguanosine-3'-phosphate
  modified_base 19: mod_base = OTHER; note = 2'-O-methyluridine-3'-phosphate
  modified_base 20: mod_base = OTHER; note = 2'-O-methylguanosine-3'-phosphate
  modified_base 21: mod_base = OTHER; note = 2'-O-methyluridine-3'-phosphate N-[tris(GalNAc-alkyl)-amidodecanoyl)]-4-hydroxyprolinol (Hyp-(GalNAc-alkyl)3)
gtttctccttggtctaagtgt

SEQ ID NO: 785 - RNA, 21 nt, synthetic construct
  source 1..21: mol_type = other RNA
  modified_base 1: mod_base = OTHER; note = 2'-O-methyluridine-3'-phosphorothioate
  modified_base 2: mod_base = OTHER; note = 2'-O-methyluridine-3'-phosphorothioate
  modified_base 3: mod_base = OTHER; note = 2'-O-methyluridine-3'-phosphate
  modified_base 4: mod_base = OTHER; note = 2'-O-methylcytidine-3'-phosphate
  modified_base 5: mod_base = OTHER; note = 2'-O-methyluridine-3'-phosphate
  modified_base 6: mod_base = OTHER; note = 2'-O-methylcytidine-3'-phosphate
  modified_base 7: mod_base = OTHER; note = 2'-fluorocytidine-3'-phosphate
  modified_base 8: mod_base = OTHER; note = 2'-O-methyluridine-3'-phosphate
  modified_base 9: mod_base = OTHER; note = 2'-fluorouridine-3'-phosphate
  modified_base 10: mod_base = OTHER; note = 2'-fluoroguanosine-3'-phosphate
  modified_base 11: mod_base = OTHER; note = 2'-fluoroguanosine-3'-phosphate
  modified_base 12: mod_base = OTHER; note = 2'-O-methyluridine-3'-phosphate
  modified_base 13: mod_base = OTHER; note = 2'-O-methylcytidine-3'-phosphate
  modified_base 14: mod_base = OTHER; note = 2'-O-methyluridine-3'-phosphate
  modified_base 15: mod_base = OTHER; note = 2'-O-methyladenosine-3'-phosphate
  modified_base 16: mod_base = OTHER; note = 2'-O-methyladenosine-3'-phosphate
  modified_base 17: mod_base = OTHER; note = 2'-O-methylguanosine-3'-phosphate
  modified_base 18: mod_base = OTHER; note = 2'-O-methyluridine-3'-phosphate
  modified_base 19: mod_base = OTHER; note = 2'-O-methylguanosine-3'-phosphate
  modified_base 20: mod_base = OTHER; note = 2'-O-methyluridine-3'-phosphate
  modified_base 21: mod_base = OTHER; note = 2'-O-methyluridine-3'-phosphate N-[tris(GalNAc-alkyl)-amidodecanoyl)]-4-hydroxyprolinol (Hyp-(GalNAc-alkyl)3)
tttctccttggtctaagtgtt

SEQ ID NO: 786 - RNA, 21 nt, synthetic construct
  source 1..21: mol_type = other RNA
  modified_base 1: mod_base = OTHER; note = 2'-O-methyluridine-3'-phosphorothioate
  modified_base 2: mod_base = OTHER; note = 2'-O-methyluridine-3'-phosphorothioate
  modified_base 3: mod_base = OTHER; note = 2'-O-methylcytidine-3'-phosphate
  modified_base 4: mod_base = OTHER; note = 2'-O-methyluridine-3'-phosphate
  modified_base 5: mod_base = OTHER; note = 2'-O-methylcytidine-3'-phosphate
  modified_base 6: mod_base = OTHER; note = 2'-O-methylcytidine-3'-phosphate
  modified_base 7: mod_base = OTHER; note = 2'-fluorouridine-3'-phosphate
  modified_base 8: mod_base = OTHER; note = 2'-O-methyluridine-3'-phosphate
  modified_base 9: mod_base = OTHER; note = 2'-fluoroguanosine-3'-phosphate
  modified_base 10: mod_base = OTHER; note = 2'-fluoroguanosine-3'-phosphate
  modified_base 11: mod_base = OTHER; note = 2'-fluorouridine-3'-phosphate
  modified_base 12: mod_base = OTHER; note = 2'-O-methylcytidine-3'-phosphate
  modified_base 13: mod_base = OTHER; note = 2'-O-methyluridine-3'-phosphate
  modified_base 14: mod_base = OTHER; note = 2'-O-methyladenosine-3'-phosphate
  modified_base 15: mod_base = OTHER; note = 2'-O-methyladenosine-3'-phosphate
  modified_base 16: mod_base = OTHER; note = 2'-O-methylguanosine-3'-phosphate
  modified_base 17: mod_base = OTHER; note = 2'-O-methyluridine-3'-phosphate
  modified_base 18: mod_base = OTHER; note = 2'-O-methylguanosine-3'-phosphate
  modified_base 19: mod_base = OTHER; note = 2'-O-methyluridine-3'-phosphate
  modified_base 20: mod_base = OTHER; note = 2'-O-methylguanosine-3'-phosphate
  modified_base 21: mod_base = OTHER; note = 2'-O-methyluridine-3'-phosphate N-[tris(GalNAc-alkyl)-amidodecanoyl)]-4-hydroxyprolinol (Hyp-(GalNAc-alkyl)3)
ttctccttggtctaagtgtgt

SEQ ID NO: 787 - RNA, 21 nt, synthetic construct
  source 1..21: mol_type = other RNA
  modified_base 1: mod_base = OTHER; note = 2'-O-methyluridine-3'-phosphorothioate
  modified_base 2: mod_base = OTHER; note = 2'-O-methylcytidine-3'-phosphorothioate
  modified_base 3: mod_base = OTHER; note = 2'-O-methyluridine-3'-phosphate
  modified_base 4: mod_base = OTHER; note = 2'-O-methylcytidine-3'-phosphate
  modified_base 5: mod_base = OTHER; note = 2'-O-methylcytidine-3'-phosphate
  modified_base 6: mod_base = OTHER; note = 2'-O-methyluridine-3'-phosphate
  modified_base 7: mod_base = OTHER; note = 2'-fluorouridine-3'-phosphate
  modified_base 8: mod_base = OTHER; note = 2'-O-methylguanosine-3'-phosphate
  modified_base 9: mod_base = OTHER; note = 2'-fluoroguanosine-3'-phosphate
  modified_base 10: mod_base = OTHER; note = 2'-fluorouridine-3'-phosphate
  modified_base 11: mod_base = OTHER; note = 2'-fluorocytidine-3'-phosphate
  modified_base 12: mod_base = OTHER; note = 2'-O-methyluridine-3'-phosphate
  modified_base 13: mod_base = OTHER; note = 2'-O-methyladenosine-3'-phosphate
  modified_base 14: mod_base = OTHER; note = 2'-O-methyladenosine-3'-phosphate
  modified_base 15: mod_base = OTHER; note = 2'-O-methylguanosine-3'-phosphate
  modified_base 16: mod_base = OTHER; note = 2'-O-methyluridine-3'-phosphate
  modified_base 17: mod_base = OTHER; note = 2'-O-methylguanosine-3'-phosphate
  modified_base 18: mod_base = OTHER; note = 2'-O-methyluridine-3'-phosphate
  modified_base 19: mod_base = OTHER; note = 2'-O-methylguanosine-3'-phosphate
  modified_base 20: mod_base = OTHER; note = 2'-O-methylcytidine-3'-phosphate
  modified_base 21: mod_base = OTHER; note = 2'-O-methyluridine-3'-phosphate N-[tris(GalNAc-alkyl)-amidodecanoyl)]-4-hydroxyprolinol (Hyp-(GalNAc-alkyl)3)
tctccttggtctaagtgtgct

SEQ ID NO: 788 - RNA, 21 nt, synthetic construct
  source 1..21: mol_type = other RNA
  modified_base 1: mod_base = OTHER; note = 2'-O-methyluridine-3'-phosphorothioate
  modified_base 2: mod_base = OTHER; note = 2'-O-methylcytidine-3'-phosphorothioate
  modified_base 3: mod_base = OTHER; note = 2'-O-methylcytidine-3'-phosphate
  modified_base 4: mod_base = OTHER; note = 2'-O-methyluridine-3'-phosphate
  modified_base 5: mod_base = OTHER; note = 2'-O-methyluridine-3'-phosphate
  modified_base 6: mod_base = OTHER; note = 2'-O-methylguanosine-3'-phosphate
  modified_base 7: mod_base = OTHER; note = 2'-fluoroguanosine-3'-phosphate
  modified_base 8: mod_base = OTHER; note = 2'-O-methyluridine-3'-phosphate
  modified_base 9: mod_base = OTHER; note = 2'-fluorocytidine-3'-phosphate
  modified_base 10: mod_base = OTHER; note = 2'-fluorouridine-3'-phosphate
  modified_base 11: mod_base = OTHER; note = 2'-fluoroadenosine-3'-phosphate
  modified_base 12: mod_base = OTHER; note = 2'-O-methyladenosine-3'-phosphate
  modified_base 13: mod_base = OTHER; note = 2'-O-methylguanosine-3'-phosphate
  modified_base 14: mod_base = OTHER; note = 2'-O-methyluridine-3'-phosphate
  modified_base 15: mod_base = OTHER; note = 2'-O-methylguanosine-3'-phosphate
  modified_base 16: mod_base = OTHER; note = 2'-O-methyluridine-3'-phosphate
  modified_base 17: mod_base = OTHER; note = 2'-O-methylguanosine-3'-phosphate
  modified_base 18: mod_base = OTHER; note = 2'-O-methylcytidine-3'-phosphate
  modified_base 19: mod_base = OTHER; note = 2'-O-methyluridine-3'-phosphate
  modified_base 20: mod_base = OTHER; note = 2'-O-methylguanosine-3'-phosphate
  modified_base 21: mod_base = OTHER; note = 2'-O-methyluridine-3'-phosphate N-[tris(GalNAc-alkyl)-amidodecanoyl)]-4-hydroxyprolinol (Hyp-(GalNAc-alkyl)3)
tccttggtctaagtgtgctgt

SEQ ID NO: 789 - RNA, 21 nt, synthetic construct
  source 1..21: mol_type = other RNA
  modified_base 1: mod_base = OTHER; note = 2'-O-methyluridine-3'-phosphorothioate
  modified_base 2: mod_base = OTHER; note = 2'-O-methylcytidine-3'-phosphorothioate
  modified_base 3: mod_base = OTHER; note = 2'-O-methyluridine-3'-phosphate
  modified_base 4: mod_base = OTHER; note = 2'-O-methyladenosine-3'-phosphate
  modified_base 5: mod_base = OTHER; note = 2'-O-methyladenosine-3'-phosphate
  modified_base 6: mod_base = OTHER; note = 2'-O-methylguanosine-3'-phosphate
  modified_base 7: mod_base = OTHER; note = 2'-fluorouridine-3'-phosphate
  modified_base 8: mod_base = OTHER; note = 2'-O-methylguanosine-3'-phosphate
  modified_base 9: mod_base = OTHER; note = 2'-fluorouridine-3'-phosphate
  modified_base 10: mod_base = OTHER; note = 2'-fluoroguanosine-3'-phosphate
  modified_base 11: mod_base = OTHER; note = 2'-fluorocytidine-3'-phosphate
  modified_base 12: mod_base = OTHER; note = 2'-O-methyluridine-3'-phosphate
  modified_base 13: mod_base = OTHER; note = 2'-O-methylguanosine-3'-phosphate
  modified_base 14: mod_base = OTHER; note = 2'-O-methylcytidine-3'-phosphate
  modified_base 15: mod_base = OTHER; note = 2'-O-methyladenosine-3'-phosphate
  modified_base 16: mod_base = OTHER; note = 2'-O-methyluridine-3'-phosphate
  modified_base 17: mod_base = OTHER; note = 2'-O-methylguanosine-3'-phosphate
  modified_base 18: mod_base = OTHER; note = 2'-O-methylguanosine-3'-phosphate
  modified_base 19: mod_base = OTHER; note = 2'-O-methyladenosine-3'-phosphate
  modified_base 20: mod_base = OTHER; note = 2'-O-methylguanosine-3'-phosphate
  modified_base 21: mod_base = OTHER; note = 2'-O-methyluridine-3'-phosphate N-[tris(GalNAc-alkyl)-amidodecanoyl)]-4-hydroxyprolinol (Hyp-(GalNAc-alkyl)3)
tctaagtgtgctgcatggagt

SEQ ID NO: 790 - RNA, 21 nt, synthetic construct
  source 1..21: mol_type = other RNA
  modified_base 1: mod_base = OTHER; note = 2'-O-methyladenosine-3'-phosphorothioate
  modified_base 2: mod_base = OTHER; note = 2'-O-methylguanosine-3'-phosphorothioate
  modified_base 3: mod_base = OTHER; note = 2'-O-methyluridine-3'-phosphate
  modified_base 4: mod_base = OTHER; note = 2'-O-methylguanosine-3'-phosphate
  modified_base 5: mod_base = OTHER; note = 2'-O-methyluridine-3'-phosphate
  modified_base 6: mod_base = OTHER; note = 2'-O-methylguanosine-3'-phosphate
  modified_base 7: mod_base = OTHER; note = 2'-fluorocytidine-3'-phosphate
  modified_base 8: mod_base = OTHER; note = 2'-O-methyluridine-3'-phosphate
  modified_base 9: mod_base = OTHER; note = 2'-fluoroguanosine-3'-phosphate
  modified_base 10: mod_base = OTHER; note = 2'-fluorocytidine-3'-phosphate
  modified_base 11: mod_base = OTHER; note = 2'-fluoroadenosine-3'-phosphate
  modified_base 12: mod_base = OTHER; note = 2'-O-methyluridine-3'-phosphate
  modified_base 13: mod_base = OTHER; note = 2'-O-methylguanosine-3'-phosphate
  modified_base 14: mod_base = OTHER; note = 2'-O-methylguanosine-3'-phosphate
  modified_base 15: mod_base = OTHER; note = 2'-O-methyladenosine-3'-phosphate
  modified_base 16: mod_base = OTHER; note = 2'-O-methylguanosine-3'-phosphate
  modified_base 17: mod_base = OTHER; note = 2'-O-methyluridine-3'-phosphate
  modified_base 18: mod_base = OTHER; note = 2'-O-methylguanosine-3'-phosphate
  modified_base 19: mod_base = OTHER; note = 2'-O-methyladenosine-3'-phosphate
  modified_base 20: mod_base = OTHER; note = 2'-O-methylguanosine-3'-phosphate
  modified_base 21: mod_base = OTHER; note = 2'-O-methyluridine-3'-phosphate N-[tris(GalNAc-alkyl)-amidodecanoyl)]-4-hydroxyprolinol (Hyp-(GalNAc-alkyl)3)
agtgtgctgcatggagtgagt

SEQ ID NO: 791 - RNA, 21 nt, synthetic construct
  source 1..21: mol_type = other RNA
  modified_base 1: mod_base = OTHER; note = 2'-O-methylcytidine-3'-phosphorothioate
  modified_base 2: mod_base = OTHER; note = 2'-O-methyladenosine-3'-phosphorothioate
  modified_base 3: mod_base = OTHER; note = 2'-O-methyluridine-3'-phosphate
  modified_base 4: mod_base = OTHER; note = 2'-O-methylguanosine-3'-phosphate
  modified_base 5: mod_base = OTHER; note = 2'-O-methylguanosine-3'-phosphate
  modified_base 6: mod_base = OTHER; note = 2'-O-methyladenosine-3'-phosphate
  modified_base 7: mod_base = OTHER; note = 2'-fluoroguanosine-3'-phosphate
  modified_base 8: mod_base = OTHER; note = 2'-O-methyluridine-3'-phosphate
  modified_base 9: mod_base = OTHER; note = 2'-fluoroguanosine-3'-phosphate
  modified_base 10: mod_base = OTHER; note = 2'-fluoroadenosine-3'-phosphate
  modified_base 11: mod_base = OTHER; note = 2'-fluoroguanosine-3'-phosphate
  modified_base 12: mod_base = OTHER; note = 2'-O-methylcytidine-3'-phosphate
  modified_base 13: mod_base = OTHER; note = 2'-O-methyladenosine-3'-phosphate
  modified_base 14: mod_base = OTHER; note = 2'-O-methylguanosine-3'-phosphate
  modified_base 15: mod_base = OTHER; note = 2'-O-methyluridine-3'-phosphate
  modified_base 16: mod_base = OTHER; note = 2'-O-methyladenosine-3'-phosphate
  modified_base 17: mod_base = OTHER; note = 2'-O-methylguanosine-3'-phosphate
  modified_base 18: mod_base = OTHER; note = 2'-O-methyladenosine-3'-phosphate
  modified_base 19: mod_base = OTHER; note = 2'-O-methyladenosine-3'-phosphate
  modified_base 20: mod_base = OTHER; note = 2'-O-methylguanosine-3'-phosphate
  modified_base 21: mod_base = OTHER; note = 2'-O-methyluridine-3'-phosphate N-[tris(GalNAc-alkyl)-amidodecanoyl)]-4-hydroxyprolinol (Hyp-(GalNAc-alkyl)3)
catggagtgagcagtagaagt

SEQ ID NO: 792 - RNA, 21 nt, synthetic construct
  source 1..21: mol_type = other RNA
  modified_base 1: mod_base = OTHER; note = 2'-O-methylguanosine-3'-phosphorothioate
  modified_base 2: mod_base = OTHER; note = 2'-O-methyladenosine-3'-phosphorothioate
  modified_base 3: mod_base = OTHER; note = 2'-O-methylguanosine-3'-phosphate
  modified_base 4: mod_base = OTHER; note = 2'-O-methyluridine-3'-phosphate
  modified_base 5: mod_base = OTHER; note = 2'-O-methylguanosine-3'-phosphate
  modified_base 6: mod_base = OTHER; note = 2'-O-methyladenosine-3'-phosphate
  modified_base 7: mod_base = OTHER; note = 2'-fluoroguanosine-3'-phosphate
  modified_base 8: mod_base = OTHER; note = 2'-O-methylcytidine-3'-phosphate
  modified_base 9: mod_base = OTHER; note = 2'-fluoroadenosine-3'-phosphate
  modified_base 10: mod_base = OTHER; note = 2'-fluoroguanosine-3'-phosphate
  modified_base 11: mod_base = OTHER; note = 2'-fluorouridine-3'-phosphate
  modified_base 12: mod_base = OTHER; note = 2'-O-methyladenosine-3'-phosphate
  modified_base 13: mod_base = OTHER; note = 2'-O-methylguanosine-3'-phosphate
  modified_base 14: mod_base = OTHER; note = 2'-O-methyladenosine-3'-phosphate
  modified_base 15: mod_base = OTHER; note = 2'-O-methyladenosine-3'-phosphate
  modified_base 16: mod_base = OTHER; note = 2'-O-methylguanosine-3'-phosphate
  modified_base 17: mod_base = OTHER; note = 2'-O-methylcytidine-3'-phosphate
  modified_base 18: mod_base = OTHER; note = 2'-O-methylcytidine-3'-phosphate
  modified_base 19: mod_base = OTHER; note = 2'-O-methyluridine-3'-phosphate
  modified_base 20: mod_base = OTHER; note = 2'-O-methylguanosine-3'-phosphate
  modified_base 21: mod_base = OTHER; note = 2'-O-methyluridine-3'-phosphate N-[tris(GalNAc-alkyl)-amidodecanoyl)]-4-hydroxyprolinol (Hyp-(GalNAc-alkyl)3)
gagtgagcagtagaagcctgt

SEQ ID NO: 793 - RNA, 21 nt, synthetic construct
  source 1..21: mol_type = other RNA
  modified_base 1: mod_base = OTHER; note = 2'-O-methylcytidine-3'-phosphorothioate
  modified_base 2: mod_base = OTHER; note = 2'-O-methyladenosine-3'-phosphorothioate
  modified_base 3: mod_base = OTHER; note = 2'-O-methyladenosine-3'-phosphate
  modified_base 4: mod_base = OTHER; note = 2'-O-methyladenosine-3'-phosphate
  modified_base 5: mod_base = OTHER; note = 2'-O-methyluridine-3'-phosphate
  modified_base 6: mod_base = OTHER; note = 2'-O-methylguanosine-3'-phosphate
  modified_base 7: mod_base = OTHER; note = 2'-fluorocytidine-3'-phosphate
  modified_base 8: mod_base = OTHER; note = 2'-O-methyladenosine-3'-phosphate
  modified_base 9: mod_base = OTHER; note = 2'-fluorocytidine-3'-phosphate
  modified_base 10: mod_base = OTHER; note = 2'-fluorocytidine-3'-phosphate
  modified_base 11: mod_base = OTHER; note = 2'-fluorouridine-3'-phosphate
  modified_base 12: mod_base = OTHER; note = 2'-O-methylcytidine-3'-phosphate
  modified_base 13: mod_base = OTHER; note = 2'-O-methylcytidine-3'-phosphate
  modified_base 14: mod_base = OTHER; note = 2'-O-methylcytidine-3'-phosphate
  modified_base 15: mod_base = OTHER; note = 2'-O-methyladenosine-3'-phosphate
  modified_base 16: mod_base = OTHER; note = 2'-O-methylguanosine-3'-phosphate
  modified_base 17: mod_base = OTHER; note = 2'-O-methyluridine-3'-phosphate
  modified_base 18: mod_base = OTHER; note = 2'-O-methyluridine-3'-phosphate
  modified_base 19: mod_base = OTHER; note = 2'-O-methyluridine-3'-phosphate
  modified_base 20: mod_base = OTHER; note = 2'-O-methylguanosine-3'-phosphate
  modified_base 21: mod_base = OTHER; note = 2'-O-methyluridine-3'-phosphate N-[tris(GalNAc-alkyl)-amidodecanoyl)]-4-hydroxyprolinol (Hyp-(GalNAc-alkyl)3)
caaatgcacctcccagtttgt

SEQ ID NO: 794 - RNA, 21 nt, synthetic construct
  source 1..21: mol_type = other RNA
  modified_base 1: mod_base = OTHER; note = 2'-O-methyladenosine-3'-phosphorothioate
  modified_base 2: mod_base = OTHER; note = 2'-O-methyladenosine-3'-phosphorothioate
  modified_base 3: mod_base = OTHER; note = 2'-O-methyladenosine-3'-phosphate
  modified_base 4: mod_base = OTHER; note = 2'-O-methyluridine-3'-phosphate
  modified_base 5: mod_base = OTHER; note = 2'-O-methylguanosine-3'-phosphate
  modified_base 6: mod_base = OTHER; note = 2'-O-methylcytidine-3'-phosphate
  modified_base 7: mod_base = OTHER; note = 2'-fluoroadenosine-3'-phosphate
  modified_base 8: mod_base = OTHER; note = 2'-O-methylcytidine-3'-phosphate
  modified_base 9: mod_base = OTHER; note = 2'-fluorocytidine-3'-phosphate
  modified_base 10: mod_base = OTHER; note = 2'-fluorouridine-3'-phosphate
  modified_base 11: mod_base = OTHER; note = 2'-fluorocytidine-3'-phosphate
  modified_base 12: mod_base = OTHER; note = 2'-O-methylcytidine-3'-phosphate
  modified_base 13: mod_base = OTHER; note = 2'-O-methylcytidine-3'-phosphate
  modified_base 14: mod_base = OTHER; note = 2'-O-methyladenosine-3'-phosphate
  modified_base 15: mod_base = OTHER; note = 2'-O-methylguanosine-3'-phosphate
  modified_base 16: mod_base = OTHER; note = 2'-O-methyluridine-3'-phosphate
  modified_base 17: mod_base = OTHER; note = 2'-O-methyluridine-3'-phosphate
  modified_base 18: mod_base = OTHER; note = 2'-O-methyluridine-3'-phosphate
  modified_base 19: mod_base = OTHER; note = 2'-O-methylguanosine-3'-phosphate
  modified_base 20: mod_base = OTHER; note = 2'-O-methylcytidine-3'-phosphate
  modified_base 21: mod_base = OTHER; note = 2'-O-methyluridine-3'-phosphate N-[tris(GalNAc-alkyl)-amidodecanoyl)]-4-hydroxyprolinol (Hyp-(GalNAc-alkyl)3)
aaatgcacctcccagtttgct

SEQ ID NO: 795 - RNA, 21 nt, synthetic construct
  source 1..21: mol_type = other RNA
  modified_base 1: mod_base = OTHER; note = 2'-O-methyladenosine-3'-phosphorothioate
  modified_base 2: mod_base = OTHER; note = 2'-O-methyladenosine-3'-phosphorothioate
  modified_base 3: mod_base = OTHER; note = 2'-O-methyluridine-3'-phosphate
  modified_base 4: mod_base = OTHER; note = 2'-O-methylguanosine-3'-phosphate
  modified_base 5: mod_base = OTHER; note = 2'-O-methylcytidine-3'-phosphate
  modified_base 6: mod_base = OTHER; note = 2'-O-methyladenosine-3'-phosphate
  modified_base 7: mod_base = OTHER; note = 2'-fluorocytidine-3'-phosphate
  modified_base 8: mod_base = OTHER; note = 2'-O-methylcytidine-3'-phosphate
  modified_base 9: mod_base = OTHER; note = 2'-fluorouridine-3'-phosphate
  modified_base 10: mod_base = OTHER; note = 2'-fluorocytidine-3'-phosphate
  modified_base 11: mod_base = OTHER; note = 2'-fluorocytidine-3'-phosphate
  modified_base 12: mod_base = OTHER; note = 2'-O-methylcytidine-3'-phosphate
  modified_base 13: mod_base = OTHER; note = 2'-O-methyladenosine-3'-phosphate
  modified_base 14: mod_base = OTHER; note = 2'-O-methylguanosine-3'-phosphate
  modified_base 15: mod_base = OTHER; note = 2'-O-methyluridine-3'-phosphate
  modified_base 16: mod_base = OTHER; note = 2'-O-methyluridine-3'-phosphate
  modified_base 17: mod_base = OTHER; note = 2'-O-methyluridine-3'-phosphate
  modified_base 18: mod_base = OTHER; note = 2'-O-methylguanosine-3'-phosphate
  modified_base 19: mod_base = OTHER; note = 2'-O-methylcytidine-3'-phosphate
  modified_base 20: mod_base = OTHER; note = 2'-O-methyluridine-3'-phosphate
  modified_base 21: mod_base = OTHER; note = 2'-O-methyluridine-3'-phosphate N-[tris(GalNAc-alkyl)-amidodecanoyl)]-4-hydroxyprolinol (Hyp-(GalNAc-alkyl)3)
aatgcacctcccagtttgctt

SEQ ID NO: 796 - RNA, 21 nt, synthetic construct
  source 1..21: mol_type = other RNA
  modified_base 1: mod_base = OTHER; note = 2'-O-methyladenosine-3'-phosphorothioate
  modified_base 2: mod_base = OTHER; note = 2'-O-methyluridine-3'-phosphorothioate
  modified_base 3: mod_base = OTHER; note = 2'-O-methylguanosine-3'-phosphate
  modified_base 4: mod_base = OTHER; note = 2'-O-methylcytidine-3'-phosphate
  modified_base 5: mod_base = OTHER; note = 2'-O-methyladenosine-3'-phosphate
  modified_base 6: mod_base = OTHER; note = 2'-O-methylcytidine-3'-phosphate
  modified_base 7: mod_base = OTHER; note = 2'-fluorocytidine-3'-phosphate
  modified_base 8: mod_base = OTHER; note = 2'-O-methyluridine-3'-phosphate
  modified_base 9: mod_base = OTHER; note = 2'-fluorocytidine-3'-phosphate
  modified_base 10: mod_base = OTHER; note = 2'-fluorocytidine-3'-phosphate
  modified_base 11: mod_base = OTHER; note = 2'-fluorocytidine-3'-phosphate
  modified_base 12: mod_base = OTHER; note = 2'-O-methyladenosine-3'-phosphate
  modified_base 13: mod_base = OTHER; note = 2'-O-methylguanosine-3'-phosphate
  modified_base 14: mod_base = OTHER; note = 2'-O-methyluridine-3'-phosphate
  modified_base 15: mod_base = OTHER; note = 2'-O-methyluridine-3'-phosphate
  modified_base 16: mod_base = OTHER; note = 2'-O-methyluridine-3'-phosphate
  modified_base 17: mod_base = OTHER; note = 2'-O-methylguanosine-3'-phosphate
  modified_base 18: mod_base = OTHER; note = 2'-O-methylcytidine-3'-phosphate
  modified_base 19: mod_base = OTHER; note = 2'-O-methyluridine-3'-phosphate
  modified_base 20: mod_base = OTHER; note = 2'-O-methylguanosine-3'-phosphate
  modified_base 21: mod_base = OTHER; note = 2'-O-methyluridine-3'-phosphate N-[tris(GalNAc-alkyl)-amidodecanoyl)]-4-hydroxyprolinol (Hyp-(GalNAc-alkyl)3)
atgcacctcccagtttgctgt

SEQ ID NO: 797 - RNA, 21 nt, synthetic construct
  source 1..21: mol_type = other RNA
  modified_base 1: mod_base = OTHER; note = 2'-O-methyluridine-3'-phosphorothioate
  modified_base 2: mod_base = OTHER; note = 2'-O-methylguanosine-3'-phosphorothioate
  modified_base 3: mod_base = OTHER; note = 2'-O-methylcytidine-3'-phosphate
  modified_base 4: mod_base = OTHER; note = 2'-O-methyladenosine-3'-phosphate
  modified_base 5: mod_base = OTHER; note = 2'-O-methylcytidine-3'-phosphate
  modified_base 6: mod_base = OTHER; note = 2'-O-methylcytidine-3'-phosphate
  modified_base 7: mod_base = OTHER; note = 2'-fluorouridine-3'-phosphate
  modified_base 8: mod_base = OTHER; note = 2'-O-methylcytidine-3'-phosphate
  modified_base 9: mod_base = OTHER; note = 2'-fluorocytidine-3'-phosphate
  modified_base 10: mod_base = OTHER; note = 2'-fluorocytidine-3'-phosphate
  modified_base 11: mod_base = OTHER; note = 2'-fluoroadenosine-3'-phosphate
  modified_base 12: mod_base = OTHER; note = 2'-O-methylguanosine-3'-phosphate
  modified_base 13: mod_base = OTHER; note = 2'-O-methyluridine-3'-phosphate
  modified_base 14: mod_base = OTHER; note = 2'-O-methyluridine-3'-phosphate
  modified_base 15: mod_base = OTHER; note = 2'-O-methyluridine-3'-phosphate
  modified_base 16: mod_base = OTHER; note = 2'-O-methylguanosine-3'-phosphate
  modified_base 17: mod_base = OTHER; note = 2'-O-methylcytidine-3'-phosphate
  modified_base 18: mod_base = OTHER; note = 2'-O-methyluridine-3'-phosphate
  modified_base 19: mod_base = OTHER; note = 2'-O-methylguanosine-3'-phosphate
  modified_base 20: mod_base = OTHER; note = 2'-O-methylguanosine-3'-phosphate
  modified_base 21: mod_base = OTHER; note = 2'-O-methyluridine-3'-phosphate N-[tris(GalNAc-alkyl)-amidodecanoyl)]-4-hydroxyprolinol (Hyp-(GalNAc-alkyl)3)
tgcacctcccagtttgctggt

SEQ ID NO: 798 - RNA, 21 nt, synthetic construct
  source 1..21: mol_type = other RNA
  modified_base 1: mod_base = OTHER; note = 2'-O-methylcytidine-3'-phosphorothioate
  modified_base 2: mod_base = OTHER; note = 2'-O-methyluridine-3'-phosphorothioate
  modified_base 3: mod_base = OTHER; note = 2'-O-methylcytidine-3'-phosphate
  modified_base 4: mod_base = OTHER; note = 2'-O-methylcytidine-3'-phosphate
  modified_base 5: mod_base = OTHER; note = 2'-O-methylcytidine-3'-phosphate
  modified_base 6: mod_base = OTHER; note = 2'-O-methyladenosine-3'-phosphate
  modified_base 7: mod_base = OTHER; note = 2'-fluoroguanosine-3'-phosphate
  modified_base 8: mod_base = OTHER; note = 2'-O-methyluridine-3'-phosphate
  modified_base 9: mod_base = OTHER; note = 2'-fluorouridine-3'-phosphate
  modified_base 10: mod_base = OTHER; note = 2'-fluorouridine-3'-phosphate
  modified_base 11: mod_base = OTHER; note = 2'-fluoroguanosine-3'-phosphate
  modified_base 12: mod_base = OTHER; note = 2'-O-methylcytidine-3'-phosphate
  modified_base 13: mod_base = OTHER; note = 2'-O-methyluridine-3'-phosphate
  modified_base 14: mod_base = OTHER; note = 2'-O-methylguanosine-3'-phosphate
  modified_base 15: mod_base = OTHER; note = 2'-O-methylguanosine-3'-phosphate
  modified_base 16: mod_base = OTHER; note = 2'-O-methylguanosine-3'-phosphate
  modified_base 17: mod_base = OTHER; note = 2'-O-methyluridine-3'-phosphate
  modified_base 18: mod_base = OTHER; note = 2'-O-methyluridine-3'-phosphate
  modified_base 19: mod_base = OTHER; note = 2'-O-methyluridine-3'-phosphate
  modified_base 20: mod_base = OTHER; note = 2'-O-methyladenosine-3'-phosphate
  modified_base 21: mod_base = OTHER; note = 2'-O-methyluridine-3'-phosphate N-[tris(GalNAc-alkyl)-amidodecanoyl)]-4-hydroxyprolinol (Hyp-(GalNAc-alkyl)3)
ctcccagtttgctgggtttat

SEQ ID NO: 799 - RNA, 21 nt, synthetic construct
  source 1..21: mol_type = other RNA
  modified_base 1: mod_base = OTHER; note = 2'-O-methylcytidine-3'-phosphorothioate
  modified_base 2: mod_base = OTHER; note = 2'-O-methylcytidine-3'-phosphorothioate
  modified_base 3: mod_base = OTHER; note = 2'-O-methylcytidine-3'-phosphate
  modified_base 4: mod_base = OTHER; note = 2'-O-methyladenosine-3'-phosphate
  modified_base 5: mod_base = OTHER; note = 2'-O-methylguanosine-3'-phosphate
  modified_base 6: mod_base = OTHER; note = 2'-O-methyluridine-3'-phosphate
  modified_base 7: mod_base = OTHER; note = 2'-fluorouridine-3'-phosphate
  modified_base 8: mod_base = OTHER; note = 2'-O-methyluridine-3'-phosphate
  modified_base 9: mod_base = OTHER; note = 2'-fluoroguanosine-3'-phosphate
  modified_base 10: mod_base = OTHER; note = 2'-fluorocytidine-3'-phosphate
  modified_base 11: mod_base = OTHER; note = 2'-fluorouridine-3'-phosphate
  modified_base 12: mod_base = OTHER; note = 2'-O-methylguanosine-3'-phosphate
  modified_base 13: mod_base = OTHER; note = 2'-O-methylguanosine-3'-phosphate
  modified_base 14: mod_base = OTHER; note = 2'-O-methylguanosine-3'-phosphate
  modified_base 15: mod_base = OTHER; note = 2'-O-methyluridine-3'-phosphate
  modified_base 16: mod_base = OTHER; note = 2'-O-methyluridine-3'-phosphate
  modified_base 17: mod_base = OTHER; note = 2'-O-methyluridine-3'-phosphate
  modified_base 18: mod_base = OTHER; note = 2'-O-methyladenosine-3'-phosphate
  modified_base 19: mod_base = OTHER; note = 2'-O-methyluridine-3'-phosphate
  modified_base 20: mod_base = OTHER; note = 2'-O-methyluridine-3'-phosphate
  modified_base 21: mod_base = OTHER; note = 2'-O-methyluridine-3'-phosphate N-[tris(GalNAc-alkyl)-amidodecanoyl)]-4-hydroxyprolinol (Hyp-(GalNAc-alkyl)3)
cccagtttgctgggtttattt

SEQ ID NO: 800 - RNA, 21 nt, synthetic construct
  source 1..21: mol_type = other RNA
  modified_base 1: mod_base = OTHER; note = 2'-O-methylcytidine-3'-phosphorothioate
  modified_base 2: mod_base = OTHER; note = 2'-O-methylcytidine-3'-phosphorothioate
  modified_base 3: mod_base = OTHER; note = 2'-O-methyladenosine-3'-phosphate
  modified_base 4: mod_base = OTHER; note = 2'-O-methylguanosine-3'-phosphate
  modified_base 5: mod_base = OTHER; note = 2'-O-methyluridine-3'-phosphate
  modified_base 6: mod_base = OTHER; note = 2'-O-methyluridine-3'-phosphate
  modified_base 7: mod_base = OTHER; note = 2'-fluorouridine-3'-phosphate
  modified_base 8: mod_base = OTHER; note = 2'-O-methylguanosine-3'-phosphate
  modified_base 9: mod_base = OTHER; note = 2'-fluorocytidine-3'-phosphate
  modified_base 10: mod_base = OTHER; note = 2'-fluorouridine-3'-phosphate
  modified_base 11: mod_base = OTHER; note = 2'-fluoroguanosine-3'-phosphate
  modified_base 12: mod_base = OTHER; note = 2'-O-methylguanosine-3'-phosphate
  modified_base 13: mod_base = OTHER; note = 2'-O-methylguanosine-3'-phosphate
  modified_base 14: mod_base = OTHER; note = 2'-O-methyluridine-3'-phosphate
  modified_base 15: mod_base = OTHER; note = 2'-O-methyluridine-3'-phosphate
  modified_base 16: mod_base = OTHER; note = 2'-O-methyluridine-3'-phosphate
  modified_base 17: mod_base = OTHER; note = 2'-O-methyladenosine-3'-phosphate
  modified_base 18: mod_base = OTHER; note = 2'-O-methyluridine-3'-phosphate
  modified_base 19: mod_base = OTHER; note = 2'-O-methyluridine-3'-phosphate
  modified_base 20: mod_base = OTHER; note = 2'-O-methyluridine-3'-phosphate
  modified_base 21: mod_base = OTHER; note = 2'-O-methyluridine-3'-phosphate N-[tris(GalNAc-alkyl)-amidodecanoyl)]-4-hydroxyprolinol (Hyp-(GalNAc-alkyl)3)
ccagtttgctgggtttatttt

SEQ ID NO: 801 - RNA, 21 nt, synthetic construct
  source 1..21: mol_type = other RNA
  modified_base 1: mod_base = OTHER; note = 2'-O-methylcytidine-3'-phosphorothioate
  modified_base 2: mod_base = OTHER; note = 2'-O-methyladenosine-3'-phosphorothioate
  modified_base 3: mod_base = OTHER; note = 2'-O-methylguanosine-3'-phosphate
  modified_base 4: mod_base = OTHER; note = 2'-O-methyluridine-3'-phosphate
  modified_base 5: mod_base = OTHER; note = 2'-O-methyluridine-3'-phosphate
  modified_base 6: mod_base = OTHER; note = 2'-O-methyluridine-3'-phosphate
  modified_base 7: mod_base = OTHER; note = 2'-fluoroguanosine-3'-phosphate
  modified_base 8: mod_base = OTHER; note = 2'-O-methylcytidine-3'-phosphate
  modified_base 9: mod_base = OTHER; note = 2'-fluorouridine-3'-phosphate
  modified_base 10: mod_base = OTHER; note = 2'-fluoroguanosine-3'-phosphate
  modified_base 11: mod_base = OTHER; note = 2'-fluoroguanosine-3'-phosphate
  modified_base 12: mod_base = OTHER; note = 2'-O-methylguanosine-3'-phosphate
  modified_base 13: mod_base = OTHER; note = 2'-O-methyluridine-3'-phosphate
  modified_base 14: mod_base = OTHER; note = 2'-O-methyluridine-3'-phosphate
  modified_base 15: mod_base = OTHER; note = 2'-O-methyluridine-3'-phosphate
  modified_base 16: mod_base = OTHER; note = 2'-O-methyladenosine-3'-phosphate
  modified_base 17: mod_base = OTHER; note = 2'-O-methyluridine-3'-phosphate
  modified_base 18: mod_base = OTHER; note = 2'-O-methyluridine-3'-phosphate
  modified_base 19: mod_base = OTHER; note = 2'-O-methyluridine-3'-phosphate
  modified_base 20: mod_base = OTHER; note = 2'-O-methyluridine-3'-phosphate
  modified_base 21: mod_base = OTHER; note = 2'-O-methyluridine-3'-phosphate N-[tris(GalNAc-alkyl)-amidodecanoyl)]-4-hydroxyprolinol (Hyp-(GalNAc-alkyl)3)
cagtttgctgggtttattttt

SEQ ID NO: 802 - RNA, 21 nt, synthetic construct
  source 1..21: mol_type = other RNA
  modified_base 1: mod_base = OTHER; note = 2'-O-methyladenosine-3'-phosphorothioate
  modified_base 2: mod_base = OTHER; note = 2'-O-methylguanosine-3'-phosphorothioate
  modified_base 3: mod_base = OTHER; note = 2'-O-methyluridine-3'-phosphate
  modified_base 4: mod_base = OTHER; note = 2'-O-methyluridine-3'-phosphate
  modified_base 5: mod_base = OTHER; note = 2'-O-methyluridine-3'-phosphate
  modified_base 6: mod_base = OTHER; note = 2'-O-methylguanosine-3'-phosphate
  modified_base 7: mod_base = OTHER; note = 2'-fluorocytidine-3'-phosphate
  modified_base 8: mod_base = OTHER; note = 2'-O-methyluridine-3'-phosphate
  modified_base 9: mod_base = OTHER; note = 2'-fluoroguanosine-3'-phosphate
  modified_base 10: mod_base = OTHER; note = 2'-fluoroguanosine-3'-phosphate
  modified_base 11: mod_base = OTHER; note = 2'-fluoroguanosine-3'-phosphate
  modified_base 12: mod_base = OTHER; note = 2'-O-methyluridine-3'-phosphate
  modified_base 13: mod_base = OTHER; note = 2'-O-methyluridine-3'-phosphate
  modified_base 14: mod_base = OTHER; note = 2'-O-methyluridine-3'-phosphate
  modified_base 15: mod_base = OTHER; note = 2'-O-methyladenosine-3'-phosphate
  modified_base 16: mod_base = OTHER; note = 2'-O-methyluridine-3'-phosphate
  modified_base 17: mod_base = OTHER; note = 2'-O-methyluridine-3'-phosphate
  modified_base 18: mod_base = OTHER; note = 2'-O-methyluridine-3'-phosphate
  modified_base 19: mod_base = OTHER; note = 2'-O-methyluridine-3'-phosphate
  modified_base 20: mod_base = OTHER; note = 2'-O-methyladenosine-3'-phosphate
  modified_base 21: mod_base = OTHER; note = 2'-O-methyluridine-3'-phosphate N-[tris(GalNAc-alkyl)-amidodecanoyl)]-4-hydroxyprolinol (Hyp-(GalNAc-alkyl)3)
agtttgctgggtttattttat

SEQ ID NO: 803 - RNA, 21 nt, synthetic construct
  source 1..21: mol_type = other RNA
  modified_base 1: mod_base = OTHER; note = 2'-O-methylguanosine-3'-phosphorothioate
  modified_base 2: mod_base = OTHER; note = 2'-O-methyluridine-3'-phosphorothioate
  modified_base 3: mod_base = OTHER; note = 2'-O-methyluridine-3'-phosphate
  modified_base 4: mod_base = OTHER; note = 2'-O-methyluridine-3'-phosphate
  modified_base 5: mod_base = OTHER; note = 2'-O-methylguanosine-3'-phosphate
  modified_base 6: mod_base = OTHER; note = 2'-O-methylcytidine-3'-phosphate
  modified_base 7: mod_base = OTHER; note = 2'-fluorouridine-3'-phosphate
  modified_base 8: mod_base = OTHER; note = 2'-O-methylguanosine-3'-phosphate
  modified_base 9: mod_base = OTHER; note = 2'-fluoroguanosine-3'-phosphate
  modified_base 10: mod_base = OTHER; note = 2'-fluoroguanosine-3'-phosphate
  modified_base 11: mod_base = OTHER; note = 2'-fluorouridine-3'-phosphate
  modified_base 12: mod_base = OTHER; note = 2'-O-methyluridine-3'-phosphate
  modified_base 13: mod_base = OTHER; note = 2'-O-methyluridine-3'-phosphate
  modified_base 14: mod_base = OTHER; note = 2'-O-methyladenosine-3'-phosphate
  modified_base 15: mod_base = OTHER; note = 2'-O-methyluridine-3'-phosphate
  modified_base 16: mod_base = OTHER; note = 2'-O-methyluridine-3'-phosphate
  modified_base 17: mod_base = OTHER; note = 2'-O-methyluridine-3'-phosphate
  modified_base 18: mod_base = OTHER; note = 2'-O-methyluridine-3'-phosphate
  modified_base 19: mod_base = OTHER; note = 2'-O-methyladenosine-3'-phosphate
  modified_base 20: mod_base = OTHER; note = 2'-O-methylguanosine-3'-phosphate
  modified_base 21: mod_base = OTHER; note = 2'-O-methyluridine-3'-phosphate N-[tris(GalNAc-alkyl)-amidodecanoyl)]-4-hydroxyprolinol (Hyp-(GalNAc-alkyl)3)
gtttgctgggtttattttagt

SEQ ID NO: 804 - RNA, 21 nt, synthetic construct
  source 1..21: mol_type = other RNA
  modified_base 1: mod_base = OTHER; note = 2'-O-methyluridine-3'-phosphorothioate
  modified_base 2: mod_base = OTHER; note = 2'-O-methyluridine-3'-phosphorothioate
  modified_base 3: mod_base = OTHER; note = 2'-O-methyluridine-3'-phosphate
  modified_base 4: mod_base = OTHER; note = 2'-O-methylguanosine-3'-phosphate
  modified_base 5: mod_base = OTHER; note = 2'-O-methylcytidine-3'-phosphate
  modified_base 6: mod_base = OTHER; note = 2'-O-methyluridine-3'-phosphate
  modified_base 7: mod_base = OTHER; note = 2'-fluoroguanosine-3'-phosphate
  modified_base 8: mod_base = OTHER; note = 2'-O-methylguanosine-3'-phosphate
  modified_base 9: mod_base = OTHER; note = 2'-fluoroguanosine-3'-phosphate
  modified_base 10: mod_base = OTHER; note = 2'-fluorouridine-3'-phosphate
  modified_base 11: mod_base = OTHER; note = 2'-fluorouridine-3'-phosphate
  modified_base 12: mod_base = OTHER; note = 2'-O-methyluridine-3'-phosphate
  modified_base 13: mod_base = OTHER; note = 2'-O-methyladenosine-3'-phosphate
  modified_base 14: mod_base = OTHER; note = 2'-O-methyluridine-3'-phosphate
  modified_base 15: mod_base = OTHER; note = 2'-O-methyluridine-3'-phosphate
  modified_base 16: mod_base = OTHER; note = 2'-O-methyluridine-3'-phosphate
  modified_base 17: mod_base = OTHER; note = 2'-O-methyluridine-3'-phosphate
  modified_base 18: mod_base = OTHER; note = 2'-O-methyladenosine-3'-phosphate
  modified_base 19: mod_base = OTHER; note = 2'-O-methylguanosine-3'-phosphate
  modified_base 20: mod_base = OTHER; note = 2'-O-methyladenosine-3'-phosphate
  modified_base 21: mod_base = OTHER; note = 2'-O-methyluridine-3'-phosphate N-[tris(GalNAc-alkyl)-amidodecanoyl)]-4-hydroxyprolinol (Hyp-(GalNAc-alkyl)3)
tttgctgggtttattttagat

SEQ ID NO: 805 - RNA, 21 nt, synthetic construct
  source 1..21: mol_type = other RNA
  modified_base 1: mod_base = OTHER; note = 2'-O-methyluridine-3'-phosphorothioate
  modified_base 2: mod_base = OTHER; note = 2'-O-methyluridine-3'-phosphorothioate
  modified_base 3: mod_base = OTHER; note = 2'-O-methylguanosine-3'-phosphate
  modified_base 4: mod_base = OTHER; note = 2'-O-methylcytidine-3'-phosphate
  modified_base 5: mod_base = OTHER; note = 2'-O-methyluridine-3'-phosphate
  modified_base 6: mod_base = OTHER; note = 2'-O-methylguanosine-3'-phosphate
  modified_base 7: mod_base = OTHER; note = 2'-fluoroguanosine-3'-phosphate
  modified_base 8: mod_base = OTHER; note = 2'-O-methylguanosine-3'-phosphate
  modified_base 9: mod_base = OTHER; note = 2'-fluorouridine-3'-phosphate
  modified_base 10: mod_base = OTHER; note = 2'-fluorouridine-3'-phosphate
  modified_base 11: mod_base = OTHER; note = 2'-fluorouridine-3'-phosphate
  modified_base 12: mod_base = OTHER; note = 2'-O-methyladenosine-3'-phosphate
  modified_base 13: mod_base = OTHER; note = 2'-O-methyluridine-3'-phosphate
  modified_base 14: mod_base = OTHER; note = 2'-O-methyluridine-3'-phosphate
  modified_base 15: mod_base = OTHER; note = 2'-O-methyluridine-3'-phosphate
  modified_base 16: mod_base = OTHER; note = 2'-O-methyluridine-3'-phosphate
  modified_base 17: mod_base = OTHER; note = 2'-O-methyladenosine-3'-phosphate
  modified_base 18: mod_base = OTHER; note = 2'-O-methylguanosine-3'-phosphate
  modified_base 19: mod_base = OTHER; note = 2'-O-methyladenosine-3'-phosphate
  modified_base 20: mod_base = OTHER; note = 2'-O-methylguanosine-3'-phosphate
  modified_base 21: mod_base = OTHER; note = 2'-O-methyluridine-3'-phosphate N-[tris(GalNAc-alkyl)-amidodecanoyl)]-4-hydroxyprolinol (Hyp-(GalNAc-alkyl)3)
ttgctgggtttattttagagt

SEQ ID NO: 806 - RNA, 21 nt, synthetic construct
  source 1..21: mol_type = other RNA
  modified_base 1: mod_base = OTHER; note = 2'-O-methyluridine-3'-phosphorothioate
  modified_base 2: mod_base = OTHER; note = 2'-O-methylguanosine-3'-phosphorothioate
  modified_base 3: mod_base = OTHER; note = 2'-O-methylcytidine-3'-phosphate
  modified_base 4: mod_base = OTHER; note = 2'-O-methyluridine-3'-phosphate
  modified_base 5: mod_base = OTHER; note = 2'-O-methylguanosine-3'-phosphate
  modified_base 6: mod_base = OTHER; note = 2'-O-methylguanosine-3'-phosphate
  modified_base 7: mod_base = OTHER; note = 2'-fluoroguanosine-3'-phosphate
  modified_base 8: mod_base = OTHER; note = 2'-O-methyluridine-3'-phosphate
  modified_base 9: mod_base = OTHER; note = 2'-fluorouridine-3'-phosphate
  modified_base 10: mod_base = OTHER; note = 2'-fluorouridine-3'-phosphate
  modified_base 11: mod_base = OTHER; note = 2'-fluoroadenosine-3'-phosphate
  modified_base 12: mod_base = OTHER; note = 2'-O-methyluridine-3'-phosphate
  modified_base 13: mod_base = OTHER; note = 2'-O-methyluridine-3'-phosphate
  modified_base 14: mod_base = OTHER; note = 2'-O-methyluridine-3'-phosphate
  modified_base 15: mod_base = OTHER; note = 2'-O-methyluridine-3'-phosphate
  modified_base 16: mod_base = OTHER; note = 2'-O-methyladenosine-3'-phosphate
  modified_base 17: mod_base = OTHER; note = 2'-O-methylguanosine-3'-phosphate
  modified_base 18: mod_base = OTHER; note = 2'-O-methyladenosine-3'-phosphate
  modified_base 19: mod_base = OTHER; note = 2'-O-methylguanosine-3'-phosphate
  modified_base 20: mod_base = OTHER; note = 2'-O-methyladenosine-3'-phosphate
  modified_base 21: mod_base = OTHER; note = 2'-O-methyluridine-3'-phosphate N-[tris(GalNAc-alkyl)-amidodecanoyl)]-4-hydroxyprolinol (Hyp-(GalNAc-alkyl)3)
tgctgggtttattttagagat

SEQ ID NO: 807 - RNA, 21 nt, synthetic construct
  source 1..21: mol_type = other RNA
  modified_base 1: mod_base = OTHER; note = 2'-O-methylguanosine-3'-phosphorothioate
  modified_base 2: mod_base = OTHER; note = 2'-O-methylguanosine-3'-phosphorothioate
  modified_base 3: mod_base = OTHER; note = 2'-O-methylguanosine-3'-phosphate
  modified_base 4: mod_base = OTHER; note = 2'-O-methyluridine-3'-phosphate
  modified_base 5: mod_base = OTHER; note = 2'-O-methyluridine-3'-phosphate
  modified_base 6: mod_base = OTHER; note = 2'-O-methyluridine-3'-phosphate
  modified_base 7: mod_base = OTHER; note = 2'-fluoroadenosine-3'-phosphate
  modified_base 8: mod_base = OTHER; note = 2'-O-methyluridine-3'-phosphate
  modified_base 9: mod_base = OTHER; note = 2'-fluorouridine-3'-phosphate
  modified_base 10: mod_base = OTHER; note = 2'-fluorouridine-3'-phosphate
  modified_base 11: mod_base = OTHER; note = 2'-fluorouridine-3'-phosphate
  modified_base 12: mod_base = OTHER; note = 2'-O-methyladenosine-3'-phosphate
  modified_base 13: mod_base = OTHER; note = 2'-O-methylguanosine-3'-phosphate
  modified_base 14: mod_base = OTHER; note = 2'-O-methyladenosine-3'-phosphate
  modified_base 15: mod_base = OTHER; note = 2'-O-methylguanosine-3'-phosphate
  modified_base 16: mod_base = OTHER; note = 2'-O-methyladenosine-3'-phosphate
  modified_base 17: mod_base = OTHER; note = 2'-O-methyladenosine-3'-phosphate
  modified_base 18: mod_base = OTHER; note = 2'-O-methyluridine-3'-phosphate
  modified_base 19: mod_base = OTHER; note = 2'-O-methylguanosine-3'-phosphate
  modified_base 20: mod_base = OTHER; note = 2'-O-methylguanosine-3'-phosphate
  modified_base 21: mod_base = OTHER; note = 2'-O-methyluridine-3'-phosphate N-[tris(GalNAc-alkyl)-amidodecanoyl)]-4-hydroxyprolinol (Hyp-(GalNAc-alkyl)3)
gggtttattttagagaatggt

SEQ ID NO: 808 - RNA, 21 nt, synthetic construct
  source 1..21: mol_type = other RNA
  modified_base 1: mod_base = OTHER; note = 2'-O-methylguanosine-3'-phosphorothioate
  modified_base 2: mod_base = OTHER; note = 2'-O-methylguanosine-3'-phosphorothioate
  modified_base 3: mod_base = OTHER; note = 2'-O-methylguanosine-3'-phosphate
  modified_base 4: mod_base = OTHER; note = 2'-O-methyladenosine-3'-phosphate
  modified_base 5: mod_base = OTHER; note = 2'-O-methylguanosine-3'-phosphate
  modified_base 6: mod_base = OTHER; note = 2'-O-methylguanosine-3'-phosphate
  modified_base 7: mod_base = OTHER; note = 2'-fluorocytidine-3'-phosphate
  modified_base 8: mod_base = OTHER; note = 2'-O-methyladenosine-3'-phosphate
  modified_base 9: mod_base = OTHER; note = 2'-fluoroadenosine-3'-phosphate
  modified_base 10: mod_base = OTHER; note = 2'-fluoroguanosine-3'-phosphate
  modified_base 11: mod_base = OTHER; note = 2'-fluoroadenosine-3'-phosphate
  modified_base 12: mod_base = OTHER; note = 2'-O-methyladenosine-3'-phosphate
  modified_base 13: mod_base = OTHER; note = 2'-O-methylcytidine-3'-phosphate
  modified_base 14: mod_base = OTHER; note = 2'-O-methylcytidine-3'-phosphate
  modified_base 15: mod_base = OTHER; note = 2'-O-methyladenosine-3'-phosphate
  modified_base 16: mod_base = OTHER; note = 2'-O-methylguanosine-3'-phosphate
  modified_base 17: mod_base = OTHER; note = 2'-O-methyluridine-3'-phosphate
  modified_base 18: mod_base = OTHER; note = 2'-O-methylguanosine-3'-phosphate
  modified_base 19: mod_base = OTHER; note = 2'-O-methyluridine-3'-phosphate
  modified_base 20: mod_base = OTHER; note = 2'-O-methyluridine-3'-phosphate
  modified_base 21: mod_base = OTHER; note = 2'-O-methyluridine-3'-phosphate N-[tris(GalNAc-alkyl)-amidodecanoyl)]-4-hydroxyprolinol (Hyp-(GalNAc-alkyl)3)
gggaggcaagaaccagtgttt

SEQ ID NO: 809 - RNA, 21 nt, synthetic construct
  source 1..21: mol_type = other RNA
  modified_base 1: mod_base = OTHER; note = 2'-O-methylguanosine-3'-phosphorothioate
  modified_base 2: mod_base = OTHER; note = 2'-O-methylguanosine-3'-phosphorothioate
  modified_base 3: mod_base = OTHER; note = 2'-O-methyladenosine-3'-phosphate
  modified_base 4: mod_base = OTHER; note = 2'-O-methylguanosine-3'-phosphate
  modified_base 5: mod_base = OTHER; note = 2'-O-methylguanosine-3'-phosphate
  modified_base 6: mod_base = OTHER; note = 2'-O-methylcytidine-3'-phosphate
  modified_base 7: mod_base = OTHER; note = 2'-fluoroadenosine-3'-phosphate
  modified_base 8: mod_base = OTHER; note = 2'-O-methyladenosine-3'-phosphate
  modified_base 9: mod_base = OTHER; note = 2'-fluoroguanosine-3'-phosphate
  modified_base 10: mod_base = OTHER; note = 2'-fluoroadenosine-3'-phosphate
  modified_base 11: mod_base = OTHER; note = 2'-fluoroadenosine-3'-phosphate
  modified_base 12: mod_base = OTHER; note = 2'-O-methylcytidine-3'-phosphate
  modified_base 13: mod_base = OTHER; note = 2'-O-methylcytidine-3'-phosphate
  modified_base 14: mod_base = OTHER; note = 2'-O-methyladenosine-3'-phosphate
  modified_base 15: mod_base = OTHER; note = 2'-O-methylguanosine-3'-phosphate
  modified_base 16: mod_base = OTHER; note = 2'-O-methyluridine-3'-phosphate
  modified_base 17: mod_base = OTHER; note = 2'-O-methylguanosine-3'-phosphate
  modified_base 18: mod_base = OTHER; note = 2'-O-methyluridine-3'-phosphate
  modified_base 19: mod_base = OTHER; note = 2'-O-methyluridine-3'-phosphate
  modified_base 20: mod_base = OTHER; note = 2'-O-methyluridine-3'-phosphate
  modified_base 21: mod_base = OTHER; note = 2'-O-methyluridine-3'-phosphate N-[tris(GalNAc-alkyl)-amidodecanoyl)]-4-hydroxyprolinol (Hyp-(GalNAc-alkyl)3)
ggaggcaagaaccagtgtttt

SEQ ID NO: 810 - RNA, 21 nt, synthetic construct
  source 1..21: mol_type = other RNA
  modified_base 1: mod_base = OTHER; note = 2'-O-methyladenosine-3'-phosphorothioate
  modified_base 2: mod_base = OTHER; note = 2'-O-methylguanosine-3'-phosphorothioate
  modified_base 3: mod_base = OTHER; note = 2'-O-methylguanosine-3'-phosphate
  modified_base 4: mod_base = OTHER; note = 2'-O-methylcytidine-3'-phosphate
  modified_base 5: mod_base = OTHER; note = 2'-O-methyladenosine-3'-phosphate
  modified_base 6: mod_base = OTHER; note = 2'-O-methyladenosine-3'-phosphate
  modified_base 7: mod_base = OTHER; note = 2'-fluoroguanosine-3'-phosphate
  modified_base 8: mod_base = OTHER; note = 2'-O-methyladenosine-3'-phosphate
  modified_base 9: mod_base = OTHER; note = 2'-fluoroadenosine-3'-phosphate
  modified_base 10: mod_base = OTHER; note = 2'-fluorocytidine-3'-phosphate
  modified_base 11: mod_base = OTHER; note = 2'-fluorocytidine-3'-phosphate
  modified_base 12: mod_base = OTHER; note = 2'-O-methyladenosine-3'-phosphate
  modified_base 13: mod_base = OTHER; note = 2'-O-methylguanosine-3'-phosphate
  modified_base 14: mod_base = OTHER; note = 2'-O-methyluridine-3'-phosphate
  modified_base 15: mod_base = OTHER; note = 2'-O-methylguanosine-3'-phosphate
  modified_base 16: mod_base = OTHER; note = 2'-O-methyluridine-3'-phosphate
  modified_base 17: mod_base = OTHER; note = 2'-O-methyluridine-3'-phosphate
  modified_base 18: mod_base = OTHER; note = 2'-O-methyluridine-3'-phosphate
  modified_base 19: mod_base = OTHER; note = 2'-O-methyladenosine-3'-phosphate
  modified_base 20: mod_base = OTHER; note = 2'-O-methylguanosine-3'-phosphate
  modified_base 21: mod_base = OTHER; note = 2'-O-methyluridine-3'-phosphate N-[tris(GalNAc-alkyl)-amidodecanoyl)]-4-hydroxyprolinol (Hyp-(GalNAc-alkyl)3)
aggcaagaaccagtgtttagt

SEQ ID NO: 811 - RNA, 21 nt, synthetic construct
  source 1..21: mol_type = other RNA
  modified_base 1: mod_base = OTHER; note = 2'-O-methylguanosine-3'-phosphorothioate
  modified_base 2: mod_base = OTHER; note = 2'-O-methylguanosine-3'-phosphorothioate
  modified_base 3: mod_base = OTHER; note = 2'-O-methylcytidine-3'-phosphate
  modified_base 4: mod_base = OTHER; note = 2'-O-methyladenosine-3'-phosphate
  modified_base 5: mod_base = OTHER; note = 2'-O-methyladenosine-3'-phosphate
  modified_base 6: mod_base = OTHER; note = 2'-O-methylguanosine-3'-phosphate
  modified_base 7: mod_base = OTHER; note = 2'-fluoroadenosine-3'-phosphate
  modified_base 8: mod_base = OTHER; note = 2'-O-methyladenosine-3'-phosphate
  modified_base 9: mod_base = OTHER; note = 2'-fluorocytidine-3'-phosphate
  modified_base 10: mod_base = OTHER; note = 2'-fluorocytidine-3'-phosphate
  modified_base 11: mod_base = OTHER; note = 2'-fluoroadenosine-3'-phosphate
  modified_base 12: mod_base = OTHER; note = 2'-O-methylguanosine-3'-phosphate
  modified_base 13: mod_base = OTHER; note = 2'-O-methyluridine-3'-phosphate
  modified_base 14: mod_base = OTHER; note = 2'-O-methylguanosine-3'-phosphate
  modified_base 15: mod_base = OTHER; note = 2'-O-methyluridine-3'-phosphate
  modified_base 16: mod_base = OTHER; note = 2'-O-methyluridine-3'-phosphate
  modified_base 17: mod_base = OTHER; note = 2'-O-methyluridine-3'-phosphate
  modified_base 18: mod_base = OTHER; note = 2'-O-methyladenosine-3'-phosphate
  modified_base 19: mod_base = OTHER; note = 2'-O-methylguanosine-3'-phosphate
  modified_base 20: mod_base = OTHER; note = 2'-O-methylcytidine-3'-phosphate
  modified_base 21: mod_base = OTHER; note = 2'-O-methyluridine-3'-phosphate N-[tris(GalNAc-alkyl)-amidodecanoyl)]-4-hydroxyprolinol (Hyp-(GalNAc-alkyl)3)
ggcaagaaccagtgtttagct

SEQ ID NO: 812 - RNA, 21 nt, synthetic construct
  source 1..21: mol_type = other RNA
  modified_base 1: mod_base = OTHER; note = 2'-O-methyluridine-3'-phosphorothioate
  modified_base 2: mod_base = OTHER; note = 2'-O-methylguanosine-3'-phosphorothioate
  modified_base 3: mod_base = OTHER; note = 2'-O-methyluridine-3'-phosphate
  modified_base 4: mod_base = OTHER; note = 2'-O-methyluridine-3'-phosphate
  modified_base 5: mod_base = OTHER; note = 2'-O-methyluridine-3'-phosphate
  modified_base 6: mod_base = OTHER; note = 2'-O-methyladenosine-3'-phosphate
  modified_base 7: mod_base = OTHER; note = 2'-fluoroguanosine-3'-phosphate
  modified_base 8: mod_base = OTHER; note = 2'-O-methylcytidine-3'-phosphate
  modified_base 9: mod_base = OTHER; note = 2'-fluoroguanosine-3'-phosphate
  modified_base 10: mod_base = OTHER; note = 2'-fluorocytidine-3'-phosphate
  modified_base 11: mod_base = OTHER; note = 2'-fluoroguanosine-3'-phosphate
  modified_base 12: mod_base = OTHER; note = 2'-O-methylguanosine-3'-phosphate
  modified_base 13: mod_base = OTHER; note = 2'-O-methylguanosine-3'-phosphate
  modified_base 14: mod_base = OTHER; note = 2'-O-methyladenosine-3'-phosphate
  modified_base 15: mod_base = OTHER; note = 2'-O-methylcytidine-3'-phosphate
  modified_base 16: mod_base = OTHER; note = 2'-O-methyluridine-3'-phosphate
  modified_base 17: mod_base = OTHER; note = 2'-O-methyladenosine-3'-phosphate
  modified_base 18: mod_base = OTHER; note = 2'-O-methylcytidine-3'-phosphate
  modified_base 19: mod_base = OTHER; note = 2'-O-methyluridine-3'-phosphate
  modified_base 20: mod_base = OTHER; note = 2'-O-methylguanosine-3'-phosphate
  modified_base 21: mod_base = OTHER; note = 2'-O-methyluridine-3'-phosphate N-[tris(GalNAc-alkyl)-amidodecanoyl)]-4-hydroxyprolinol (Hyp-(GalNAc-alkyl)3)
tgtttagcgcgggactactgt

SEQ ID NO: 813 - RNA, 21 nt, synthetic construct
  source 1..21: mol_type = other RNA
  modified_base 1: mod_base = OTHER; note = 2'-O-methylguanosine-3'-phosphorothioate
  modified_base 2: mod_base = OTHER; note = 2'-O-methyladenosine-3'-phosphorothioate
  modified_base 3: mod_base = OTHER; note = 2'-O-methylcytidine-3'-phosphate
  modified_base 4: mod_base = OTHER; note = 2'-O-methyluridine-3'-phosphate
  modified_base 5: mod_base = OTHER; note = 2'-O-methyladenosine-3'-phosphate
  modified_base 6: mod_base = OTHER; note = 2'-O-methylcytidine-3'-phosphate
  modified_base 7: mod_base = OTHER; note = 2'-fluorouridine-3'-phosphate
  modified_base 8: mod_base = OTHER; note = 2'-O-methylguanosine-3'-phosphate
  modified_base 9: mod_base = OTHER; note = 2'-fluorouridine-3'-phosphate
  modified_base 10: mod_base = OTHER; note = 2'-fluorouridine-3'-phosphate
  modified_base 11: mod_base = OTHER; note = 2'-fluorocytidine-3'-phosphate
  modified_base 12: mod_base = OTHER; note = 2'-O-methylcytidine-3'-phosphate
  modified_base 13: mod_base = OTHER; note = 2'-O-methyladenosine-3'-phosphate
  modified_base 14: mod_base = OTHER; note = 2'-O-methyladenosine-3'-phosphate
  modified_base 15: mod_base = OTHER; note = 2'-O-methyladenosine-3'-phosphate
  modified_base 16: mod_base = OTHER; note = 2'-O-methyladenosine-3'-phosphate
  modified_base 17: mod_base = OTHER; note = 2'-O-methyladenosine-3'-phosphate
  modified_base 18: mod_base = OTHER; note = 2'-O-methylguanosine-3'-phosphate
  modified_base 19: mod_base = OTHER; note = 2'-O-methyladenosine-3'-phosphate
  modified_base 20: mod_base = OTHER; note = 2'-O-methyladenosine-3'-phosphate
  modified_base 21: mod_base = OTHER; note = 2'-O-methyluridine-3'-phosphate N-[tris(GalNAc-alkyl)-amidodecanoyl)]-4-hydroxyprolinol (Hyp-(GalNAc-alkyl)3)
gactactgttccaaaaagaat

SEQ ID NO: 814 - RNA, 21 nt, synthetic construct
  source 1..21: mol_type = other RNA
  modified_base 1: mod_base = OTHER; note = 2'-O-methyladenosine-3'-phosphorothioate
  modified_base 2: mod_base = OTHER; note = 2'-O-methylcytidine-3'-phosphorothioate
  modified_base 3: mod_base = OTHER; note = 2'-O-methyluridine-3'-phosphate
  modified_base 4: mod_base = OTHER; note = 2'-O-methylguanosine-3'-phosphate
  modified_base 5: mod_base = OTHER; note = 2'-O-methyluridine-3'-phosphate
  modified_base 6: mod_base = OTHER; note = 2'-O-methyluridine-3'-phosphate
  modified_base 7: mod_base = OTHER; note = 2'-fluorocytidine-3'-phosphate
  modified_base 8: mod_base = OTHER; note = 2'-O-methylcytidine-3'-phosphate
  modified_base 9: mod_base = OTHER; note = 2'-fluoroadenosine-3'-phosphate
  modified_base 10: mod_base = OTHER; note = 2'-fluoroadenosine-3'-phosphate
  modified_base 11: mod_base = OTHER; note = 2'-fluoroadenosine-3'-phosphate
  modified_base 12: mod_base = OTHER; note = 2'-O-methyladenosine-3'-phosphate
  modified_base 13: mod_base = OTHER; note = 2'-O-methyladenosine-3'-phosphate
  modified_base 14: mod_base = OTHER; note = 2'-O-methylguanosine-3'-phosphate
  modified_base 15: mod_base = OTHER; note = 2'-O-methyladenosine-3'-phosphate
  modified_base 16: mod_base = OTHER; note = 2'-O-methyladenosine-3'-phosphate
  modified_base 17: mod_base = OTHER; note = 2'-O-methyluridine-3'-phosphate
  modified_base 18: mod_base = OTHER; note = 2'-O-methyluridine-3'-phosphate
  modified_base 19: mod_base = OTHER; note = 2'-O-methylcytidine-3'-phosphate
  modified_base 20: mod_base = OTHER; note = 2'-O-methylcytidine-3'-phosphate
  modified_base 21: mod_base = OTHER; note = 2'-O-methyluridine-3'-phosphate N-[tris(GalNAc-alkyl)-amidodecanoyl)]-4-hydroxyprolinol (Hyp-(GalNAc-alkyl)3)
actgttccaaaaagaattcct

SEQ ID NO: 815 - RNA, 21 nt, synthetic construct
  source 1..21: mol_type = other RNA
  modified_base 1: mod_base = OTHER; note = 2'-O-methylcytidine-3'-phosphorothioate
  modified_base 2: mod_base = OTHER; note = 2'-O-methyluridine-3'-phosphorothioate
  modified_base 3: mod_base = OTHER; note = 2'-O-methylguanosine-3'-phosphate
  modified_base 4: mod_base = OTHER; note = 2'-O-methyluridine-3'-phosphate
  modified_base 5: mod_base = OTHER; note = 2'-O-methyluridine-3'-phosphate
  modified_base 6: mod_base = OTHER; note = 2'-O-methylcytidine-3'-phosphate
  modified_base 7: mod_base = OTHER; note = 2'-fluorocytidine-3'-phosphate
  modified_base 8: mod_base = OTHER; note = 2'-O-methyladenosine-3'-phosphate
  modified_base 9: mod_base = OTHER; note = 2'-fluoroadenosine-3'-phosphate
  modified_base 10: mod_base = OTHER; note = 2'-fluoroadenosine-3'-phosphate
  modified_base 11: mod_base = OTHER; note = 2'-fluoroadenosine-3'-phosphate
  modified_base 12: mod_base = OTHER; note = 2'-O-methyladenosine-3'-phosphate
  modified_base 13: mod_base = OTHER; note = 2'-O-methylguanosine-3'-phosphate
  modified_base 14: mod_base = OTHER; note = 2'-O-methyladenosine-3'-phosphate
  modified_base 15: mod_base = OTHER; note = 2'-O-methyladenosine-3'-phosphate
  modified_base 16: mod_base = OTHER; note = 2'-O-methyluridine-3'-phosphate
  modified_base 17: mod_base = OTHER; note = 2'-O-methyluridine-3'-phosphate
  modified_base 18: mod_base = OTHER; note = 2'-O-methylcytidine-3'-phosphate
  modified_base 19: mod_base = OTHER; note = 2'-O-methylcytidine-3'-phosphate
  modified_base 20: mod_base = OTHER; note = 2'-O-methyladenosine-3'-phosphate
  modified_base 21: mod_base = OTHER; note = 2'-O-methyluridine-3'-phosphate N-[tris(GalNAc-alkyl)-amidodecanoyl)]-4-hydroxyprolinol (Hyp-(GalNAc-alkyl)3)
ctgttccaaaaagaattccat

SEQ ID NO: 816 - RNA, 21 nt, synthetic construct
  source 1..21: mol_type = other RNA
  modified_base 1: mod_base = OTHER; note = 2'-O-methylcytidine-3'-phosphorothioate
  modified_base 2: mod_base = OTHER; note = 2'-O-methyladenosine-3'-phosphorothioate
  modified_base 3: mod_base = OTHER; note = 2'-O-methyladenosine-3'-phosphate
  modified_base 4: mod_base = OTHER; note = 2'-O-methyladenosine-3'-phosphate
  modified_base 5: mod_base = OTHER; note = 2'-O-methyladenosine-3'-phosphate
  modified_base 6: mod_base = OTHER; note = 2'-O-methyladenosine-3'-phosphate
  modified_base 7: mod_base = OTHER; note = 2'-fluoroguanosine-3'-phosphate
  modified_base 8: mod_base = OTHER; note = 2'-O-methyladenosine-3'-phosphate
  modified_base 9: mod_base = OTHER; note = 2'-fluoroadenosine-3'-phosphate
  modified_base 10: mod_base = OTHER; note = 2'-fluorouridine-3'-phosphate
  modified_base 11: mod_base = OTHER; note = 2'-fluorouridine-3'-phosphate
  modified_base 12: mod_base = OTHER; note = 2'-O-methylcytidine-3'-phosphate
  modified_base 13: mod_base = OTHER; note = 2'-O-methylcytidine-3'-phosphate
  modified_base 14: mod_base = OTHER; note = 2'-O-methyladenosine-3'-phosphate
  modified_base 15: mod_base = OTHER; note = 2'-O-methyladenosine-3'-phosphate
  modified_base 16: mod_base = OTHER; note = 2'-O-methylcytidine-3'-phosphate
  modified_base 17: mod_base = OTHER; note = 2'-O-methylcytidine-3'-phosphate
  modified_base 18: mod_base = OTHER; note = 2'-O-methylguanosine-3'-phosphate
  modified_base 19: mod_base = OTHER; note = 2'-O-methyladenosine-3'-phosphate
  modified_base 20: mod_base = OTHER; note = 2'-O-methylcytidine-3'-phosphate
  modified_base 21: mod_base = OTHER; note = 2'-O-methyluridine-3'-phosphate N-[tris(GalNAc-alkyl)-amidodecanoyl)]-4-hydroxyprolinol (Hyp-(GalNAc-alkyl)3)
caaaaagaattccaaccgact

SEQ ID NO: 817 - RNA, 21 nt, synthetic construct
  source 1..21: mol_type = other RNA
  modified_base 1: mod_base = OTHER; note = 2'-O-methyladenosine-3'-phosphorothioate
  modified_base 2: mod_base = OTHER; note = 2'-O-methylcytidine-3'-phosphorothioate
  modified_base 3: mod_base = OTHER; note = 2'-O-methylcytidine-3'-phosphate
  modified_base 4: mod_base = OTHER; note = 2'-O-methylguanosine-3'-phosphate
  modified_base 5: mod_base = OTHER; note = 2'-O-methyladenosine-3'-phosphate
  modified_base 6: mod_base = OTHER; note = 2'-O-methylcytidine-3'-phosphate
  modified_base 7: mod_base = OTHER; note = 2'-fluorocytidine-3'-phosphate
  modified_base 8: mod_base = OTHER; note = 2'-O-methyladenosine-3'-phosphate
  modified_base 9: mod_base = OTHER; note = 2'-fluoroguanosine-3'-phosphate
  modified_base 10: mod_base = OTHER; note = 2'-fluorocytidine-3'-phosphate
  modified_base 11: mod_base = OTHER; note = 2'-fluorouridine-3'-phosphate
  modified_base 12: mod_base = OTHER; note = 2'-O-methyluridine-3'-phosphate
  modified_base 13: mod_base = OTHER; note = 2'-O-methylguanosine-3'-phosphate
  modified_base 14: mod_base = OTHER; note = 2'-O-methyluridine-3'-phosphate
  modified_base 15: mod_base = OTHER; note = 2'-O-methyluridine-3'-phosphate
  modified_base 16: mod_base = OTHER; note = 2'-O-methyluridine-3'-phosphate
  modified_base 17: mod_base = OTHER; note = 2'-O-methylguanosine-3'-phosphate
  modified_base 18: mod_base = OTHER; note = 2'-O-methyluridine-3'-phosphate
  modified_base 19: mod_base = OTHER; note = 2'-O-methylguanosine-3'-phosphate
  modified_base 20: mod_base = OTHER; note = 2'-O-methyladenosine-3'-phosphate
  modified_base 21: mod_base = OTHER; note = 2'-O-methyluridine-3'-phosphate N-[tris(GalNAc-alkyl)-amidodecanoyl)]-4-hydroxyprolinol (Hyp-(GalNAc-alkyl)3)
accgaccagcttgtttgtgat

SEQ ID NO: 818 - RNA, 21 nt, synthetic construct
  source 1..21: mol_type = other RNA
  modified_base 1: mod_base = OTHER; note = 2'-O-methyladenosine-3'-phosphorothioate
  modified_base 2: mod_base = OTHER; note = 2'-O-methyladenosine-3'-phosphorothioate
  modified_base 3: mod_base = OTHER; note = 2'-O-methyladenosine-3'-phosphate
  modified_base 4: mod_base = OTHER; note = 2'-O-methylguanosine-3'-phosphate
  modified_base 5: mod_base = OTHER; note = 2'-O-methyluridine-3'-phosphate
  modified_base 6: mod_base = OTHER; note = 2'-O-methylguanosine-3'-phosphate
  modified_base 7: mod_base = OTHER; note = 2'-fluorouridine-3'-phosphate
  modified_base 8: mod_base = OTHER; note = 2'-O-methyluridine-3'-phosphate
  modified_base 9: mod_base = OTHER; note = 2'-fluorocytidine-3'-phosphate
  modified_base 10: mod_base = OTHER; note = 2'-fluorocytidine-3'-phosphate
  modified_base 11: mod_base = OTHER; note = 2'-fluorocytidine-3'-phosphate
  modified_base 12: mod_base = OTHER; note = 2'-O-methyluridine-3'-phosphate
  modified_base 13: mod_base = OTHER; note = 2'-O-methyluridine-3'-phosphate
  modified_base 14: mod_base = OTHER; note = 2'-O-methyluridine-3'-phosphate
  modified_base 15: mod_base = OTHER; note = 2'-O-methyluridine-3'-phosphate
  modified_base 16: mod_base = OTHER; note = 2'-O-methylcytidine-3'-phosphate
  modified_base 17: mod_base = OTHER; note = 2'-O-methyladenosine-3'-phosphate
  modified_base 18: mod_base = OTHER; note = 2'-O-methyladenosine-3'-phosphate
  modified_base 19: mod_base = OTHER; note = 2'-O-methylguanosine-3'-phosphate
  modified_base 20: mod_base = OTHER; note = 2'-O-methyluridine-3'-phosphate
  modified_base 21: mod_base = OTHER; note = 2'-O-methyluridine-3'-phosphate N-[tris(GalNAc-alkyl)-amidodecanoyl)]-4-hydroxyprolinol (Hyp-(GalNAc-alkyl)3)
aaagtgttcccttttcaagtt

SEQ ID NO: 819 - RNA, 21 nt, synthetic construct
  source 1..21: mol_type = other RNA
  modified_base 1: mod_base = OTHER; note = 2'-O-methyladenosine-3'-phosphorothioate
  modified_base 2: mod_base = OTHER; note = 2'-O-methylguanosine-3'-phosphorothioate
  modified_base 3: mod_base = OTHER; note = 2'-O-methyluridine-3'-phosphate
  modified_base 4: mod_base = OTHER; note = 2'-O-methylguanosine-3'-phosphate
  modified_base 5: mod_base = OTHER; note = 2'-O-methyluridine-3'-phosphate
  modified_base 6: mod_base = OTHER; note = 2'-O-methyluridine-3'-phosphate
  modified_base 7: mod_base = OTHER; note = 2'-fluorocytidine-3'-phosphate
  modified_base 8: mod_base = OTHER; note = 2'-O-methylcytidine-3'-phosphate
  modified_base 9: mod_base = OTHER; note = 2'-fluorocytidine-3'-phosphate
  modified_base 10: mod_base = OTHER; note = 2'-fluorouridine-3'-phosphate
  modified_base 11: mod_base = OTHER; note = 2'-fluorouridine-3'-phosphate
  modified_base 12: mod_base = OTHER; note = 2'-O-methyluridine-3'-phosphate
  modified_base 13: mod_base = OTHER; note = 2'-O-methyluridine-3'-phosphate
  modified_base 14: mod_base = OTHER; note = 2'-O-methylcytidine-3'-phosphate
  modified_base 15: mod_base = OTHER; note = 2'-O-methyladenosine-3'-phosphate
  modified_base 16: mod_base = OTHER; note = 2'-O-methyladenosine-3'-phosphate
  modified_base 17: mod_base = OTHER; note = 2'-O-methylguanosine-3'-phosphate
  modified_base 18: mod_base = OTHER; note = 2'-O-methyluridine-3'-phosphate
  modified_base 19: mod_base = OTHER; note = 2'-O-methyluridine-3'-phosphate
  modified_base 20: mod_base = OTHER; note = 2'-O-methylguanosine-3'-phosphate
  modified_base 21: mod_base = OTHER; note = 2'-O-methyluridine-3'-phosphate N-[tris(GalNAc-alkyl)-amidodecanoyl)]-4-hydroxyprolinol (Hyp-(GalNAc-alkyl)3)
agtgttcccttttcaagttgt

SEQ ID NO: 820 - RNA, 21 nt, synthetic construct
  source 1..21: mol_type = other RNA
  modified_base 1: mod_base = OTHER; note = 2'-O-methylguanosine-3'-phosphorothioate
  modified_base 2: mod_base = OTHER; note = 2'-O-methyluridine-3'-phosphorothioate
  modified_base 3: mod_base = OTHER; note = 2'-O-methylguanosine-3'-phosphate
  modified_base 4: mod_base = OTHER; note = 2'-O-methyluridine-3'-phosphate
  modified_base 5: mod_base = OTHER; note = 2'-O-methyluridine-3'-phosphate
  modified_base 6: mod_base = OTHER; note = 2'-O-methylcytidine-3'-phosphate
  modified_base 7: mod_base = OTHER; note = 2'-fluorocytidine-3'-phosphate
  modified_base 8: mod_base = OTHER; note = 2'-O-methylcytidine-3'-phosphate
  modified_base 9: mod_base = OTHER; note = 2'-fluorouridine-3'-phosphate
  modified_base 10: mod_base = OTHER; note = 2'-fluorouridine-3'-phosphate
  modified_base 11: mod_base = OTHER; note = 2'-fluorouridine-3'-phosphate
  modified_base 12: mod_base = OTHER; note = 2'-O-methyluridine-3'-phosphate
  modified_base 13: mod_base = OTHER; note = 2'-O-methylcytidine-3'-phosphate
  modified_base 14: mod_base = OTHER; note = 2'-O-methyladenosine-3'-phosphate
  modified_base 15: mod_base = OTHER; note = 2'-O-methyladenosine-3'-phosphate
  modified_base 16: mod_base = OTHER; note = 2'-O-methylguanosine-3'-phosphate
  modified_base 17: mod_base = OTHER; note = 2'-O-methyluridine-3'-phosphate
  modified_base 18: mod_base = OTHER; note = 2'-O-methyluridine-3'-phosphate
  modified_base 19: mod_base = OTHER; note = 2'-O-methylguanosine-3'-phosphate
  modified_base 20: mod_base = OTHER; note = 2'-O-methyladenosine-3'-phosphate
  modified_base 21: mod_base = OTHER; note = 2'-O-methyluridine-3'-phosphate N-[tris(GalNAc-alkyl)-amidodecanoyl)]-4-hydroxyprolinol (Hyp-(GalNAc-alkyl)3)
gtgttcccttttcaagttgat

SEQ ID NO: 821 - RNA, 21 nt, synthetic construct
  source 1..21: mol_type = other RNA
  modified_base 1: mod_base = OTHER; note = 2'-O-methyluridine-3'-phosphorothioate
  modified_base 2: mod_base = OTHER; note = 2'-O-methylguanosine-3'-phosphorothioate
  modified_base 3: mod_base = OTHER; note = 2'-O-methyluridine-3'-phosphate
  modified_base 4: mod_base = OTHER; note = 2'-O-methyluridine-3'-phosphate
  modified_base 5: mod_base = OTHER; note = 2'-O-methylcytidine-3'-phosphate
  modified_base 6: mod_base = OTHER; note = 2'-O-methylcytidine-3'-phosphate
  modified_base 7: mod_base = OTHER; note = 2'-fluorocytidine-3'-phosphate
  modified_base 8: mod_base = OTHER; note = 2'-O-methyluridine-3'-phosphate
  modified_base 9: mod_base = OTHER; note = 2'-fluorouridine-3'-phosphate
  modified_base 10: mod_base = OTHER; note = 2'-fluorouridine-3'-phosphate
  modified_base 11: mod_base = OTHER; note = 2'-fluorouridine-3'-phosphate
  modified_base 12: mod_base = OTHER; note = 2'-O-methylcytidine-3'-phosphate
  modified_base 13: mod_base = OTHER; note = 2'-O-methyladenosine-3'-phosphate
  modified_base 14: mod_base = OTHER; note = 2'-O-methyladenosine-3'-phosphate
  modified_base 15: mod_base = OTHER; note = 2'-O-methylguanosine-3'-phosphate
  modified_base 16: mod_base = OTHER; note = 2'-O-methyluridine-3'-phosphate
  modified_base 17: mod_base = OTHER; note = 2'-O-methyluridine-3'-phosphate
  modified_base 18: mod_base = OTHER; note = 2'-O-methylguanosine-3'-phosphate
  modified_base 19: mod_base = OTHER; note = 2'-O-methyladenosine-3'-phosphate
  modified_base 20: mod_base = OTHER; note = 2'-O-methylguanosine-3'-phosphate
  modified_base 21: mod_base = OTHER; note = 2'-O-methyluridine-3'-phosphate N-[tris(GalNAc-alkyl)-amidodecanoyl)]-4-hydroxyprolinol (Hyp-(GalNAc-alkyl)3)
tgttcccttttcaagttgagt

SEQ ID NO: 822 - RNA, 21 nt, synthetic construct
  source 1..21: mol_type = other RNA
  modified_base 1: mod_base = OTHER; note = 2'-O-methylguanosine-3'-phosphorothioate
  modified_base 2: mod_base = OTHER; note = 2'-O-methyluridine-3'-phosphorothioate
  modified_base 3: mod_base = OTHER; note = 2'-O-methyluridine-3'-phosphate
  modified_base 4: mod_base = OTHER; note = 2'-O-methylcytidine-3'-phosphate
  modified_base 5: mod_base = OTHER; note = 2'-O-methylcytidine-3'-phosphate
  modified_base 6: mod_base = OTHER; note = 2'-O-methylcytidine-3'-phosphate
  modified_base 7: mod_base = OTHER; note = 2'-fluorouridine-3'-phosphate
  modified_base 8: mod_base = OTHER; note = 2'-O-methyluridine-3'-phosphate
  modified_base 9: mod_base = OTHER; note = 2'-fluorouridine-3'-phosphate
  modified_base 10: mod_base = OTHER; note = 2'-fluorouridine-3'-phosphate
  modified_base 11: mod_base = OTHER; note = 2'-fluorocytidine-3'-phosphate
  modified_base 12: mod_base = OTHER; note = 2'-O-methyladenosine-3'-phosphate
  modified_base 13: mod_base = OTHER; note = 2'-O-methyladenosine-3'-phosphate
  modified_base 14: mod_base = OTHER; note = 2'-O-methylguanosine-3'-phosphate
  modified_base 15: mod_base = OTHER; note = 2'-O-methyluridine-3'-phosphate
  modified_base 16: mod_base = OTHER; note = 2'-O-methyluridine-3'-phosphate
  modified_base 17: mod_base = OTHER; note = 2'-O-methylguanosine-3'-phosphate
  modified_base 18: mod_base = OTHER; note = 2'-O-methyladenosine-3'-phosphate
  modified_base 19: mod_base = OTHER; note = 2'-O-methylguanosine-3'-phosphate
  modified_base 20: mod_base = OTHER; note = 2'-O-methyladenosine-3'-phosphate
  modified_base 21: mod_base = OTHER; note = 2'-O-methyluridine-3'-phosphate N-[tris(GalNAc-alkyl)-amidodecanoyl)]-4-hydroxyprolinol (Hyp-(GalNAc-alkyl)3)
gttcccttttcaagttgagat

SEQ ID NO: 823 - RNA, 21 nt, synthetic construct
  source 1..21: mol_type = other RNA
  modified_base 1: mod_base = OTHER; note = 2'-O-methylcytidine-3'-phosphorothioate
  modified_base 2: mod_base = OTHER; note = 2'-O-methyladenosine-3'-phosphorothioate
  modified_base 3: mod_base = OTHER; note = 2'-O-methyladenosine-3'-phosphate
  modified_base 4: mod_base = OTHER; note = 2'-O-methylguanosine-3'-phosphate
  modified_base 5: mod_base = OTHER; note = 2'-O-methyluridine-3'-phosphate
  modified_base 6: mod_base = OTHER; note = 2'-O-methyluridine-3'-phosphate
  modified_base 7: mod_base = OTHER; note = 2'-fluoroguanosine-3'-phosphate
  modified_base 8: mod_base = OTHER; note = 2'-O-methyladenosine-3'-phosphate
  modified_base 9: mod_base = OTHER; note = 2'-fluoroguanosine-3'-phosphate
  modified_base 10: mod_base = OTHER; note = 2'-fluoroadenosine-3'-phosphate
  modified_base 11: mod_base = OTHER; note = 2'-fluoroadenosine-3'-phosphate
  modified_base 12: mod_base = OTHER; note = 2'-O-methylcytidine-3'-phosphate
  modified_base 13: mod_base = OTHER; note = 2'-O-methyladenosine-3'-phosphate
  modified_base 14: mod_base = OTHER; note = 2'-O-methyladenosine-3'-phosphate
  modified_base 15: mod_base = OTHER; note = 2'-O-methyladenosine-3'-phosphate
  modified_base 16: mod_base = OTHER; note = 2'-O-methyladenosine-3'-phosphate
  modified_base 17: mod_base = OTHER; note = 2'-O-methyladenosine-3'-phosphate
  modified_base 18: mod_base = OTHER; note = 2'-O-methyluridine-3'-phosphate
  modified_base 19: mod_base = OTHER; note = 2'-O-methyluridine-3'-phosphate
  modified_base 20: mod_base = OTHER; note = 2'-O-methylguanosine-3'-phosphate
  modified_base 21: mod_base = OTHER; note = 2'-O-methyluridine-3'-phosphate N-[tris(GalNAc-alkyl)-amidodecanoyl)]-4-hydroxyprolinol (Hyp-(GalNAc-alkyl)3)
caagttgagaacaaaaattgt

SEQ ID NO: 824 - RNA, 21 nt, synthetic construct
  source 1..21: mol_type = other RNA
  modified_base 1: mod_base = OTHER; note = 2'-O-methyladenosine-3'-phosphorothioate
  modified_base 2: mod_base = OTHER; note = 2'-O-methyladenosine-3'-phosphorothioate
  modified_base 3: mod_base = OTHER; note = 2'-O-methylguanosine-3'-phosphate
  modified_base 4: mod_base = OTHER; note = 2'-O-methyluridine-3'-phosphate
  modified_base 5: mod_base = OTHER; note = 2'-O-methyluridine-3'-phosphate
  modified_base 6: mod_base = OTHER; note = 2'-O-methylguanosine-3'-phosphate
  modified_base 7: mod_base = OTHER; note = 2'-fluoroadenosine-3'-phosphate
  modified_base 8: mod_base = OTHER; note = 2'-O-methylguanosine-3'-phosphate
  modified_base 9: mod_base = OTHER; note = 2'-fluoroadenosine-3'-phosphate
  modified_base 10: mod_base = OTHER; note = 2'-fluoroadenosine-3'-phosphate
  modified_base 11: mod_base = OTHER; note = 2'-fluorocytidine-3'-phosphate
  modified_base 12: mod_base = OTHER; note = 2'-O-methyladenosine-3'-phosphate
  modified_base 13: mod_base = OTHER; note = 2'-O-methyladenosine-3'-phosphate
  modified_base 14: mod_base = OTHER; note = 2'-O-methyladenosine-3'-phosphate
  modified_base 15: mod_base = OTHER; note = 2'-O-methyladenosine-3'-phosphate
  modified_base 16: mod_base = OTHER; note = 2'-O-methyladenosine-3'-phosphate
  modified_base 17: mod_base = OTHER; note = 2'-O-methyluridine-3'-phosphate
  modified_base 18: mod_base = OTHER; note = 2'-O-methyluridine-3'-phosphate
  modified_base 19: mod_base = OTHER; note = 2'-O-methylguanosine-3'-phosphate
  modified_base 20: mod_base = OTHER; note = 2'-O-methylguanosine-3'-phosphate
  modified_base 21: mod_base = OTHER; note = 2'-O-methyluridine-3'-phosphate N-[tris(GalNAc-alkyl)-amidodecanoyl)]-4-hydroxyprolinol (Hyp-(GalNAc-alkyl)3)
aagttgagaacaaaaattggt

SEQ ID NO: 825 - RNA, 21 nt, synthetic construct
  source 1..21: mol_type = other RNA
  modified_base 1: mod_base = OTHER; note = 2'-O-methylguanosine-3'-phosphorothioate
  modified_base 2: mod_base = OTHER; note = 2'-O-methyluridine-3'-phosphorothioate
  modified_base 3: mod_base = OTHER; note = 2'-O-methyluridine-3'-phosphate
  modified_base 4: mod_base = OTHER; note = 2'-O-methylguanosine-3'-phosphate
  modified_base 5: mod_base = OTHER; note = 2'-O-methyladenosine-3'-phosphate
  modified_base 6: mod_base = OTHER; note = 2'-O-methylguanosine-3'-phosphate
  modified_base 7: mod_base = OTHER; note = 2'-fluoroadenosine-3'-phosphate
  modified_base 8: mod_base = OTHER; note = 2'-O-methyladenosine-3'-phosphate
  modified_base 9: mod_base = OTHER; note = 2'-fluorocytidine-3'-phosphate
  modified_base 10: mod_base = OTHER; note = 2'-fluoroadenosine-3'-phosphate
  modified_base 11: mod_base = OTHER; note = 2'-fluoroadenosine-3'-phosphate
  modified_base 12: mod_base = OTHER; note = 2'-O-methyladenosine-3'-phosphate
  modified_base 13: mod_base = OTHER; note = 2'-O-methyladenosine-3'-phosphate
  modified_base 14: mod_base = OTHER; note = 2'-O-methyladenosine-3'-phosphate
  modified_base 15: mod_base = OTHER; note = 2'-O-methyluridine-3'-phosphate
  modified_base 16: mod_base = OTHER; note = 2'-O-methyluridine-3'-phosphate
  modified_base 17: mod_base = OTHER; note = 2'-O-methylguanosine-3'-phosphate
  modified_base 18: mod_base = OTHER; note = 2'-O-methylguanosine-3'-phosphate
  modified_base 19: mod_base = OTHER; note = 2'-O-methylguanosine-3'-phosphate
  modified_base 20: mod_base = OTHER; note = 2'-O-methyluridine-3'-phosphate
  modified_base 21: mod_base = OTHER; note = 2'-O-methyluridine-3'-phosphate N-[tris(GalNAc-alkyl)-amidodecanoyl)]-4-hydroxyprolinol (Hyp-(GalNAc-alkyl)3)
gttgagaacaaaaattgggtt

SEQ ID NO: 826 - RNA, 21 nt, synthetic construct
  source 1..21: mol_type = other RNA
  modified_base 1: mod_base = OTHER; note = 2'-O-methyluridine-3'-phosphorothioate
  modified_base 2: mod_base = OTHER; note = 2'-O-methyluridine-3'-phosphorothioate
  modified_base 3: mod_base = OTHER; note = 2'-O-methylguanosine-3'-phosphate
  modified_base 4: mod_base = OTHER; note = 2'-O-methyladenosine-3'-phosphate
  modified_base 5: mod_base = OTHER; note = 2'-O-methylguanosine-3'-phosphate
  modified_base 6: mod_base = OTHER; note = 2'-O-methyladenosine-3'-phosphate
  modified_base 7: mod_base = OTHER; note = 2'-fluoroadenosine-3'-phosphate
  modified_base 8: mod_base = OTHER; note = 2'-O-methylcytidine-3'-phosphate
  modified_base 9: mod_base = OTHER; note = 2'-fluoroadenosine-3'-phosphate
  modified_base 10: mod_base = OTHER; note = 2'-fluoroadenosine-3'-phosphate
  modified_base 11: mod_base = OTHER; note = 2'-fluoroadenosine-3'-phosphate
  modified_base 12: mod_base = OTHER; note = 2'-O-methyladenosine-3'-phosphate
  modified_base 13: mod_base = OTHER; note = 2'-O-methyladenosine-3'-phosphate
  modified_base 14: mod_base = OTHER; note = 2'-O-methyluridine-3'-phosphate
  modified_base 15: mod_base = OTHER; note = 2'-O-methyluridine-3'-phosphate
  modified_base 16: mod_base = OTHER; note = 2'-O-methylguanosine-3'-phosphate
  modified_base 17: mod_base = OTHER; note = 2'-O-methylguanosine-3'-phosphate
  modified_base 18: mod_base = OTHER; note = 2'-O-methylguanosine-3'-phosphate
  modified_base 19: mod_base = OTHER; note = 2'-O-methyluridine-3'-phosphate
  modified_base 20: mod_base = OTHER; note = 2'-O-methyluridine-3'-phosphate
  modified_base 21: mod_base = OTHER; note = 2'-O-methyluridine-3'-phosphate N-[tris(GalNAc-alkyl)-amidodecanoyl)]-4-hydroxyprolinol (Hyp-(GalNAc-alkyl)3)
ttgagaacaaaaattgggttt

SEQ ID NO: 827 - RNA, 21 nt, synthetic construct
  source 1..21: mol_type = other RNA
  modified_base 1: mod_base = OTHER; note = 2'-O-methyluridine-3'-phosphorothioate
  modified_base 2: mod_base = OTHER; note = 2'-O-methylguanosine-3'-phosphorothioate
  modified_base 3: mod_base = OTHER; note = 2'-O-methyladenosine-3'-phosphate
  modified_base 4: mod_base = OTHER; note = 2'-O-methylguanosine-3'-phosphate
  modified_base 5: mod_base = OTHER; note = 2'-O-methyladenosine-3'-phosphate
  modified_base 6: mod_base = OTHER; note = 2'-O-methyladenosine-3'-phosphate
  modified_base 7: mod_base = OTHER; note = 2'-fluorocytidine-3'-phosphate
  modified_base 8: mod_base = OTHER; note = 2'-O-methyladenosine-3'-phosphate
  modified_base 9: mod_base = OTHER; note = 2'-fluoroadenosine-3'-phosphate
  modified_base 10: mod_base = OTHER; note = 2'-fluoroadenosine-3'-phosphate
  modified_base 11: mod_base = OTHER; note = 2'-fluoroadenosine-3'-phosphate
  modified_base 12: mod_base = OTHER; note = 2'-O-methyladenosine-3'-phosphate
  modified_base 13: mod_base = OTHER; note = 2'-O-methyluridine-3'-phosphate
  modified_base 14: mod_base = OTHER; note = 2'-O-methyluridine-3'-phosphate
  modified_base 15: mod_base = OTHER; note = 2'-O-methylguanosine-3'-phosphate
  modified_base 16: mod_base = OTHER; note = 2'-O-methylguanosine-3'-phosphate
  modified_base 17: mod_base = OTHER; note = 2'-O-methylguanosine-3'-phosphate
  modified_base 18: mod_base = OTHER; note = 2'-O-methyluridine-3'-phosphate
  modified_base 19: mod_base = OTHER; note = 2'-O-methyluridine-3'-phosphate
  modified_base 20: mod_base = OTHER; note = 2'-O-methyluridine-3'-phosphate
  modified_base 21: mod_base = OTHER; note = 2'-O-methyluridine-3'-phosphate N-[tris(GalNAc-alkyl)-amidodecanoyl)]-4-hydroxyprolinol (Hyp-(GalNAc-alkyl)3)
tgagaacaaaaattgggtttt

SEQ ID NO: 828 - RNA, 21 nt, synthetic construct
  source 1..21: mol_type = other RNA
  modified_base 1: mod_base = OTHER; note = 2'-O-methylguanosine-3'-phosphorothioate
  modified_base 2: mod_base = OTHER; note = 2'-O-methyladenosine-3'-phosphorothioate
  modified_base 3: mod_base = OTHER; note = 2'-O-methylguanosine-3'-phosphate
  modified_base 4: mod_base = OTHER; note = 2'-O-methyladenosine-3'-phosphate
  modified_base 5: mod_base = OTHER; note = 2'-O-methyladenosine-3'-phosphate
  modified_base 6: mod_base = OTHER; note = 2'-O-methylcytidine-3'-phosphate
  modified_base 7: mod_base = OTHER; note = 2'-fluoroadenosine-3'-phosphate
  modified_base 8: mod_base = OTHER; note = 2'-O-methyladenosine-3'-phosphate
  modified_base 9: mod_base = OTHER; note = 2'-fluoroadenosine-3'-phosphate
  modified_base 10: mod_base = OTHER; note = 2'-fluoroadenosine-3'-phosphate
  modified_base 11: mod_base = OTHER; note = 2'-fluoroadenosine-3'-phosphate
  modified_base 12: mod_base = OTHER; note = 2'-O-methyluridine-3'-phosphate
  modified_base 13: mod_base = OTHER; note = 2'-O-methyluridine-3'-phosphate
  modified_base 14: mod_base = OTHER; note = 2'-O-methylguanosine-3'-phosphate
  modified_base 15: mod_base = OTHER; note = 2'-O-methylguanosine-3'-phosphate
  modified_base 16: mod_base = OTHER; note = 2'-O-methylguanosine-3'-phosphate
  modified_base 17: mod_base = OTHER; note = 2'-O-methyluridine-3'-phosphate
  modified_base 18: mod_base = OTHER; note = 2'-O-methyluridine-3'-phosphate
  modified_base 19: mod_base = OTHER; note = 2'-O-methyluridine-3'-phosphate
  modified_base 20: mod_base = OTHER; note = 2'-O-methyluridine-3'-phosphate
  modified_base 21: mod_base = OTHER; note = 2'-O-methyluridine-3'-phosphate N-[tris(GalNAc-alkyl)-amidodecanoyl)]-4-hydroxyprolinol (Hyp-(GalNAc-alkyl)3)
gagaacaaaaattgggttttt

SEQ ID NO: 829 - RNA, 21 nt, synthetic construct
  source 1..21: mol_type = other RNA
  modified_base 1: mod_base = OTHER; note = 2'-O-methyladenosine-3'-phosphorothioate
  modified_base 2: mod_base = OTHER; note = 2'-O-methylguanosine-3'-phosphorothioate
  modified_base 3: mod_base = OTHER; note = 2'-O-methyladenosine-3'-phosphate
  modified_base 4: mod_base = OTHER; note = 2'-O-methyladenosine-3'-phosphate
  modified_base 5: mod_base = OTHER; note = 2'-O-methylcytidine-3'-phosphate
  modified_base 6: mod_base = OTHER; note = 2'-O-methyladenosine-3'-phosphate
  modified_base 7: mod_base = OTHER; note = 2'-fluoroadenosine-3'-phosphate
  modified_base 8: mod_base = OTHER; note = 2'-O-methyladenosine-3'-phosphate
  modified_base 9: mod_base = OTHER; note = 2'-fluoroadenosine-3'-phosphate
  modified_base 10: mod_base = OTHER; note = 2'-fluoroadenosine-3'-phosphate
  modified_base 11: mod_base = OTHER; note = 2'-fluorouridine-3'-phosphate
  modified_base 12: mod_base = OTHER; note = 2'-O-methyluridine-3'-phosphate
  modified_base 13: mod_base = OTHER; note = 2'-O-methylguanosine-3'-phosphate
  modified_base 14: mod_base = OTHER; note = 2'-O-methylguanosine-3'-phosphate
  modified_base 15: mod_base = OTHER; note = 2'-O-methylguanosine-3'-phosphate
  modified_base 16: mod_base = OTHER; note = 2'-O-methyluridine-3'-phosphate
  modified_base 17: mod_base = OTHER; note = 2'-O-methyluridine-3'-phosphate
  modified_base 18: mod_base = OTHER; note = 2'-O-methyluridine-3'-phosphate
  modified_base 19: mod_base = OTHER; note = 2'-O-methyluridine-3'-phosphate
  modified_base 20: mod_base = OTHER; note = 2'-O-methyladenosine-3'-phosphate
  modified_base 21: mod_base = OTHER; note = 2'-O-methyluridine-3'-phosphate N-[tris(GalNAc-alkyl)-amidodecanoyl)]-4-hydroxyprolinol (Hyp-(GalNAc-alkyl)3)
agaacaaaaattgggttttat

SEQ ID NO: 830 - RNA, 21 nt, synthetic construct
  source 1..21: mol_type = other RNA
  modified_base 1: mod_base = OTHER; note = 2'-O-methylguanosine-3'-phosphorothioate
  modified_base 2: mod_base = OTHER; note = 2'-O-methyladenosine-3'-phosphorothioate
  modified_base 3: mod_base = OTHER; note = 2'-O-methyladenosine-3'-phosphate
  modified_base 4: mod_base = OTHER; note = 2'-O-methylcytidine-3'-phosphate
  modified_base 5: mod_base = OTHER; note = 2'-O-methyladenosine-3'-phosphate
  modified_base 6: mod_base = OTHER; note = 2'-O-methyladenosine-3'-phosphate
  modified_base 7: mod_base = OTHER; note = 2'-fluoroadenosine-3'-phosphate
  modified_base 8: mod_base = OTHER; note = 2'-O-methyladenosine-3'-phosphate
  modified_base 9: mod_base = OTHER; note = 2'-fluoroadenosine-3'-phosphate
  modified_base 10: mod_base = OTHER; note = 2'-fluorouridine-3'-phosphate
  modified_base 11: mod_base = OTHER; note = 2'-fluorouridine-3'-phosphate
  modified_base 12: mod_base = OTHER; note = 2'-O-methylguanosine-3'-phosphate
  modified_base 13: mod_base = OTHER; note = 2'-O-methylguanosine-3'-phosphate
  modified_base 14: mod_base = OTHER; note = 2'-O-methylguanosine-3'-phosphate
  modified_base 15: mod_base = OTHER; note = 2'-O-methyluridine-3'-phosphate
  modified_base 16: mod_base = OTHER; note = 2'-O-methyluridine-3'-phosphate
  modified_base 17: mod_base = OTHER; note = 2'-O-methyluridine-3'-phosphate
  modified_base 18: mod_base = OTHER; note = 2'-O-methyluridine-3'-phosphate
  modified_base 19: mod_base = OTHER; note = 2'-O-methyladenosine-3'-phosphate
  modified_base 20: mod_base = OTHER; note = 2'-O-methyladenosine-3'-phosphate
  modified_base 21: mod_base = OTHER; note = 2'-O-methyluridine-3'-phosphate N-[tris(GalNAc-alkyl)-amidodecanoyl)]-4-hydroxyprolinol (Hyp-(GalNAc-alkyl)3)
gaacaaaaattgggttttaat

SEQ ID NO: 831 - RNA, 21 nt, synthetic construct
  source 1..21: mol_type = other RNA
  modified_base 1: mod_base = OTHER; note = 2'-O-methylguanosine-3'-phosphorothioate
  modified_base 2: mod_base = OTHER; note = 2'-O-methyluridine-3'-phosphorothioate
  modified_base 3: mod_base = OTHER; note = 2'-O-methyladenosine-3'-phosphate
  modified_base 4: mod_base = OTHER; note = 2'-O-methyluridine-3'-phosphate
  modified_base 5: mod_base = OTHER; note = 2'-O-methyladenosine-3'-phosphate
  modified_base 6: mod_base = OTHER; note = 2'-O-methylcytidine-3'-phosphate
  modified_base 7: mod_base = OTHER; note = 2'-fluoroadenosine-3'-phosphate
  modified_base 8: mod_base = OTHER; note = 2'-O-methyluridine-3'-phosphate
  modified_base 9: mod_base = OTHER; note = 2'-fluorouridine-3'-phosphate
  modified_base 10: mod_base = OTHER; note = 2'-fluorouridine-3'-phosphate
  modified_base 11: mod_base = OTHER; note = 2'-fluorouridine-3'-phosphate
  modified_base 12: mod_base = OTHER; note = 2'-O-methyluridine-3'-phosphate
  modified_base 13: mod_base = OTHER; note = 2'-O-methylguanosine-3'-phosphate
  modified_base 14: mod_base = OTHER; note = 2'-O-methylcytidine-3'-phosphate
  modified_base 15: mod_base = OTHER; note = 2'-O-methyladenosine-3'-phosphate
  modified_base 16: mod_base = OTHER; note = 2'-O-methyluridine-3'-phosphate
  modified_base 17: mod_base = OTHER; note = 2'-O-methyluridine-3'-phosphate
  modified_base 18: mod_base = OTHER; note = 2'-O-methylguanosine-3'-phosphate
  modified_base 19: mod_base = OTHER; note = 2'-O-methylcytidine-3'-phosphate
  modified_base 20: mod_base = OTHER; note = 2'-O-methylcytidine-3'-phosphate
  modified_base 21: mod_base = OTHER; note = 2'-O-methyluridine-3'-phosphate N-[tris(GalNAc-alkyl)-amidodecanoyl)]-4-hydroxyprolinol (Hyp-(GalNAc-alkyl)3)
gtatacatttttgcattgcct

SEQ ID NO: 832 - RNA, 21 nt, synthetic construct
  source 1..21: mol_type = other RNA
  modified_base 1: mod_base = OTHER; note = 2'-O-methyladenosine-3'-phosphorothioate
  modified_base 2: mod_base = OTHER; note = 2'-O-methyluridine-3'-phosphorothioate
  modified_base 3: mod_base = OTHER; note = 2'-O-methyladenosine-3'-phosphate
  modified_base 4: mod_base = OTHER; note = 2'-O-methylcytidine-3'-phosphate
  modified_base 5: mod_base = OTHER; note = 2'-O-methyladenosine-3'-phosphate
  modified_base 6: mod_base = OTHER; note = 2'-O-methyluridine-3'-phosphate
  modified_base 7: mod_base = OTHER; note = 2'-fluorouridine-3'-phosphate
  modified_base 8: mod_base = OTHER; note = 2'-O-methyluridine-3'-phosphate
  modified_base 9: mod_base = OTHER; note = 2'-fluorouridine-3'-phosphate
  modified_base 10: mod_base = OTHER; note = 2'-fluorouridine-3'-phosphate
  modified_base 11: mod_base = OTHER; note = 2'-fluoroguanosine-3'-phosphate
  modified_base 12: mod_base = OTHER; note = 2'-O-methylcytidine-3'-phosphate
  modified_base 13: mod_base = OTHER; note = 2'-O-methyladenosine-3'-phosphate
  modified_base 14: mod_base = OTHER; note = 2'-O-methyluridine-3'-phosphate
  modified_base 15: mod_base = OTHER; note = 2'-O-methyluridine-3'-phosphate
  modified_base 16: mod_base = OTHER; note = 2'-O-methylguanosine-3'-phosphate
  modified_base 17: mod_base = OTHER; note = 2'-O-methylcytidine-3'-phosphate
  modified_base 18: mod_base = OTHER; note = 2'-O-methylcytidine-3'-phosphate
  modified_base 19: mod_base = OTHER; note = 2'-O-methyluridine-3'-phosphate
  modified_base 20: mod_base = OTHER; note = 2'-O-methyluridine-3'-phosphate
  modified_base 21: mod_base = OTHER; note = 2'-O-methyluridine-3'-phosphate N-[tris(GalNAc-alkyl)-amidodecanoyl)]-4-hydroxyprolinol (Hyp-(GalNAc-alkyl)3)
atacatttttgcattgccttt

SEQ ID NO: 833 - RNA, 21 nt, synthetic construct
  source 1..21: mol_type = other RNA
  modified_base 1: mod_base = OTHER; note = 2'-O-methylcytidine-3'-phosphorothioate
  modified_base 2: mod_base = OTHER; note = 2'-O-methyladenosine-3'-phosphorothioate
  modified_base 3: mod_base = OTHER; note = 2'-O-methyluridine-3'-phosphate
  modified_base 4: mod_base = OTHER; note = 2'-O-methyluridine-3'-phosphate
  modified_base 5: mod_base = OTHER; note = 2'-O-methyluridine-3'-phosphate
  modified_base 6: mod_base = OTHER; note = 2'-O-methyluridine-3'-phosphate
  modified_base 7: mod_base = OTHER; note = 2'-fluorouridine-3'-phosphate
  modified_base 8: mod_base = OTHER; note = 2'-O-methylguanosine-3'-phosphate
  modified_base 9: mod_base = OTHER; note = 2'-fluorocytidine-3'-phosphate
  modified_base 10: mod_base = OTHER; note = 2'-fluoroadenosine-3'-phosphate
  modified_base 11: mod_base = OTHER; note = 2'-fluorouridine-3'-phosphate
  modified_base 12: mod_base = OTHER; note = 2'-O-methyluridine-3'-phosphate
  modified_base 13: mod_base = OTHER; note = 2'-O-methylguanosine-3'-phosphate
  modified_base 14: mod_base = OTHER; note = 2'-O-methylcytidine-3'-phosphate
  modified_base 15: mod_base = OTHER; note = 2'-O-methylcytidine-3'-phosphate
  modified_base 16: mod_base = OTHER; note = 2'-O-methyluridine-3'-phosphate
  modified_base 17: mod_base = OTHER; note = 2'-O-methyluridine-3'-phosphate
  modified_base 18: mod_base = OTHER; note = 2'-O-methylcytidine-3'-phosphate
  modified_base 19: mod_base = OTHER; note = 2'-O-methylguanosine-3'-phosphate
  modified_base 20: mod_base = OTHER; note = 2'-O-methylguanosine-3'-phosphate
  modified_base 21: mod_base = OTHER; note = 2'-O-methyluridine-3'-phosphate N-[tris(GalNAc-alkyl)-amidodecanoyl)]-4-hydroxyprolinol (Hyp-(GalNAc-alkyl)3)
catttttgcattgccttcggt

SEQ ID NO: 834 - RNA, 21 nt, synthetic construct
  source 1..21: mol_type = other RNA
  modified_base 1: mod_base = OTHER; note = 2'-O-methyladenosine-3'-phosphorothioate
  modified_base 2: mod_base = OTHER; note = 2'-O-methyluridine-3'-phosphorothioate
  modified_base 3: mod_base = OTHER; note = 2'-O-methyluridine-3'-phosphate
  modified_base 4: mod_base = OTHER; note = 2'-O-methyluridine-3'-phosphate
  modified_base 5: mod_base = OTHER; note = 2'-O-methyluridine-3'-phosphate
  modified_base 6: mod_base = OTHER; note = 2'-O-methyluridine-3'-phosphate
  modified_base 7: mod_base = OTHER; note = 2'-fluoroguanosine-3'-phosphate
  modified_base 8: mod_base = OTHER; note = 2'-O-methylcytidine-3'-phosphate
  modified_base 9: mod_base = OTHER; note = 2'-fluoroadenosine-3'-phosphate
  modified_base 10: mod_base = OTHER; note = 2'-fluorouridine-3'-phosphate
  modified_base 11: mod_base = OTHER; note = 2'-fluorouridine-3'-phosphate
  modified_base 12: mod_base = OTHER; note = 2'-O-methylguanosine-3'-phosphate
  modified_base 13: mod_base = OTHER; note = 2'-O-methylcytidine-3'-phosphate
  modified_base 14: mod_base = OTHER; note = 2'-O-methylcytidine-3'-phosphate
  modified_base 15: mod_base = OTHER; note = 2'-O-methyluridine-3'-phosphate
  modified_base 16: mod_base = OTHER; note = 2'-O-methyluridine-3'-phosphate
  modified_base 17: mod_base = OTHER; note = 2'-O-methylcytidine-3'-phosphate
  modified_base 18: mod_base = OTHER; note = 2'-O-methylguanosine-3'-phosphate
  modified_base 19: mod_base = OTHER; note = 2'-O-methylguanosine-3'-phosphate
  modified_base 20: mod_base = OTHER; note = 2'-O-methyluridine-3'-phosphate
  modified_base 21: mod_base = OTHER; note = 2'-O-methyluridine-3'-phosphate N-[tris(GalNAc-alkyl)-amidodecanoyl)]-4-hydroxyprolinol (Hyp-(GalNAc-alkyl)3)
atttttgcattgccttcggtt

SEQ ID NO: 835 - RNA, 21 nt, synthetic construct
  source 1..21: mol_type = other RNA
  modified_base 1: mod_base = OTHER; note = 2'-O-methyluridine-3'-phosphorothioate
  modified_base 2: mod_base = OTHER; note = 2'-O-methyluridine-3'-phosphorothioate
  modified_base 3: mod_base = OTHER; note = 2'-O-methyluridine-3'-phosphate
  modified_base 4: mod_base = OTHER; note = 2'-O-methyluridine-3'-phosphate
  modified_base 5: mod_base = OTHER; note = 2'-O-methyluridine-3'-phosphate
  modified_base 6: mod_base = OTHER; note = 2'-O-methylguanosine-3'-phosphate
  modified_base 7: mod_base = OTHER; note = 2'-fluorocytidine-3'-phosphate
  modified_base 8: mod_base = OTHER; note = 2'-O-methyladenosine-3'-phosphate
  modified_base 9: mod_base = OTHER; note = 2'-fluorouridine-3'-phosphate
  modified_base 10: mod_base = OTHER; note = 2'-fluorouridine-3'-phosphate
  modified_base 11: mod_base = OTHER; note = 2'-fluoroguanosine-3'-phosphate
  modified_base 12: mod_base = OTHER; note = 2'-O-methylcytidine-3'-phosphate
  modified_base 13: mod_base = OTHER; note = 2'-O-methylcytidine-3'-phosphate
  modified_base 14: mod_base = OTHER; note = 2'-O-methyluridine-3'-phosphate
  modified_base 15: mod_base = OTHER; note = 2'-O-methyluridine-3'-phosphate
  modified_base 16: mod_base = OTHER; note = 2'-O-methylcytidine-3'-phosphate
  modified_base 17: mod_base = OTHER; note = 2'-O-methylguanosine-3'-phosphate
  modified_base 18: mod_base = OTHER; note = 2'-O-methylguanosine-3'-phosphate
  modified_base 19: mod_base = OTHER; note = 2'-O-methyluridine-3'-phosphate
  modified_base 20: mod_base = OTHER; note = 2'-O-methyluridine-3'-phosphate
  modified_base 21: mod_base = OTHER; note = 2'-O-methyluridine-3'-phosphate N-[tris(GalNAc-alkyl)-amidodecanoyl)]-4-hydroxyprolinol (Hyp-(GalNAc-alkyl)3)
tttttgcattgccttcggttt

SEQ ID NO: 836 - RNA, 21 nt, synthetic construct
  source 1..21: mol_type = other RNA
  modified_base 1: mod_base = OTHER; note = 2'-O-methyluridine-3'-phosphorothioate
  modified_base 2: mod_base = OTHER; note = 2'-O-methyluridine-3'-phosphorothioate
  modified_base 3: mod_base = OTHER; note = 2'-O-methyluridine-3'-phosphate
  modified_base 4: mod_base = OTHER; note = 2'-O-methyluridine-3'-phosphate
  modified_base 5: mod_base = OTHER; note = 2'-O-methylguanosine-3'-phosphate
  modified_base 6: mod_base = OTHER; note = 2'-O-methylcytidine-3'-phosphate
  modified_base 7: mod_base = OTHER; note = 2'-fluoroadenosine-3'-phosphate
  modified_base 8: mod_base = OTHER; note = 2'-O-methyluridine-3'-phosphate
  modified_base 9: mod_base = OTHER; note = 2'-fluorouridine-3'-phosphate
  modified_base 10: mod_base = OTHER; note = 2'-fluoroguanosine-3'-phosphate
  modified_base 11: mod_base = OTHER; note = 2'-fluorocytidine-3'-phosphate
  modified_base 12: mod_base = OTHER; note = 2'-O-methylcytidine-3'-phosphate
  modified_base 13: mod_base = OTHER; note = 2'-O-methyluridine-3'-phosphate
  modified_base 14: mod_base = OTHER; note = 2'-O-methyluridine-3'-phosphate
  modified_base 15: mod_base = OTHER; note = 2'-O-methylcytidine-3'-phosphate
  modified_base 16: mod_base = OTHER; note = 2'-O-methylguanosine-3'-phosphate
  modified_base 17: mod_base = OTHER; note = 2'-O-methylguanosine-3'-phosphate
  modified_base 18: mod_base = OTHER; note = 2'-O-methyluridine-3'-phosphate
  modified_base 19: mod_base = OTHER; note = 2'-O-methyluridine-3'-phosphate
  modified_base 20: mod_base = OTHER; note = 2'-O-methyluridine-3'-phosphate
  modified_base 21: mod_base = OTHER; note = 2'-O-methyluridine-3'-phosphate N-[tris(GalNAc-alkyl)-amidodecanoyl)]-4-hydroxyprolinol (Hyp-(GalNAc-alkyl)3)
ttttgcattgccttcggtttt

SEQ ID NO: 837 - RNA, 21 nt, synthetic construct
  source 1..21: mol_type = other RNA
  modified_base 1: mod_base = OTHER; note = 2'-O-methyluridine-3'-phosphorothioate
  modified_base 2: mod_base = OTHER; note = 2'-O-methyluridine-3'-phosphorothioate
  modified_base 3: mod_base = OTHER; note = 2'-O-methyluridine-3'-phosphate
  modified_base 4: mod_base = OTHER; note = 2'-O-methylguanosine-3'-phosphate
  modified_base 5: mod_base = OTHER; note = 2'-O-methylcytidine-3'-phosphate
  modified_base 6: mod_base = OTHER; note = 2'-O-methyladenosine-3'-phosphate
  modified_base 7: mod_base = OTHER; note = 2'-fluorouridine-3'-phosphate
  modified_base 8: mod_base = OTHER; note = 2'-O-methyluridine-3'-phosphate
  modified_base 9: mod_base = OTHER; note = 2'-fluoroguanosine-3'-phosphate
  modified_base 10: mod_base = OTHER; note = 2'-fluorocytidine-3'-phosphate
  modified_base 11: mod_base = OTHER; note = 2'-fluorocytidine-3'-phosphate
  modified_base 12: mod_base = OTHER; note = 2'-O-methyluridine-3'-phosphate
  modified_base 13: mod_base = OTHER; note = 2'-O-methyluridine-3'-phosphate
  modified_base 14: mod_base = OTHER; note = 2'-O-methylcytidine-3'-phosphate
  modified_base 15: mod_base = OTHER; note = 2'-O-methylguanosine-3'-phosphate
  modified_base 16: mod_base = OTHER; note = 2'-O-methylguanosine-3'-phosphate
  modified_base 17: mod_base = OTHER; note = 2'-O-methyluridine-3'-phosphate
  modified_base 18: mod_base = OTHER; note = 2'-O-methyluridine-3'-phosphate
  modified_base 19: mod_base = OTHER; note = 2'-O-methyluridine-3'-phosphate
  modified_base 20: mod_base = OTHER; note = 2'-O-methylguanosine-3'-phosphate
  modified_base 21: mod_base = OTHER; note = 2'-O-methyluridine-3'-phosphate N-[tris(GalNAc-alkyl)-amidodecanoyl)]-4-hydroxyprolinol (Hyp-(GalNAc-alkyl)3)
tttgcattgccttcggtttgt

SEQ ID NO: 838 - RNA, 21 nt, synthetic construct
  source 1..21: mol_type = other RNA
  modified_base 1: mod_base = OTHER; note = 2'-O-methyluridine-3'-phosphorothioate
  modified_base 2: mod_base = OTHER; note = 2'-O-methyluridine-3'-phosphorothioate
  modified_base 3: mod_base = OTHER; note = 2'-O-methylguanosine-3'-phosphate
  modified_base 4: mod_base = OTHER; note = 2'-O-methylcytidine-3'-phosphate
  modified_base 5: mod_base = OTHER; note = 2'-O-methyladenosine-3'-phosphate
  modified_base 6: mod_base = OTHER; note = 2'-O-methyluridine-3'-phosphate
  modified_base 7: mod_base = OTHER; note = 2'-fluorouridine-3'-phosphate
  modified_base 8: mod_base = OTHER; note = 2'-O-methylguanosine-3'-phosphate
  modified_base 9: mod_base = OTHER; note = 2'-fluorocytidine-3'-phosphate
  modified_base 10: mod_base = OTHER; note = 2'-fluorocytidine-3'-phosphate
  modified_base 11: mod_base = OTHER; note = 2'-fluorouridine-3'-phosphate
  modified_base 12: mod_base = OTHER; note = 2'-O-methyluridine-3'-phosphate
  modified_base 13: mod_base = OTHER; note = 2'-O-methylcytidine-3'-phosphate
  modified_base 14: mod_base = OTHER; note = 2'-O-methylguanosine-3'-phosphate
  modified_base 15: mod_base = OTHER; note = 2'-O-methylguanosine-3'-phosphate
  modified_base 16: mod_base = OTHER; note = 2'-O-methyluridine-3'-phosphate
  modified_base 17: mod_base = OTHER; note = 2'-O-methyluridine-3'-phosphate
  modified_base 18: mod_base = OTHER; note = 2'-O-methyluridine-3'-phosphate
  modified_base 19: mod_base = OTHER; note = 2'-O-methylguanosine-3'-phosphate
  modified_base 20: mod_base = OTHER; note = 2'-O-methyluridine-3'-phosphate
  modified_base 21: mod_base = OTHER; note = 2'-O-methyluridine-3'-phosphate N-[tris(GalNAc-alkyl)-amidodecanoyl)]-4-hydroxyprolinol (Hyp-(GalNAc-alkyl)3)
ttgcattgccttcggtttgtt

SEQ ID NO: 839 - RNA, 21 nt, synthetic construct
  source 1..21: mol_type = other RNA
  modified_base 1: mod_base = OTHER; note = 2'-O-methyluridine-3'-phosphorothioate
  modified_base 2: mod_base = OTHER; note = 2'-O-methylguanosine-3'-phosphorothioate
  modified_base 3: mod_base = OTHER; note = 2'-O-methylcytidine-3'-phosphate
  modified_base 4: mod_base = OTHER; note = 2'-O-methyladenosine-3'-phosphate
  modified_base 5: mod_base = OTHER; note = 2'-O-methyluridine-3'-phosphate
  modified_base 6: mod_base = OTHER; note = 2'-O-methyluridine-3'-phosphate
  modified_base 7: mod_base = OTHER; note = 2'-fluoroguanosine-3'-phosphate
  modified_base 8: mod_base = OTHER; note = 2'-O-methylcytidine-3'-phosphate
  modified_base 9: mod_base = OTHER; note = 2'-fluorocytidine-3'-phosphate
  modified_base 10: mod_base = OTHER; note = 2'-fluorouridine-3'-phosphate
  modified_base 11: mod_base = OTHER; note = 2'-fluorouridine-3'-phosphate
  modified_base 12: mod_base = OTHER; note = 2'-O-methylcytidine-3'-phosphate
  modified_base 13: mod_base = OTHER; note = 2'-O-methylguanosine-3'-phosphate
  modified_base 14: mod_base = OTHER; note = 2'-O-methylguanosine-3'-phosphate
  modified_base 15: mod_base = OTHER; note = 2'-O-methyluridine-3'-phosphate
  modified_base 16: mod_base = OTHER; note = 2'-O-methyluridine-3'-phosphate
  modified_base 17: mod_base = OTHER; note = 2'-O-methyluridine-3'-phosphate
  modified_base 18: mod_base = OTHER; note = 2'-O-methylguanosine-3'-phosphate
  modified_base 19: mod_base = OTHER; note = 2'-O-methyluridine-3'-phosphate
  modified_base 20: mod_base = OTHER; note = 2'-O-methyladenosine-3'-phosphate
  modified_base 21: mod_base = OTHER; note = 2'-O-methyluridine-3'-phosphate N-[tris(GalNAc-alkyl)-amidodecanoyl)]-4-hydroxyprolinol (Hyp-(GalNAc-alkyl)3)
tgcattgccttcggtttgtat

SEQ ID NO: 840 - RNA, 21 nt, synthetic construct
  source 1..21: mol_type = other RNA
  modified_base 1: mod_base = OTHER; note = 2'-O-methylguanosine-3'-phosphorothioate
  modified_base 2: mod_base = OTHER; note = 2'-O-methylcytidine-3'-phosphorothioate
  modified_base 3: mod_base = OTHER; note = 2'-O-methyladenosine-3'-phosphate
  modified_base 4: mod_base = OTHER; note = 2'-O-methyluridine-3'-phosphate
  modified_base 5: mod_base = OTHER; note = 2'-O-methyluridine-3'-phosphate
  modified_base 6: mod_base = OTHER; note = 2'-O-methylguanosine-3'-phosphate
  modified_base 7: mod_base = OTHER; note = 2'-fluorocytidine-3'-phosphate
  modified_base 8: mod_base = OTHER; note = 2'-O-methylcytidine-3'-phosphate
  modified_base 9: mod_base = OTHER; note = 2'-fluorouridine-3'-phosphate
  modified_base 10: mod_base = OTHER; note = 2'-fluorouridine-3'-phosphate
  modified_base 11: mod_base = OTHER; note = 2'-fluorocytidine-3'-phosphate
  modified_base 12: mod_base = OTHER; note = 2'-O-methylguanosine-3'-phosphate
  modified_base 13: mod_base = OTHER; note = 2'-O-methylguanosine-3'-phosphate
  modified_base 14: mod_base = OTHER; note = 2'-O-methyluridine-3'-phosphate
  modified_base 15: mod_base = OTHER; note = 2'-O-methyluridine-3'-phosphate
  modified_base 16: mod_base = OTHER; note = 2'-O-methyluridine-3'-phosphate
  modified_base 17: mod_base = OTHER; note = 2'-O-methylguanosine-3'-phosphate
  modified_base 18: mod_base = OTHER; note = 2'-O-methyluridine-3'-phosphate
  modified_base 19: mod_base = OTHER; note = 2'-O-methyladenosine-3'-phosphate
  modified_base 20: mod_base = OTHER; note = 2'-O-methyluridine-3'-phosphate
  modified_base 21: mod_base = OTHER; note = 2'-O-methyluridine-3'-phosphate N-[tris(GalNAc-alkyl)-amidodecanoyl)]-4-hydroxyprolinol (Hyp-(GalNAc-alkyl)3)
gcattgccttcggtttgtatt

SEQ ID NO: 841 - RNA, 21 nt, synthetic construct
  source 1..21: mol_type = other RNA
  modified_base 1: mod_base = OTHER; note = 2'-O-methylcytidine-3'-phosphorothioate
  modified_base 2: mod_base = OTHER; note = 2'-O-methyladenosine-3'-phosphorothioate
  modified_base 3: mod_base = OTHER; note = 2'-O-methyluridine-3'-phosphate
  modified_base 4: mod_base = OTHER; note = 2'-O-methyluridine-3'-phosphate
  modified_base 5: mod_base = OTHER; note = 2'-O-methylguanosine-3'-phosphate
  modified_base 6: mod_base = OTHER; note = 2'-O-methylcytidine-3'-phosphate
  modified_base 7: mod_base = OTHER; note = 2'-fluorocytidine-3'-phosphate
  modified_base 8: mod_base = OTHER; note = 2'-O-methyluridine-3'-phosphate
  modified_base 9: mod_base = OTHER; note = 2'-fluorouridine-3'-phosphate
  modified_base 10: mod_base = OTHER; note = 2'-fluorocytidine-3'-phosphate
  modified_base 11: mod_base = OTHER; note = 2'-fluoroguanosine-3'-phosphate
  modified_base 12: mod_base = OTHER; note = 2'-O-methylguanosine-3'-phosphate
  modified_base 13: mod_base = OTHER; note = 2'-O-methyluridine-3'-phosphate
  modified_base 14: mod_base = OTHER; note = 2'-O-methyluridine-3'-phosphate
  modified_base 15: mod_base = OTHER; note = 2'-O-methyluridine-3'-phosphate
  modified_base 16: mod_base = OTHER; note = 2'-O-methylguanosine-3'-phosphate
  modified_base 17: mod_base = OTHER; note = 2'-O-methyluridine-3'-phosphate
  modified_base 18: mod_base = OTHER; note = 2'-O-methyladenosine-3'-phosphate
  modified_base 19: mod_base = OTHER; note = 2'-O-methyluridine-3'-phosphate
  modified_base 20: mod_base = OTHER; note = 2'-O-methyluridine-3'-phosphate
  modified_base 21: mod_base = OTHER; note = 2'-O-methyluridine-3'-phosphate N-[tris(GalNAc-alkyl)-amidodecanoyl)]-4-hydroxyprolinol (Hyp-(GalNAc-alkyl)3)
cattgccttcggtttgtattt

SEQ ID NO: 842 - RNA, 21 nt, synthetic construct
  source 1..21: mol_type = other RNA
  modified_base 1: mod_base = OTHER; note = 2'-O-methyladenosine-3'-phosphorothioate
  modified_base 2: mod_base = OTHER; note = 2'-O-methyluridine-3'-phosphorothioate
  modified_base 3: mod_base = OTHER; note = 2'-O-methyluridine-3'-phosphate
  modified_base 4: mod_base = OTHER; note = 2'-O-methylguanosine-3'-phosphate
  modified_base 5: mod_base = OTHER; note = 2'-O-methylcytidine-3'-phosphate
  modified_base 6: mod_base = OTHER; note = 2'-O-methylcytidine-3'-phosphate
  modified_base 7: mod_base = OTHER; note = 2'-fluorouridine-3'-phosphate
  modified_base 8: mod_base = OTHER; note = 2'-O-methyluridine-3'-phosphate
  modified_base 9: mod_base = OTHER; note = 2'-fluorocytidine-3'-phosphate
  modified_base 10: mod_base = OTHER; note = 2'-fluoroguanosine-3'-phosphate
  modified_base 11: mod_base = OTHER; note = 2'-fluoroguanosine-3'-phosphate
  modified_base 12: mod_base = OTHER; note = 2'-O-methyluridine-3'-phosphate
  modified_base 13: mod_base = OTHER; note = 2'-O-methyluridine-3'-phosphate
  modified_base 14: mod_base = OTHER; note = 2'-O-methyluridine-3'-phosphate
  modified_base 15: mod_base = OTHER; note = 2'-O-methylguanosine-3'-phosphate
  modified_base 16: mod_base = OTHER; note = 2'-O-methyluridine-3'-phosphate
  modified_base 17: mod_base = OTHER; note = 2'-O-methyladenosine-3'-phosphate
  modified_base 18: mod_base = OTHER; note = 2'-O-methyluridine-3'-phosphate
  modified_base 19: mod_base = OTHER; note = 2'-O-methyluridine-3'-phosphate
  modified_base 20: mod_base = OTHER; note = 2'-O-methyluridine-3'-phosphate
  modified_base 21: mod_base = OTHER; note = 2'-O-methyluridine-3'-phosphate N-[tris(GalNAc-alkyl)-amidodecanoyl)]-4-hydroxyprolinol (Hyp-(GalNAc-alkyl)3)
attgccttcggtttgtatttt

SEQ ID NO: 843 - RNA, 21 nt, synthetic construct
  source 1..21: mol_type = other RNA
  modified_base 1: mod_base = OTHER; note = 2'-O-methyluridine-3'-phosphorothioate
  modified_base 2: mod_base = OTHER; note = 2'-O-methyluridine-3'-phosphorothioate
  modified_base 3: mod_base = OTHER; note = 2'-O-methylguanosine-3'-phosphate
  modified_base 4: mod_base = OTHER; note = 2'-O-methylcytidine-3'-phosphate
  modified_base 5: mod_base = OTHER; note = 2'-O-methylcytidine-3'-phosphate
  modified_base 6: mod_base = OTHER; note = 2'-O-methyluridine-3'-phosphate
  modified_base 7: mod_base = OTHER; note = 2'-fluorouridine-3'-phosphate
  modified_base 8: mod_base = OTHER; note = 2'-O-methylcytidine-3'-phosphate
  modified_base 9: mod_base = OTHER; note = 2'-fluoroguanosine-3'-phosphate
  modified_base 10: mod_base = OTHER; note = 2'-fluoroguanosine-3'-phosphate
  modified_base 11: mod_base = OTHER; note = 2'-fluorouridine-3'-phosphate
  modified_base 12: mod_base = OTHER; note = 2'-O-methyluridine-3'-phosphate
  modified_base 13: mod_base = OTHER; note = 2'-O-methyluridine-3'-phosphate
  modified_base 14: mod_base = OTHER; note = 2'-O-methylguanosine-3'-phosphate
  modified_base 15: mod_base = OTHER; note = 2'-O-methyluridine-3'-phosphate
  modified_base 16: mod_base = OTHER; note = 2'-O-methyladenosine-3'-phosphate
  modified_base 17: mod_base = OTHER; note = 2'-O-methyluridine-3'-phosphate
  modified_base 18: mod_base = OTHER; note = 2'-O-methyluridine-3'-phosphate
  modified_base 19: mod_base = OTHER; note = 2'-O-methyluridine-3'-phosphate
  modified_base 20: mod_base = OTHER; note = 2'-O-methyladenosine-3'-phosphate
  modified_base 21: mod_base = OTHER; note = 2'-O-methyluridine-3'-phosphate N-[tris(GalNAc-alkyl)-amidodecanoyl)]-4-hydroxyprolinol (Hyp-(GalNAc-alkyl)3)
ttgccttcggtttgtatttat

SEQ ID NO: 844 - RNA, 21 nt, synthetic construct
  source 1..21: mol_type = other RNA
  modified_base 1: mod_base = OTHER; note = 2'-O-methyluridine-3'-phosphorothioate
  modified_base 2: mod_base = OTHER; note = 2'-O-methylguanosine-3'-phosphorothioate
  modified_base 3: mod_base = OTHER; note = 2'-O-methylcytidine-3'-phosphate
  modified_base 4: mod_base = OTHER; note = 2'-O-methylcytidine-3'-phosphate
  modified_base 5: mod_base = OTHER; note = 2'-O-methyluridine-3'-phosphate
  modified_base 6: mod_base = OTHER; note = 2'-O-methyluridine-3'-phosphate
  modified_base 7: mod_base = OTHER; note = 2'-fluorocytidine-3'-phosphate
  modified_base 8: mod_base = OTHER; note = 2'-O-methylguanosine-3'-phosphate
  modified_base 9: mod_base = OTHER; note = 2'-fluoroguanosine-3'-phosphate
  modified_base 10: mod_base = OTHER; note = 2'-fluorouridine-3'-phosphate
  modified_base 11: mod_base = OTHER; note = 2'-fluorouridine-3'-phosphate
  modified_base 12: mod_base = OTHER; note = 2'-O-methyluridine-3'-phosphate
  modified_base 13: mod_base = OTHER; note = 2'-O-methylguanosine-3'-phosphate
  modified_base 14: mod_base = OTHER; note = 2'-O-methyluridine-3'-phosphate
  modified_base 15: mod_base = OTHER; note = 2'-O-methyladenosine-3'-phosphate
  modified_base 16: mod_base = OTHER; note = 2'-O-methyluridine-3'-phosphate
  modified_base 17: mod_base = OTHER; note = 2'-O-methyluridine-3'-phosphate
  modified_base 18: mod_base = OTHER; note = 2'-O-methyluridine-3'-phosphate
  modified_base 19: mod_base = OTHER; note = 2'-O-methyladenosine-3'-phosphate
  modified_base 20: mod_base = OTHER; note = 2'-O-methylguanosine-3'-phosphate
  modified_base 21: mod_base = OTHER; note = 2'-O-methyluridine-3'-phosphate N-[tris(GalNAc-alkyl)-amidodecanoyl)]-4-hydroxyprolinol (Hyp-(GalNAc-alkyl)3)
tgccttcggtttgtatttagt

SEQ ID NO: 845 - RNA, 21 nt, synthetic construct
  source 1..21: mol_type = other RNA
  modified_base 1: mod_base = OTHER; note = 2'-O-methylguanosine-3'-phosphorothioate
  modified_base 2: mod_base = OTHER; note = 2'-O-methylcytidine-3'-phosphorothioate
  modified_base 3: mod_base = OTHER; note = 2'-O-methylcytidine-3'-phosphate
  modified_base 4: mod_base = OTHER; note = 2'-O-methyluridine-3'-phosphate
  modified_base 5: mod_base = OTHER; note = 2'-O-methyluridine-3'-phosphate
  modified_base 6: mod_base = OTHER; note = 2'-O-methylcytidine-3'-phosphate
  modified_base 7: mod_base = OTHER; note = 2'-fluoroguanosine-3'-phosphate
  modified_base 8: mod_base = OTHER; note = 2'-O-methylguanosine-3'-phosphate
  modified_base 9: mod_base = OTHER; note = 2'-fluorouridine-3'-phosphate
  modified_base 10: mod_base = OTHER; note = 2'-fluorouridine-3'-phosphate
  modified_base 11: mod_base = OTHER; note = 2'-fluorouridine-3'-phosphate
  modified_base 12: mod_base = OTHER; note = 2'-O-methylguanosine-3'-phosphate
  modified_base 13: mod_base = OTHER; note = 2'-O-methyluridine-3'-phosphate
  modified_base 14: mod_base = OTHER; note = 2'-O-methyladenosine-3'-phosphate
  modified_base 15: mod_base = OTHER; note = 2'-O-methyluridine-3'-phosphate
  modified_base 16: mod_base = OTHER; note = 2'-O-methyluridine-3'-phosphate
  modified_base 17: mod_base = OTHER; note = 2'-O-methyluridine-3'-phosphate
  modified_base 18: mod_base = OTHER; note = 2'-O-methyladenosine-3'-phosphate
  modified_base 19: mod_base = OTHER; note = 2'-O-methylguanosine-3'-phosphate
  modified_base 20: mod_base = OTHER; note = 2'-O-methyluridine-3'-phosphate
  modified_base 21: mod_base = OTHER; note = 2'-O-methyluridine-3'-phosphate N-[tris(GalNAc-alkyl)-amidodecanoyl)]-4-hydroxyprolinol (Hyp-(GalNAc-alkyl)3)
gccttcggtttgtatttagtt

SEQ ID NO: 846 - RNA, 21 nt, synthetic construct
  source 1..21: mol_type = other RNA
  modified_base 1: mod_base = OTHER; note = 2'-O-methylcytidine-3'-phosphorothioate
  modified_base 2: mod_base = OTHER; note = 2'-O-methylcytidine-3'-phosphorothioate
  modified_base 3: mod_base = OTHER; note = 2'-O-methyluridine-3'-phosphate
  modified_base 4: mod_base = OTHER; note = 2'-O-methyluridine-3'-phosphate
  modified_base 5: mod_base = OTHER; note = 2'-O-methylcytidine-3'-phosphate
  modified_base 6: mod_base = OTHER; note = 2'-O-methylguanosine-3'-phosphate
  modified_base 7: mod_base = OTHER; note = 2'-fluoroguanosine-3'-phosphate
  modified_base 8: mod_base = OTHER; note = 2'-O-methyluridine-3'-phosphate
  modified_base 9: mod_base = OTHER; note = 2'-fluorouridine-3'-phosphate
  modified_base 10: mod_base = OTHER; note = 2'-fluorouridine-3'-phosphate
  modified_base 11: mod_base = OTHER; note = 2'-fluoroguanosine-3'-phosphate
  modified_base 12: mod_base = OTHER; note = 2'-O-methyluridine-3'-phosphate
  modified_base 13: mod_base = OTHER; note = 2'-O-methyladenosine-3'-phosphate
  modified_base 14: mod_base = OTHER; note = 2'-O-methyluridine-3'-phosphate
  modified_base 15: mod_base = OTHER; note = 2'-O-methyluridine-3'-phosphate
  modified_base 16: mod_base = OTHER; note = 2'-O-methyluridine-3'-phosphate
  modified_base 17: mod_base = OTHER; note = 2'-O-methyladenosine-3'-phosphate
  modified_base 18: mod_base = OTHER; note = 2'-O-methylguanosine-3'-phosphate
  modified_base 19: mod_base = OTHER; note = 2'-O-methyluridine-3'-phosphate
  modified_base 20: mod_base = OTHER; note = 2'-O-methylguanosine-3'-phosphate
  modified_base 21: mod_base = OTHER; note = 2'-O-methyluridine-3'-phosphate N-[tris(GalNAc-alkyl)-amidodecanoyl)]-4-hydroxyprolinol (Hyp-(GalNAc-alkyl)3)
ccttcggtttgtatttagtgt

SEQ ID NO: 847 - RNA, 21 nt, synthetic construct
  source 1..21: mol_type = other RNA
  modified_base 1: mod_base = OTHER; note = 2'-O-methylcytidine-3'-phosphorothioate
  modified_base 2: mod_base = OTHER; note = 2'-O-methyluridine-3'-phosphorothioate
  modified_base 3: mod_base = OTHER; note = 2'-O-methyluridine-3'-phosphate
  modified_base 4: mod_base = OTHER; note = 2'-O-methylcytidine-3'-phosphate
  modified_base 5: mod_base = OTHER; note = 2'-O-methylguanosine-3'-phosphate
  modified_base 6: mod_base = OTHER; note = 2'-O-methylguanosine-3'-phosphate
  modified_base 7: mod_base = OTHER; note = 2'-fluorouridine-3'-phosphate
  modified_base 8: mod_base = OTHER; note = 2'-O-methyluridine-3'-phosphate
  modified_base 9: mod_base = OTHER; note = 2'-fluorouridine-3'-phosphate
  modified_base 10: mod_base = OTHER; note = 2'-fluoroguanosine-3'-phosphate
  modified_base 11: mod_base = OTHER; note = 2'-fluorouridine-3'-phosphate
  modified_base 12: mod_base = OTHER; note = 2'-O-methyladenosine-3'-phosphate
  modified_base 13: mod_base = OTHER; note = 2'-O-methyluridine-3'-phosphate
  modified_base 14: mod_base = OTHER; note = 2'-O-methyluridine-3'-phosphate
  modified_base 15: mod_base = OTHER; note = 2'-O-methyluridine-3'-phosphate
  modified_base 16: mod_base = OTHER; note = 2'-O-methyladenosine-3'-phosphate
  modified_base 17: mod_base = OTHER; note = 2'-O-methylguanosine-3'-phosphate
  modified_base 18: mod_base = OTHER; note = 2'-O-methyluridine-3'-phosphate
  modified_base 19: mod_base = OTHER; note = 2'-O-methylguanosine-3'-phosphate
  modified_base 20: mod_base = OTHER; note = 2'-O-methyluridine-3'-phosphate
  modified_base 21: mod_base = OTHER; note = 2'-O-methyluridine-3'-phosphate N-[tris(GalNAc-alkyl)-amidodecanoyl)]-4-hydroxyprolinol (Hyp-(GalNAc-alkyl)3)
cttcggtttgtatttagtgtt

SEQ ID NO: 848 - RNA, 21 nt, synthetic construct
  source 1..21: mol_type = other RNA
  modified_base 1: mod_base = OTHER; note = 2'-O-methylguanosine-3'-phosphorothioate
  modified_base 2: mod_base = OTHER; note = 2'-O-methylguanosine-3'-phosphorothioate
  modified_base 3: mod_base = OTHER; note = 2'-O-methyluridine-3'-phosphate
  modified_base 4: mod_base = OTHER; note = 2'-O-methyluridine-3'-phosphate
  modified_base 5: mod_base = OTHER; note = 2'-O-methyluridine-3'-phosphate
  modified_base 6: mod_base = OTHER; note = 2'-O-methylguanosine-3'-phosphate
  modified_base 7: mod_base = OTHER; note = 2'-fluorouridine-3'-phosphate
  modified_base 8: mod_base = OTHER; note = 2'-O-methyladenosine-3'-phosphate
  modified_base 9: mod_base = OTHER; note = 2'-fluorouridine-3'-phosphate
  modified_base 10: mod_base = OTHER; note = 2'-fluorouridine-3'-phosphate
  modified_base 11: mod_base = OTHER; note = 2'-fluorouridine-3'-phosphate
  modified_base 12: mod_base = OTHER; note = 2'-O-methyladenosine-3'-phosphate
  modified_base 13: mod_base = OTHER; note = 2'-O-methylguanosine-3'-phosphate
  modified_base 14: mod_base = OTHER; note = 2'-O-methyluridine-3'-phosphate
  modified_base 15: mod_base = OTHER; note = 2'-O-methylguanosine-3'-phosphate
  modified_base 16: mod_base = OTHER; note = 2'-O-methyluridine-3'-phosphate
  modified_base 17: mod_base = OTHER; note = 2'-O-methylcytidine-3'-phosphate
  modified_base 18: mod_base = OTHER; note = 2'-O-methyluridine-3'-phosphate
  modified_base 19: mod_base = OTHER; note = 2'-O-methyluridine-3'-phosphate
  modified_base 20: mod_base = OTHER; note = 2'-O-methylguanosine-3'-phosphate
  modified_base 21: mod_base = OTHER; note = 2'-O-methyluridine-3'-phosphate N-[tris(GalNAc-alkyl)-amidodecanoyl)]-4-hydroxyprolinol (Hyp-(GalNAc-alkyl)3)
ggtttgtatttagtgtcttgt

SEQ ID NO: 849 - RNA, 21 nt, synthetic construct
  source 1..21: mol_type = other RNA
  modified_base 1: mod_base = OTHER; note = 2'-O-methyluridine-3'-phosphorothioate
  modified_base 2: mod_base = OTHER; note = 2'-O-methylguanosine-3'-phosphorothioate
  modified_base 3: mod_base = OTHER; note = 2'-O-methyluridine-3'-phosphate
  modified_base 4: mod_base = OTHER; note = 2'-O-methyladenosine-3'-phosphate
  modified_base 5: mod_base = OTHER; note = 2'-O-methyluridine-3'-phosphate
  modified_base 6: mod_base = OTHER; note = 2'-O-methyluridine-3'-phosphate
  modified_base 7: mod_base = OTHER; note = 2'-fluorouridine-3'-phosphate
  modified_base 8: mod_base = OTHER; note = 2'-O-methyladenosine-3'-phosphate
  modified_base 9: mod_base = OTHER; note = 2'-fluoroguanosine-3'-phosphate
  modified_base 10: mod_base = OTHER; note = 2'-fluorouridine-3'-phosphate
  modified_base 11: mod_base = OTHER; note = 2'-fluoroguanosine-3'-phosphate
  modified_base 12: mod_base = OTHER; note = 2'-O-methyluridine-3'-phosphate
  modified_base 13: mod_base = OTHER; note = 2'-O-methylcytidine-3'-phosphate
  modified_base 14: mod_base = OTHER; note = 2'-O-methyluridine-3'-phosphate
  modified_base 15: mod_base = OTHER; note = 2'-O-methyluridine-3'-phosphate
  modified_base 16: mod_base = OTHER; note = 2'-O-methylguanosine-3'-phosphate
  modified_base 17: mod_base = OTHER; note = 2'-O-methyladenosine-3'-phosphate
  modified_base 18: mod_base = OTHER; note = 2'-O-methyladenosine-3'-phosphate
  modified_base 19: mod_base = OTHER; note = 2'-O-methyluridine-3'-phosphate
  modified_base 20: mod_base = OTHER; note = 2'-O-methylguanosine-3'-phosphate
  modified_base 21: mod_base = OTHER; note = 2'-O-methyluridine-3'-phosphate N-[tris(GalNAc-alkyl)-amidodecanoyl)]-4-hydroxyprolinol (Hyp-(GalNAc-alkyl)3)
tgtatttagtgtcttgaatgt

SEQ ID NO: 850 - RNA, 21 nt, synthetic construct
  source 1..21: mol_type = other RNA
  modified_base 1: mod_base = OTHER; note = 2'-O-methyluridine-3'-phosphorothioate
  modified_base 2: mod_base = OTHER; note = 2'-O-methyladenosine-3'-phosphorothioate
  modified_base 3: mod_base = OTHER; note = 2'-O-methyluridine-3'-phosphate
  modified_base 4: mod_base = OTHER; note = 2'-O-methyluridine-3'-phosphate
  modified_base 5: mod_base = OTHER; note = 2'-O-methyluridine-3'-phosphate
  modified_base 6: mod_base = OTHER; note = 2'-O-methyladenosine-3'-phosphate
  modified_base 7: mod_base = OTHER; note = 2'-fluoroguanosine-3'-phosphate
  modified_base 8: mod_base = OTHER; note = 2'-O-methyluridine-3'-phosphate
  modified_base 9: mod_base = OTHER; note = 2'-fluoroguanosine-3'-phosphate
  modified_base 10: mod_base = OTHER; note = 2'-fluorouridine-3'-phosphate
  modified_base 11: mod_base = OTHER; note = 2'-fluorocytidine-3'-phosphate
  modified_base 12: mod_base = OTHER; note = 2'-O-methyluridine-3'-phosphate
  modified_base 13: mod_base = OTHER; note = 2'-O-methyluridine-3'-phosphate
  modified_base 14: mod_base = OTHER; note = 2'-O-methylguanosine-3'-phosphate
  modified_base 15: mod_base = OTHER; note = 2'-O-methyladenosine-3'-phosphate
  modified_base 16: mod_base = OTHER; note = 2'-O-methyladenosine-3'-phosphate
  modified_base 17: mod_base = OTHER; note = 2'-O-methyluridine-3'-phosphate
  modified_base 18: mod_base = OTHER; note = 2'-O-methylguanosine-3'-phosphate
  modified_base 19: mod_base = OTHER; note = 2'-O-methyluridine-3'-phosphate
  modified_base 20: mod_base = OTHER; note = 2'-O-methyladenosine-3'-phosphate
  modified_base 21: mod_base = OTHER; note = 2'-O-methyluridine-3'-phosphate N-[tris(GalNAc-alkyl)-amidodecanoyl)]-4-hydroxyprolinol (Hyp-(GalNAc-alkyl)3)
tatttagtgtcttgaatgtat

SEQ ID NO: 851 - RNA, 21 nt, synthetic construct
  source 1..21: mol_type = other RNA
  modified_base 1: mod_base = OTHER; note = 2'-O-methyluridine-3'-phosphorothioate
  modified_base 2: mod_base = OTHER; note = 2'-O-methyluridine-3'-phosphorothioate
  modified_base 3: mod_base = OTHER; note = 2'-O-methyluridine-3'-phosphate
  modified_base 4: mod_base = OTHER; note = 2'-O-methyladenosine-3'-phosphate
  modified_base 5: mod_base = OTHER; note = 2'-O-methylguanosine-3'-phosphate
  modified_base 6: mod_base = OTHER; note = 2'-O-methyluridine-3'-phosphate
  modified_base 7: mod_base = OTHER; note = 2'-fluoroguanosine-3'-phosphate
  modified_base 8: mod_base = OTHER; note = 2'-O-methyluridine-3'-phosphate
  modified_base 9: mod_base = OTHER; note = 2'-fluorocytidine-3'-phosphate
  modified_base 10: mod_base = OTHER; note = 2'-fluorouridine-3'-phosphate
  modified_base 11: mod_base = OTHER; note = 2'-fluorouridine-3'-phosphate
  modified_base 12: mod_base = OTHER; note = 2'-O-methylguanosine-3'-phosphate
  modified_base 13: mod_base = OTHER; note = 2'-O-methyladenosine-3'-phosphate
  modified_base 14: mod_base = OTHER; note = 2'-O-methyladenosine-3'-phosphate
  modified_base 15: mod_base = OTHER; note = 2'-O-methyluridine-3'-phosphate
  modified_base 16: mod_base = OTHER; note = 2'-O-methylguanosine-3'-phosphate
  modified_base 17: mod_base = OTHER; note = 2'-O-methyluridine-3'-phosphate
  modified_base 18: mod_base = OTHER; note = 2'-O-methyladenosine-3'-phosphate
  modified_base 19: mod_base = OTHER; note = 2'-O-methyladenosine-3'-phosphate
  modified_base 20: mod_base = OTHER; note = 2'-O-methylguanosine-3'-phosphate
  modified_base 21: mod_base = OTHER; note = 2'-O-methyluridine-3'-phosphate N-[tris(GalNAc-alkyl)-amidodecanoyl)]-4-hydroxyprolinol (Hyp-(GalNAc-alkyl)3)
tttagtgtcttgaatgtaagt

SEQ ID NO: 852 - RNA, 21 nt, synthetic construct
  source 1..21: mol_type = other RNA
  modified_base 1: mod_base = OTHER; note = 2'-O-methylguanosine-3'-phosphorothioate
  modified_base 2: mod_base = OTHER; note = 2'-O-methyluridine-3'-phosphorothioate
  modified_base 3: mod_base = OTHER; note = 2'-O-methylcytidine-3'-phosphate
  modified_base 4: mod_base = OTHER; note = 2'-O-methyluridine-3'-phosphate
  modified_base 5: mod_base = OTHER; note = 2'-O-methyluridine-3'-phosphate
  modified_base 6: mod_base = OTHER; note = 2'-O-methylguanosine-3'-phosphate
  modified_base 7: mod_base = OTHER; note = 2'-fluoroadenosine-3'-phosphate
  modified_base 8: mod_base = OTHER; note = 2'-O-methyladenosine-3'-phosphate
  modified_base 9: mod_base = OTHER; note = 2'-fluorouridine-3'-phosphate
  modified_base 10: mod_base = OTHER; note = 2'-fluoroguanosine-3'-phosphate
  modified_base 11: mod_base = OTHER; note = 2'-fluorouridine-3'-phosphate
  modified_base 12: mod_base = OTHER; note = 2'-O-methyladenosine-3'-phosphate
  modified_base 13: mod_base = OTHER; note = 2'-O-methyladenosine-3'-phosphate
  modified_base 14: mod_base = OTHER; note = 2'-O-methylguanosine-3'-phosphate
  modified_base 15: mod_base = OTHER; note = 2'-O-methyladenosine-3'-phosphate
  modified_base 16: mod_base = OTHER; note = 2'-O-methyladenosine-3'-phosphate
  modified_base 17: mod_base = OTHER; note = 2'-O-methylcytidine-3'-phosphate
  modified_base 18: mod_base = OTHER; note = 2'-O-methyladenosine-3'-phosphate
  modified_base 19: mod_base = OTHER; note = 2'-O-methyluridine-3'-phosphate
  modified_base 20: mod_base = OTHER; note = 2'-O-methylguanosine-3'-phosphate
  modified_base 21: mod_base = OTHER; note = 2'-O-methyluridine-3'-phosphate N-[tris(GalNAc-alkyl)-amidodecanoyl)]-4-hydroxyprolinol (Hyp-(GalNAc-alkyl)3)
gtcttgaatgtaagaacatgt

SEQ ID NO: 853 - RNA, 21 nt, synthetic construct
  source 1..21: mol_type = other RNA
  modified_base 1: mod_base = OTHER; note = 2'-O-methylguanosine-3'-phosphorothioate
  modified_base 2: mod_base = OTHER; note = 2'-O-methyluridine-3'-phosphorothioate
  modified_base 3: mod_base = OTHER; note = 2'-O-methyladenosine-3'-phosphate
  modified_base 4: mod_base = OTHER; note = 2'-O-methyladenosine-3'-phosphate
  modified_base 5: mod_base = OTHER; note = 2'-O-methylguanosine-3'-phosphate
  modified_base 6: mod_base = OTHER; note = 2'-O-methyladenosine-3'-phosphate
  modified_base 7: mod_base = OTHER; note = 2'-fluoroadenosine-3'-phosphate
  modified_base 8: mod_base = OTHER; note = 2'-O-methylcytidine-3'-phosphate
  modified_base 9: mod_base = OTHER; note = 2'-fluoroadenosine-3'-phosphate
  modified_base 10: mod_base = OTHER; note = 2'-fluorouridine-3'-phosphate
  modified_base 11: mod_base = OTHER; note = 2'-fluoroguanosine-3'-phosphate
  modified_base 12: mod_base = OTHER; note = 2'-O-methyladenosine-3'-phosphate
  modified_base 13: mod_base = OTHER; note = 2'-O-methylcytidine-3'-phosphate
  modified_base 14: mod_base = OTHER; note = 2'-O-methylcytidine-3'-phosphate
  modified_base 15: mod_base = OTHER; note = 2'-O-methyluridine-3'-phosphate
  modified_base 16: mod_base = OTHER; note = 2'-O-methylcytidine-3'-phosphate
  modified_base 17: mod_base = OTHER; note = 2'-O-methylcytidine-3'-phosphate
  modified_base 18: mod_base = OTHER; note = 2'-O-methylguanosine-3'-phosphate
  modified_base 19: mod_base = OTHER; note = 2'-O-methyluridine-3'-phosphate
  modified_base 20: mod_base = OTHER; note = 2'-O-methylguanosine-3'-phosphate
  modified_base 21: mod_base = OTHER; note = 2'-O-methyluridine-3'-phosphate N-[tris(GalNAc-alkyl)-amidodecanoyl)]-4-hydroxyprolinol (Hyp-(GalNAc-alkyl)3)
gtaagaacatgacctccgtgt

SEQ ID NO: 854 - RNA, 21 nt, synthetic construct
  source 1..21: mol_type = other RNA
  modified_base 1: mod_base = OTHER; note = 2'-O-methyluridine-3'-phosphorothioate
  modified_base 2: mod_base = OTHER; note = 2'-O-methyladenosine-3'-phosphorothioate
  modified_base 3: mod_base = OTHER; note = 2'-O-methyladenosine-3'-phosphate
  modified_base 4: mod_base = OTHER; note = 2'-O-methylguanosine-3'-phosphate
  modified_base 5: mod_base = OTHER; note = 2'-O-methyladenosine-3'-phosphate
  modified_base 6: mod_base = OTHER; note = 2'-O-methyladenosine-3'-phosphate
  modified_base 7: mod_base = OTHER; note = 2'-fluorocytidine-3'-phosphate
  modified_base 8: mod_base = OTHER; note = 2'-O-methyladenosine-3'-phosphate
  modified_base 9: mod_base = OTHER; note = 2'-fluorouridine-3'-phosphate
  modified_base 10: mod_base = OTHER; note = 2'-fluoroguanosine-3'-phosphate
  modified_base 11: mod_base = OTHER; note = 2'-fluoroadenosine-3'-phosphate
  modified_base 12: mod_base = OTHER; note = 2'-O-methylcytidine-3'-phosphate
  modified_base 13: mod_base = OTHER; note = 2'-O-methylcytidine-3'-phosphate
  modified_base 14: mod_base = OTHER; note = 2'-O-methyluridine-3'-phosphate
  modified_base 15: mod_base = OTHER; note = 2'-O-methylcytidine-3'-phosphate
  modified_base 16: mod_base = OTHER; note = 2'-O-methylcytidine-3'-phosphate
  modified_base 17: mod_base = OTHER; note = 2'-O-methylguanosine-3'-phosphate
  modified_base 18: mod_base = OTHER; note = 2'-O-methyluridine-3'-phosphate
  modified_base 19: mod_base = OTHER; note = 2'-O-methylguanosine-3'-phosphate
  modified_base 20: mod_base = OTHER; note = 2'-O-methyluridine-3'-phosphate
  modified_base 21: mod_base = OTHER; note = 2'-O-methyluridine-3'-phosphate N-[tris(GalNAc-alkyl)-amidodecanoyl)]-4-hydroxyprolinol (Hyp-(GalNAc-alkyl)3)
taagaacatgacctccgtgtt

SEQ ID NO: 855 - RNA, 21 nt, synthetic construct
  source 1..21: mol_type = other RNA
  modified_base 1: mod_base = OTHER; note = 2'-O-methyladenosine-3'-phosphorothioate
  modified_base 2: mod_base = OTHER; note = 2'-O-methyladenosine-3'-phosphorothioate
  modified_base 3: mod_base = OTHER; note = 2'-O-methylguanosine-3'-phosphate
  modified_base 4: mod_base = OTHER; note = 2'-O-methyladenosine-3'-phosphate
  modified_base 5: mod_base = OTHER; note = 2'-O-methyladenosine-3'-phosphate
  modified_base 6: mod_base = OTHER; note = 2'-O-methylcytidine-3'-phosphate
  modified_base 7: mod_base = OTHER; note = 2'-fluoroadenosine-3'-phosphate
  modified_base 8: mod_base = OTHER; note = 2'-O-methyluridine-3'-phosphate
  modified_base 9: mod_base = OTHER; note = 2'-fluoroguanosine-3'-phosphate
  modified_base 10: mod_base = OTHER; note = 2'-fluoroadenosine-3'-phosphate
  modified_base 11: mod_base = OTHER; note = 2'-fluorocytidine-3'-phosphate
  modified_base 12: mod_base = OTHER; note = 2'-O-methylcytidine-3'-phosphate
  modified_base 13: mod_base = OTHER; note = 2'-O-methyluridine-3'-phosphate
  modified_base 14: mod_base = OTHER; note = 2'-O-methylcytidine-3'-phosphate
  modified_base 15: mod_base = OTHER; note = 2'-O-methylcytidine-3'-phosphate
  modified_base 16: mod_base = OTHER; note = 2'-O-methylguanosine-3'-phosphate
  modified_base 17: mod_base = OTHER; note = 2'-O-methyluridine-3'-phosphate
  modified_base 18: mod_base = OTHER; note = 2'-O-methylguanosine-3'-phosphate
  modified_base 19: mod_base = OTHER; note = 2'-O-methyluridine-3'-phosphate
  modified_base 20: mod_base = OTHER; note = 2'-O-methyladenosine-3'-phosphate
  modified_base 21: mod_base = OTHER; note = 2'-O-methyluridine-3'-phosphate N-[tris(GalNAc-alkyl)-amidodecanoyl)]-4-hydroxyprolinol (Hyp-(GalNAc-alkyl)3)
aagaacatgacctccgtgtat

SEQ ID NO: 856 - RNA, 21 nt, synthetic construct
  source 1..21: mol_type = other RNA
  modified_base 1: mod_base = OTHER; note = 2'-O-methyladenosine-3'-phosphorothioate
  modified_base 2: mod_base = OTHER; note = 2'-O-methylguanosine-3'-phosphorothioate
  modified_base 3: mod_base = OTHER; note = 2'-O-methyladenosine-3'-phosphate
  modified_base 4: mod_base = OTHER; note = 2'-O-methyladenosine-3'-phosphate
  modified_base 5: mod_base = OTHER; note = 2'-O-methylcytidine-3'-phosphate
  modified_base 6: mod_base = OTHER; note = 2'-O-methyladenosine-3'-phosphate
  modified_base 7: mod_base = OTHER; note = 2'-fluorouridine-3'-phosphate
  modified_base 8: mod_base = OTHER; note = 2'-O-methylguanosine-3'-phosphate
  modified_base 9: mod_base = OTHER; note = 2'-fluoroadenosine-3'-phosphate
  modified_base 10: mod_base = OTHER; note = 2'-fluorocytidine-3'-phosphate
  modified_base 11: mod_base = OTHER; note = 2'-fluorocytidine-3'-phosphate
  modified_base 12: mod_base = OTHER; note = 2'-O-methyluridine-3'-phosphate
  modified_base 13: mod_base = OTHER; note = 2'-O-methylcytidine-3'-phosphate
  modified_base 14: mod_base = OTHER; note = 2'-O-methylcytidine-3'-phosphate
  modified_base 15: mod_base = OTHER; note = 2'-O-methylguanosine-3'-phosphate
  modified_base 16: mod_base = OTHER; note = 2'-O-methyluridine-3'-phosphate
  modified_base 17: mod_base = OTHER; note = 2'-O-methylguanosine-3'-phosphate
  modified_base 18: mod_base = OTHER; note = 2'-O-methyluridine-3'-phosphate
  modified_base 19: mod_base = OTHER; note = 2'-O-methyladenosine-3'-phosphate
  modified_base 20: mod_base = OTHER; note = 2'-O-methylguanosine-3'-phosphate
  modified_base 21: mod_base = OTHER; note = 2'-O-methyluridine-3'-phosphate N-[tris(GalNAc-alkyl)-amidodecanoyl)]-4-hydroxyprolinol (Hyp-(GalNAc-alkyl)3)
agaacatgacctccgtgtagt

SEQ ID NO: 857 - RNA, 21 nt, synthetic construct
  source 1..21: mol_type = other RNA
  modified_base 1: mod_base = OTHER; note = 2'-O-methylguanosine-3'-phosphorothioate
  modified_base 2: mod_base = OTHER; note = 2'-O-methyladenosine-3'-phosphorothioate
  modified_base 3: mod_base = OTHER; note = 2'-O-methyladenosine-3'-phosphate
  modified_base 4: mod_base = OTHER; note = 2'-O-methylcytidine-3'-phosphate
  modified_base 5: mod_base = OTHER; note = 2'-O-methyladenosine-3'-phosphate
  modified_base 6: mod_base = OTHER; note = 2'-O-methyluridine-3'-phosphate
  modified_base 7: mod_base = OTHER; note = 2'-fluoroguanosine-3'-phosphate
  modified_base 8: mod_base = OTHER; note = 2'-O-methyladenosine-3'-phosphate
  modified_base 9: mod_base = OTHER; note = 2'-fluorocytidine-3'-phosphate
  modified_base 10: mod_base = OTHER; note = 2'-fluorocytidine-3'-phosphate
  modified_base 11: mod_base = OTHER; note = 2'-fluorouridine-3'-phosphate
  modified_base 12: mod_base = OTHER; note = 2'-O-methylcytidine-3'-phosphate
  modified_base 13: mod_base = OTHER; note = 2'-O-methylcytidine-3'-phosphate
  modified_base 14: mod_base = OTHER; note = 2'-O-methylguanosine-3'-phosphate
  modified_base 15: mod_base = OTHER; note = 2'-O-methyluridine-3'-phosphate
  modified_base 16: mod_base = OTHER; note = 2'-O-methylguanosine-3'-phosphate
  modified_base 17: mod_base = OTHER; note = 2'-O-methyluridine-3'-phosphate
  modified_base 18: mod_base = OTHER; note = 2'-O-methyladenosine-3'-phosphate
  modified_base 19: mod_base = OTHER; note = 2'-O-methylguanosine-3'-phosphate
  modified_base 20: mod_base = OTHER; note = 2'-O-methyluridine-3'-phosphate
  modified_base 21: mod_base = OTHER; note = 2'-O-methyluridine-3'-phosphate N-[tris(GalNAc-alkyl)-amidodecanoyl)]-4-hydroxyprolinol (Hyp-(GalNAc-alkyl)3)
gaacatgacctccgtgtagtt

SEQ ID NO: 858 - RNA, 21 nt, synthetic construct
  source 1..21: mol_type = other RNA
  modified_base 1: mod_base = OTHER; note = 2'-O-methyladenosine-3'-phosphorothioate
  modified_base 2: mod_base = OTHER; note = 2'-O-methyladenosine-3'-phosphorothioate
  modified_base 3: mod_base = OTHER; note = 2'-O-methylcytidine-3'-phosphate
  modified_base 4: mod_base = OTHER; note = 2'-O-methyladenosine-3'-phosphate
  modified_base 5: mod_base = OTHER; note = 2'-O-methyluridine-3'-phosphate
  modified_base 6: mod_base = OTHER; note = 2'-O-methylguanosine-3'-phosphate
  modified_base 7: mod_base = OTHER; note = 2'-fluoroadenosine-3'-phosphate
  modified_base 8: mod_base = OTHER; note = 2'-O-methylcytidine-3'-phosphate
  modified_base 9: mod_base = OTHER; note = 2'-fluorocytidine-3'-phosphate
  modified_base 10: mod_base = OTHER; note = 2'-fluorouridine-3'-phosphate
  modified_base 11: mod_base = OTHER; note = 2'-fluorocytidine-3'-phosphate
  modified_base 12: mod_base = OTHER; note = 2'-O-methylcytidine-3'-phosphate
  modified_base 13: mod_base = OTHER; note = 2'-O-methylguanosine-3'-phosphate
  modified_base 14: mod_base = OTHER; note = 2'-O-methyluridine-3'-phosphate
  modified_base 15: mod_base = OTHER; note = 2'-O-methylguanosine-3'-phosphate
  modified_base 16: mod_base = OTHER; note = 2'-O-methyluridine-3'-phosphate
  modified_base 17: mod_base = OTHER; note = 2'-O-methyladenosine-3'-phosphate
  modified_base 18: mod_base = OTHER; note = 2'-O-methylguanosine-3'-phosphate
  modified_base 19: mod_base = OTHER; note = 2'-O-methyluridine-3'-phosphate
  modified_base 20: mod_base = OTHER; note = 2'-O-methylguanosine-3'-phosphate
  modified_base 21: mod_base = OTHER; note = 2'-O-methyluridine-3'-phosphate N-[tris(GalNAc-alkyl)-amidodecanoyl)]-4-hydroxyprolinol (Hyp-(GalNAc-alkyl)3)
aacatgacctccgtgtagtgt

SEQ ID NO: 859 - RNA, 21 nt, synthetic construct
  source 1..21: mol_type = other RNA
  modified_base 1: mod_base = OTHER; note = 2'-O-methyladenosine-3'-phosphorothioate
  modified_base 2: mod_base = OTHER; note = 2'-O-methylcytidine-3'-phosphorothioate
  modified_base 3: mod_base = OTHER; note = 2'-O-methyladenosine-3'-phosphate
  modified_base 4: mod_base = OTHER; note = 2'-O-methyluridine-3'-phosphate
  modified_base 5: mod_base = OTHER; note = 2'-O-methylguanosine-3'-phosphate
  modified_base 6: mod_base = OTHER; note = 2'-O-methyladenosine-3'-phosphate
  modified_base 7: mod_base = OTHER; note = 2'-fluorocytidine-3'-phosphate
  modified_base 8: mod_base = OTHER; note = 2'-O-methylcytidine-3'-phosphate
  modified_base 9: mod_base = OTHER; note = 2'-fluorouridine-3'-phosphate
  modified_base 10: mod_base = OTHER; note = 2'-fluorocytidine-3'-phosphate
  modified_base 11: mod_base = OTHER; note = 2'-fluorocytidine-3'-phosphate
  modified_base 12: mod_base = OTHER; note = 2'-O-methylguanosine-3'-phosphate
  modified_base 13: mod_base = OTHER; note = 2'-O-methyluridine-3'-phosphate
  modified_base 14: mod_base = OTHER; note = 2'-O-methylguanosine-3'-phosphate
  modified_base 15: mod_base = OTHER; note = 2'-O-methyluridine-3'-phosphate
  modified_base 16: mod_base = OTHER; note = 2'-O-methyladenosine-3'-phosphate
  modified_base 17: mod_base = OTHER; note = 2'-O-methylguanosine-3'-phosphate
  modified_base 18: mod_base = OTHER; note = 2'-O-methyluridine-3'-phosphate
  modified_base 19: mod_base = OTHER; note = 2'-O-methylguanosine-3'-phosphate
  modified_base 20: mod_base = OTHER; note = 2'-O-methyluridine-3'-phosphate
  modified_base 21: mod_base = OTHER; note = 2'-O-methyluridine-3'-phosphate N-[tris(GalNAc-alkyl)-amidodecanoyl)]-4-hydroxyprolinol (Hyp-(GalNAc-alkyl)3)
acatgacctccgtgtagtgtt

SEQ ID NO: 860 - RNA, 21 nt, synthetic construct
  source 1..21: mol_type = other RNA
  modified_base 1: mod_base = OTHER; note = 2'-O-methyluridine-3'-phosphorothioate
  modified_base 2: mod_base = OTHER; note = 2'-O-methylguanosine-3'-phosphorothioate
  modified_base 3: mod_base = OTHER; note = 2'-O-methyladenosine-3'-phosphate
  modified_base 4: mod_base = OTHER; note = 2'-O-methylcytidine-3'-phosphate
  modified_base 5: mod_base = OTHER; note = 2'-O-methylcytidine-3'-phosphate
  modified_base 6: mod_base = OTHER; note = 2'-O-methyluridine-3'-phosphate
  modified_base 7: mod_base = OTHER; note = 2'-fluorocytidine-3'-phosphate
  modified_base 8: mod_base = OTHER; note = 2'-O-methylcytidine-3'-phosphate
  modified_base 9: mod_base = OTHER; note = 2'-fluoroguanosine-3'-phosphate
  modified_base 10: mod_base = OTHER; note = 2'-fluorouridine-3'-phosphate
  modified_base 11: mod_base = OTHER; note = 2'-fluoroguanosine-3'-phosphate
  modified_base 12: mod_base = OTHER; note = 2'-O-methyluridine-3'-phosphate
  modified_base 13: mod_base = OTHER; note = 2'-O-methyladenosine-3'-phosphate
  modified_base 14: mod_base = OTHER; note = 2'-O-methylguanosine-3'-phosphate
  modified_base 15: mod_base = OTHER; note = 2'-O-methyluridine-3'-phosphate
  modified_base 16: mod_base = OTHER; note = 2'-O-methylguanosine-3'-phosphate
  modified_base 17: mod_base = OTHER; note = 2'-O-methyluridine-3'-phosphate
  modified_base 18: mod_base = OTHER; note = 2'-O-methylcytidine-3'-phosphate
  modified_base 19: mod_base = OTHER; note = 2'-O-methyluridine-3'-phosphate
  modified_base 20: mod_base = OTHER; note = 2'-O-methylguanosine-3'-phosphate
  modified_base 21: mod_base = OTHER; note = 2'-O-methyluridine-3'-phosphate N-[tris(GalNAc-alkyl)-amidodecanoyl)]-4-hydroxyprolinol (Hyp-(GalNAc-alkyl)3)
tgacctccgtgtagtgtctgt

SEQ ID NO: 861 - RNA, 21 nt, synthetic construct
  source 1..21: mol_type = other RNA
  modified_base 1: mod_base = OTHER; note = 2'-O-methylcytidine-3'-phosphorothioate
  modified_base 2: mod_base = OTHER; note = 2'-O-methylcytidine-3'-phosphorothioate
  modified_base 3: mod_base = OTHER; note = 2'-O-methylguanosine-3'-phosphate
  modified_base 4: mod_base = OTHER; note = 2'-O-methyluridine-3'-phosphate
  modified_base 5: mod_base = OTHER; note = 2'-O-methylguanosine-3'-phosphate
  modified_base 6: mod_base = OTHER; note = 2'-O-methyluridine-3'-phosphate
  modified_base 7: mod_base = OTHER; note = 2'-fluoroadenosine-3'-phosphate
  modified_base 8: mod_base = OTHER; note = 2'-O-methylguanosine-3'-phosphate
  modified_base 9: mod_base = OTHER; note = 2'-fluorouridine-3'-phosphate
  modified_base 10: mod_base = OTHER; note = 2'-fluoroguanosine-3'-phosphate
  modified_base 11: mod_base = OTHER; note = 2'-fluorouridine-3'-phosphate
  modified_base 12: mod_base = OTHER; note = 2'-O-methylcytidine-3'-phosphate
  modified_base 13: mod_base = OTHER; note = 2'-O-methyluridine-3'-phosphate
  modified_base 14: mod_base = OTHER; note = 2'-O-methylguanosine-3'-phosphate
  modified_base 15: mod_base = OTHER; note = 2'-O-methyluridine-3'-phosphate
  modified_base 16: mod_base = OTHER; note = 2'-O-methyladenosine-3'-phosphate
  modified_base 17: mod_base = OTHER; note = 2'-O-methyladenosine-3'-phosphate
  modified_base 18: mod_base = OTHER; note = 2'-O-methyluridine-3'-phosphate
  modified_base 19: mod_base = OTHER; note = 2'-O-methyladenosine-3'-phosphate
  modified_base 20: mod_base = OTHER; note = 2'-O-methylcytidine-3'-phosphate
  modified_base 21: mod_base = OTHER; note = 2'-O-methyluridine-3'-phosphate N-[tris(GalNAc-alkyl)-amidodecanoyl)]-4-hydroxyprolinol (Hyp-(GalNAc-alkyl)3)
ccgtgtagtgtctgtaatact

SEQ ID NO: 862 - RNA, 21 nt, synthetic construct
  source 1..21: mol_type = other RNA
  modified_base 1: mod_base = OTHER; note = 2'-O-methylcytidine-3'-phosphorothioate
  modified_base 2: mod_base = OTHER; note = 2'-O-methylguanosine-3'-phosphorothioate
  modified_base 3: mod_base = OTHER; note = 2'-O-methyluridine-3'-phosphate
  modified_base 4: mod_base = OTHER; note = 2'-O-methylguanosine-3'-phosphate
  modified_base 5: mod_base = OTHER; note = 2'-O-methyluridine-3'-phosphate
  modified_base 6: mod_base = OTHER; note = 2'-O-methyladenosine-3'-phosphate
  modified_base 7: mod_base = OTHER; note = 2'-fluoroguanosine-3'-phosphate
  modified_base 8: mod_base = OTHER; note = 2'-O-methyluridine-3'-phosphate
  modified_base 9: mod_base = OTHER; note = 2'-fluoroguanosine-3'-phosphate
  modified_base 10: mod_base = OTHER; note = 2'-fluorouridine-3'-phosphate
  modified_base 11: mod_base = OTHER; note = 2'-fluorocytidine-3'-phosphate
  modified_base 12: mod_base = OTHER; note = 2'-O-methyluridine-3'-phosphate
  modified_base 13: mod_base = OTHER; note = 2'-O-methylguanosine-3'-phosphate
  modified_base 14: mod_base = OTHER; note = 2'-O-methyluridine-3'-phosphate
  modified_base 15: mod_base = OTHER; note = 2'-O-methyladenosine-3'-phosphate
  modified_base 16: mod_base = OTHER; note = 2'-O-methyladenosine-3'-phosphate
  modified_base 17: mod_base = OTHER; note = 2'-O-methyluridine-3'-phosphate
  modified_base 18: mod_base = OTHER; note = 2'-O-methyladenosine-3'-phosphate
  modified_base 19: mod_base = OTHER; note = 2'-O-methylcytidine-3'-phosphate
  modified_base 20: mod_base = OTHER; note = 2'-O-methylcytidine-3'-phosphate
  modified_base 21: mod_base = OTHER; note = 2'-O-methyluridine-3'-phosphate N-[tris(GalNAc-alkyl)-amidodecanoyl)]-4-hydroxyprolinol (Hyp-(GalNAc-alkyl)3)
cgtgtagtgtctgtaatacct

SEQ ID NO: 863 - RNA, 21 nt, synthetic construct
  source 1..21: mol_type = other RNA
  modified_base 1: mod_base = OTHER; note = 2'-O-methylguanosine-3'-phosphorothioate
  modified_base 2: mod_base = OTHER; note = 2'-O-methyluridine-3'-phosphorothioate
  modified_base 3: mod_base = OTHER; note = 2'-O-methylguanosine-3'-phosphate
  modified_base 4: mod_base = OTHER; note = 2'-O-methyluridine-3'-phosphate
  modified_base 5: mod_base = OTHER; note = 2'-O-methyladenosine-3'-phosphate
  modified_base 6: mod_base = OTHER; note = 2'-O-methylguanosine-3'-phosphate
  modified_base 7: mod_base = OTHER; note = 2'-fluorouridine-3'-phosphate
  modified_base 8: mod_base = OTHER; note = 2'-O-methylguanosine-3'-phosphate
  modified_base 9: mod_base = OTHER; note = 2'-fluorouridine-3'-phosphate
  modified_base 10: mod_base = OTHER; note = 2'-fluorocytidine-3'-phosphate
  modified_base 11: mod_base = OTHER; note = 2'-fluorouridine-3'-phosphate
  modified_base 12: mod_base = OTHER; note = 2'-O-methylguanosine-3'-phosphate
  modified_base 13: mod_base = OTHER; note = 2'-O-methyluridine-3'-phosphate
  modified_base 14: mod_base = OTHER; note = 2'-O-methyladenosine-3'-phosphate
  modified_base 15: mod_base = OTHER; note = 2'-O-methyladenosine-3'-phosphate
  modified_base 16: mod_base = OTHER; note = 2'-O-methyluridine-3'-phosphate
  modified_base 17: mod_base = OTHER; note = 2'-O-methyladenosine-3'-phosphate
  modified_base 18: mod_base = OTHER; note = 2'-O-methylcytidine-3'-phosphate
  modified_base 19: mod_base = OTHER; note = 2'-O-methylcytidine-3'-phosphate
  modified_base 20: mod_base = OTHER; note = 2'-O-methyluridine-3'-phosphate
  modified_base 21: mod_base = OTHER; note = 2'-O-methyluridine-3'-phosphate N-[tris(GalNAc-alkyl)-amidodecanoyl)]-4-hydroxyprolinol (Hyp-(GalNAc-alkyl)3)
gtgtagtgtctgtaatacctt

SEQ ID NO: 864 - RNA, 21 nt, synthetic construct
  source 1..21: mol_type = other RNA
  modified_base 1: mod_base = OTHER; note = 2'-O-methyluridine-3'-phosphorothioate
  modified_base 2: mod_base = OTHER; note = 2'-O-methylguanosine-3'-phosphorothioate
  modified_base 3: mod_base = OTHER; note = 2'-O-methyluridine-3'-phosphate
  modified_base 4: mod_base = OTHER; note = 2'-O-methyladenosine-3'-phosphate
  modified_base 5: mod_base = OTHER; note = 2'-O-methylguanosine-3'-phosphate
  modified_base 6: mod_base = OTHER; note = 2'-O-methyluridine-3'-phosphate
  modified_base 7: mod_base = OTHER; note = 2'-fluoroguanosine-3'-phosphate
  modified_base 8: mod_base = OTHER; note = 2'-O-methyluridine-3'-phosphate
  modified_base 9: mod_base = OTHER; note = 2'-fluorocytidine-3'-phosphate
  modified_base 10: mod_base = OTHER; note = 2'-fluorouridine-3'-phosphate
  modified_base 11: mod_base = OTHER; note = 2'-fluoroguanosine-3'-phosphate
  modified_base 12: mod_base = OTHER; note = 2'-O-methyluridine-3'-phosphate
  modified_base 13: mod_base = OTHER; note = 2'-O-methyladenosine-3'-phosphate
  modified_base 14: mod_base = OTHER; note = 2'-O-methyladenosine-3'-phosphate
  modified_base 15: mod_base = OTHER; note = 2'-O-methyluridine-3'-phosphate
  modified_base 16: mod_base = OTHER; note = 2'-O-methyladenosine-3'-phosphate
  modified_base 17: mod_base = OTHER; note = 2'-O-methylcytidine-3'-phosphate
  modified_base 18: mod_base = OTHER; note = 2'-O-methylcytidine-3'-phosphate
  modified_base 19: mod_base = OTHER; note = 2'-O-methyluridine-3'-phosphate
  modified_base 20: mod_base = OTHER; note = 2'-O-methyluridine-3'-phosphate
  modified_base 21: mod_base = OTHER; note = 2'-O-methyluridine-3'-phosphate N-[tris(GalNAc-alkyl)-amidodecanoyl)]-4-hydroxyprolinol (Hyp-(GalNAc-alkyl)3)
tgtagtgtctgtaataccttt

SEQ ID NO: 865 - RNA, 21 nt, synthetic construct
  source 1..21: mol_type = other RNA
  modified_base 1: mod_base = OTHER; note = 2'-O-methyladenosine-3'-phosphorothioate
  modified_base 2: mod_base = OTHER; note = 2'-O-methylguanosine-3'-phosphorothioate
  modified_base 3: mod_base = OTHER; note = 2'-O-methyluridine-3'-phosphate
  modified_base 4: mod_base = OTHER; note = 2'-O-methylguanosine-3'-phosphate
  modified_base 5: mod_base = OTHER; note = 2'-O-methyluridine-3'-phosphate
  modified_base 6: mod_base = OTHER; note = 2'-O-methylcytidine-3'-phosphate
  modified_base 7: mod_base = OTHER; note = 2'-fluorouridine-3'-phosphate
  modified_base 8: mod_base = OTHER; note = 2'-O-methylguanosine-3'-phosphate
  modified_base 9: mod_base = OTHER; note = 2'-fluorouridine-3'-phosphate
  modified_base 10: mod_base = OTHER; note = 2'-fluoroadenosine-3'-phosphate
  modified_base 11: mod_base = OTHER; note = 2'-fluoroadenosine-3'-phosphate
  modified_base 12: mod_base = OTHER; note = 2'-O-methyluridine-3'-phosphate
  modified_base 13: mod_base = OTHER; note = 2'-O-methyladenosine-3'-phosphate
  modified_base 14: mod_base = OTHER; note = 2'-O-methylcytidine-3'-phosphate
  modified_base 15: mod_base = OTHER; note = 2'-O-methylcytidine-3'-phosphate
  modified_base 16: mod_base = OTHER; note = 2'-O-methyluridine-3'-phosphate
  modified_base 17: mod_base = OTHER; note = 2'-O-methyluridine-3'-phosphate
  modified_base 18: mod_base = OTHER; note = 2'-O-methyladenosine-3'-phosphate
  modified_base 19: mod_base = OTHER; note = 2'-O-methylguanosine-3'-phosphate
  modified_base 20: mod_base = OTHER; note = 2'-O-methyluridine-3'-phosphate
  modified_base 21: mod_base = OTHER; note = 2'-O-methyluridine-3'-phosphate N-[tris(GalNAc-alkyl)-amidodecanoyl)]-4-hydroxyprolinol (Hyp-(GalNAc-alkyl)3)
agtgtctgtaataccttagtt

SEQ ID NO: 866 - RNA, 21 nt, synthetic construct
  source 1..21: mol_type = other RNA
  modified_base 1: mod_base = OTHER; note = 2'-O-methylguanosine-3'-phosphorothioate
  modified_base 2: mod_base = OTHER; note = 2'-O-methyluridine-3'-phosphorothioate
  modified_base 3: mod_base = OTHER; note = 2'-O-methylguanosine-3'-phosphate
  modified_base 4: mod_base = OTHER; note = 2'-O-methyluridine-3'-phosphate
  modified_base 5: mod_base = OTHER; note = 2'-O-methylcytidine-3'-phosphate
  modified_base 6: mod_base = OTHER; note = 2'-O-methyluridine-3'-phosphate
  modified_base 7: mod_base = OTHER; note = 2'-fluoroguanosine-3'-phosphate
  modified_base 8: mod_base = OTHER; note = 2'-O-methyluridine-3'-phosphate
  modified_base 9: mod_base = OTHER; note = 2'-fluoroadenosine-3'-phosphate
  modified_base 10: mod_base = OTHER; note = 2'-fluoroadenosine-3'-phosphate
  modified_base 11: mod_base = OTHER; note = 2'-fluorouridine-3'-phosphate
  modified_base 12: mod_base = OTHER; note = 2'-O-methyladenosine-3'-phosphate
  modified_base 13: mod_base = OTHER; note = 2'-O-methylcytidine-3'-phosphate
  modified_base 14: mod_base = OTHER; note = 2'-O-methylcytidine-3'-phosphate
  modified_base 15: mod_base = OTHER; note = 2'-O-methyluridine-3'-phosphate
  modified_base 16: mod_base = OTHER; note = 2'-O-methyluridine-3'-phosphate
  modified_base 17: mod_base = OTHER; note = 2'-O-methyladenosine-3'-phosphate
  modified_base 18: mod_base = OTHER; note = 2'-O-methylguanosine-3'-phosphate
  modified_base 19: mod_base = OTHER; note = 2'-O-methyluridine-3'-phosphate
  modified_base 20: mod_base = OTHER; note = 2'-O-methyluridine-3'-phosphate
  modified_base 21: mod_base = OTHER; note = 2'-O-methyluridine-3'-phosphate N-[tris(GalNAc-alkyl)-amidodecanoyl)]-4-hydroxyprolinol (Hyp-(GalNAc-alkyl)3)
gtgtctgtaataccttagttt

SEQ ID NO: 867 - RNA, 21 nt, synthetic construct
  source 1..21: mol_type = other RNA
  modified_base 1: mod_base = OTHER; note = 2'-O-methyluridine-3'-phosphorothioate
  modified_base 2: mod_base = OTHER; note = 2'-O-methylguanosine-3'-phosphorothioate
  modified_base 3: mod_base = OTHER; note = 2'-O-methyluridine-3'-phosphate
  modified_base 4: mod_base = OTHER; note = 2'-O-methylcytidine-3'-phosphate
  modified_base 5: mod_base = OTHER; note = 2'-O-methyluridine-3'-phosphate
  modified_base 6: mod_base = OTHER; note = 2'-O-methylguanosine-3'-phosphate
  modified_base 7: mod_base = OTHER; note = 2'-fluorouridine-3'-phosphate
  modified_base 8: mod_base = OTHER; note = 2'-O-methyladenosine-3'-phosphate
  modified_base 9: mod_base = OTHER; note = 2'-fluoroadenosine-3'-phosphate
  modified_base 10: mod_base = OTHER; note = 2'-fluorouridine-3'-phosphate
  modified_base 11: mod_base = OTHER; note = 2'-fluoroadenosine-3'-phosphate
  modified_base 12: mod_base = OTHER; note = 2'-O-methylcytidine-3'-phosphate
  modified_base 13: mod_base = OTHER; note = 2'-O-methylcytidine-3'-phosphate
  modified_base 14: mod_base = OTHER; note = 2'-O-methyluridine-3'-phosphate
  modified_base 15: mod_base = OTHER; note = 2'-O-methyluridine-3'-phosphate
  modified_base 16: mod_base = OTHER; note = 2'-O-methyladenosine-3'-phosphate
  modified_base 17: mod_base = OTHER; note = 2'-O-methylguanosine-3'-phosphate
  modified_base 18: mod_base = OTHER; note = 2'-O-methyluridine-3'-phosphate
  modified_base 19: mod_base = OTHER; note = 2'-O-methyluridine-3'-phosphate
  modified_base 20: mod_base = OTHER; note = 2'-O-methyluridine-3'-phosphate
  modified_base 21: mod_base = OTHER; note = 2'-O-methyluridine-3'-phosphate N-[tris(GalNAc-alkyl)-amidodecanoyl)]-4-hydroxyprolinol (Hyp-(GalNAc-alkyl)3)
tgtctgtaataccttagtttt

SEQ ID NO: 868 - RNA, 21 nt, synthetic construct
  source 1..21: mol_type = other RNA
  modified_base 1: mod_base = OTHER; note = 2'-O-methylguanosine-3'-phosphorothioate
  modified_base 2: mod_base = OTHER; note = 2'-O-methyluridine-3'-phosphorothioate
  modified_base 3: mod_base = OTHER; note = 2'-O-methylcytidine-3'-phosphate
  modified_base 4: mod_base = OTHER; note = 2'-O-methyluridine-3'-phosphate
  modified_base 5: mod_base = OTHER; note = 2'-O-methylguanosine-3'-phosphate
  modified_base 6: mod_base = OTHER; note = 2'-O-methyluridine-3'-phosphate
  modified_base 7: mod_base = OTHER; note = 2'-fluoroadenosine-3'-phosphate
  modified_base 8: mod_base = OTHER; note = 2'-O-methyladenosine-3'-phosphate
  modified_base 9: mod_base = OTHER; note = 2'-fluorouridine-3'-phosphate
  modified_base 10: mod_base = OTHER; note = 2'-fluoroadenosine-3'-phosphate
  modified_base 11: mod_base = OTHER; note = 2'-fluorocytidine-3'-phosphate
  modified_base 12: mod_base = OTHER; note = 2'-O-methylcytidine-3'-phosphate
  modified_base 13: mod_base = OTHER; note = 2'-O-methyluridine-3'-phosphate
  modified_base 14: mod_base = OTHER; note = 2'-O-methyluridine-3'-phosphate
  modified_base 15: mod_base = OTHER; note = 2'-O-methyladenosine-3'-phosphate
  modified_base 16: mod_base = OTHER; note = 2'-O-methylguanosine-3'-phosphate
  modified_base 17: mod_base = OTHER; note = 2'-O-methyluridine-3'-phosphate
  modified_base 18: mod_base = OTHER; note = 2'-O-methyluridine-3'-phosphate
  modified_base 19: mod_base = OTHER; note = 2'-O-methyluridine-3'-phosphate
  modified_base 20: mod_base = OTHER; note = 2'-O-methyluridine-3'-phosphate
  modified_base 21: mod_base = OTHER; note = 2'-O-methyluridine-3'-phosphate N-[tris(GalNAc-alkyl)-amidodecanoyl)]-4-hydroxyprolinol (Hyp-(GalNAc-alkyl)3)
gtctgtaataccttagttttt

SEQ ID NO: 869 - RNA, 21 nt, synthetic construct
  source 1..21: mol_type = other RNA
  modified_base 1: mod_base = OTHER; note = 2'-O-methyluridine-3'-phosphorothioate
  modified_base 2: mod_base = OTHER; note = 2'-O-methyluridine-3'-phosphorothioate
  modified_base 3: mod_base = OTHER; note = 2'-O-methyluridine-3'-phosphate
  modified_base 4: mod_base = OTHER; note = 2'-O-methylcytidine-3'-phosphate
  modified_base 5: mod_base = OTHER; note = 2'-O-methylcytidine-3'-phosphate
  modified_base 6: mod_base = OTHER; note = 2'-O-methyladenosine-3'-phosphate
  modified_base 7: mod_base = OTHER; note = 2'-fluorocytidine-3'-phosphate
  modified_base 8: mod_base = OTHER; note = 2'-O-methyladenosine-3'-phosphate
  modified_base 9: mod_base = OTHER; note = 2'-fluoroguanosine-3'-phosphate
  modified_base 10: mod_base = OTHER; note = 2'-fluoroadenosine-3'-phosphate
  modified_base 11: mod_base = OTHER; note = 2'-fluorouridine-3'-phosphate
  modified_base 12: mod_base = OTHER; note = 2'-O-methylguanosine-3'-phosphate
  modified_base 13: mod_base = OTHER; note = 2'-O-methylcytidine-3'-phosphate
  modified_base 14: mod_base = OTHER; note = 2'-O-methyluridine-3'-phosphate
  modified_base 15: mod_base = OTHER; note = 2'-O-methyluridine-3'-phosphate
  modified_base 16: mod_base = OTHER; note = 2'-O-methylguanosine-3'-phosphate
  modified_base 17: mod_base = OTHER; note = 2'-O-methyluridine-3'-phosphate
  modified_base 18: mod_base = OTHER; note = 2'-O-methylguanosine-3'-phosphate
  modified_base 19: mod_base = OTHER; note = 2'-O-methyladenosine-3'-phosphate
  modified_base 20: mod_base = OTHER; note = 2'-O-methyluridine-3'-phosphate
  modified_base 21: mod_base = OTHER; note = 2'-O-methyluridine-3'-phosphate N-[tris(GalNAc-alkyl)-amidodecanoyl)]-4-hydroxyprolinol (Hyp-(GalNAc-alkyl)3)
tttccacagatgcttgtgatt

SEQ ID NO: 870 - RNA, 21 nt, synthetic construct
  source 1..21: mol_type = other RNA
  modified_base 1: mod_base = OTHER; note = 2'-O-methylcytidine-3'-phosphorothioate
  modified_base 2: mod_base = OTHER; note = 2'-O-methyladenosine-3'-phosphorothioate
  modified_base 3: mod_base = OTHER; note = 2'-O-methylcytidine-3'-phosphate
  modified_base 4: mod_base = OTHER; note = 2'-O-methyladenosine-3'-phosphate
  modified_base 5: mod_base = OTHER; note = 2'-O-methylguanosine-3'-phosphate
  modified_base 6: mod_base = OTHER; note = 2'-O-methyladenosine-3'-phosphate
  modified_base 7: mod_base = OTHER; note = 2'-fluorouridine-3'-phosphate
  modified_base 8: mod_base = OTHER; note = 2'-O-methylguanosine-3'-phosphate
  modified_base 9: mod_base = OTHER; note = 2'-fluorocytidine-3'-phosphate
  modified_base 10: mod_base = OTHER; note = 2'-fluorouridine-3'-phosphate
  modified_base 11: mod_base = OTHER; note = 2'-fluorouridine-3'-phosphate
  modified_base 12: mod_base = OTHER; note = 2'-O-methylguanosine-3'-phosphate
  modified_base 13: mod_base = OTHER; note = 2'-O-methyluridine-3'-phosphate
  modified_base 14: mod_base = OTHER; note = 2'-O-methylguanosine-3'-phosphate
  modified_base 15: mod_base = OTHER; note = 2'-O-methyladenosine-3'-phosphate
  modified_base 16: mod_base = OTHER; note = 2'-O-methyluridine-3'-phosphate
  modified_base 17: mod_base = OTHER; note = 2'-O-methyluridine-3'-phosphate
  modified_base 18: mod_base = OTHER; note = 2'-O-methyluridine-3'-phosphate
  modified_base 19: mod_base = OTHER; note = 2'-O-methyluridine-3'-phosphate
  modified_base 20: mod_base = OTHER; note = 2'-O-methyluridine-3'-phosphate
  modified_base 21: mod_base = OTHER; note = 2'-O-methyluridine-3'-phosphate N-[tris(GalNAc-alkyl)-amidodecanoyl)]-4-hydroxyprolinol (Hyp-(GalNAc-alkyl)3)
cacagatgcttgtgatttttt

SEQ ID NO: 871 - RNA, 21 nt, synthetic construct
  source 1..21: mol_type = other RNA
  modified_base 1: mod_base = OTHER; note = 2'-O-methyladenosine-3'-phosphorothioate
  modified_base 2: mod_base = OTHER; note = 2'-O-methylcytidine-3'-phosphorothioate
  modified_base 3: mod_base = OTHER; note = 2'-O-methyladenosine-3'-phosphate
  modified_base 4: mod_base = OTHER; note = 2'-O-methylguanosine-3'-phosphate
  modified_base 5: mod_base = OTHER; note = 2'-O-methyladenosine-3'-phosphate
  modified_base 6: mod_base = OTHER; note = 2'-O-methyluridine-3'-phosphate
  modified_base 7: mod_base = OTHER; note = 2'-fluoroguanosine-3'-phosphate
  modified_base 8: mod_base = OTHER; note = 2'-O-methylcytidine-3'-phosphate
  modified_base 9: mod_base = OTHER; note = 2'-fluorouridine-3'-phosphate
  modified_base 10: mod_base = OTHER; note = 2'-fluorouridine-3'-phosphate
  modified_base 11: mod_base = OTHER; note = 2'-fluoroguanosine-3'-phosphate
  modified_base 12: mod_base = OTHER; note = 2'-O-methyluridine-3'-phosphate
  modified_base 13: mod_base = OTHER; note = 2'-O-methylguanosine-3'-phosphate
  modified_base 14: mod_base = OTHER; note = 2'-O-methyladenosine-3'-phosphate
  modified_base 15: mod_base = OTHER; note = 2'-O-methyluridine-3'-phosphate
  modified_base 16: mod_base = OTHER; note = 2'-O-methyluridine-3'-phosphate
  modified_base 17: mod_base = OTHER; note = 2'-O-methyluridine-3'-phosphate
  modified_base 18: mod_base = OTHER; note = 2'-O-methyluridine-3'-phosphate
  modified_base 19: mod_base = OTHER; note = 2'-O-methyluridine-3'-phosphate
  modified_base 20: mod_base = OTHER; note = 2'-O-methylguanosine-3'-phosphate
  modified_base 21: mod_base = OTHER; note = 2'-O-methyluridine-3'-phosphate N-[tris(GalNAc-alkyl)-amidodecanoyl)]-4-hydroxyprolinol (Hyp-(GalNAc-alkyl)3)
acagatgcttgtgatttttgt

SEQ ID NO: 872 - RNA, 21 nt, synthetic construct
  source 1..21: mol_type = other RNA
  modified_base 1: mod_base = OTHER; note = 2'-O-methylcytidine-3'-phosphorothioate
  modified_base 2: mod_base = OTHER; note = 2'-O-methyladenosine-3'-phosphorothioate
  modified_base 3: mod_base = OTHER; note = 2'-O-methylguanosine-3'-phosphate
  modified_base 4: mod_base = OTHER; note = 2'-O-methyladenosine-3'-phosphate
  modified_base 5: mod_base = OTHER; note = 2'-O-methyluridine-3'-phosphate
  modified_base 6: mod_base = OTHER; note = 2'-O-methylguanosine-3'-phosphate
  modified_base 7: mod_base = OTHER; note = 2'-fluorocytidine-3'-phosphate
  modified_base 8: mod_base = OTHER; note = 2'-O-methyluridine-3'-phosphate
  modified_base 9: mod_base = OTHER; note = 2'-fluorouridine-3'-phosphate
  modified_base 10: mod_base = OTHER; note = 2'-fluoroguanosine-3'-phosphate
  modified_base 11: mod_base = OTHER; note = 2'-fluorouridine-3'-phosphate
  modified_base 12: mod_base = OTHER; note = 2'-O-methylguanosine-3'-phosphate
  modified_base 13: mod_base = OTHER; note = 2'-O-methyladenosine-3'-phosphate
  modified_base 14: mod_base = OTHER; note = 2'-O-methyluridine-3'-phosphate
  modified_base 15: mod_base = OTHER; note = 2'-O-methyluridine-3'-phosphate
  modified_base 16: mod_base = OTHER; note = 2'-O-methyluridine-3'-phosphate
  modified_base 17: mod_base = OTHER; note = 2'-O-methyluridine-3'-phosphate
  modified_base 18: mod_base = OTHER; note = 2'-O-methyluridine-3'-phosphate
  modified_base 19: mod_base = OTHER; note = 2'-O-methylguanosine-3'-phosphate
  modified_base 20: mod_base = OTHER; note = 2'-O-methyladenosine-3'-phosphate
  modified_base 21: mod_base = OTHER; note = 2'-O-methyluridine-3'-phosphate N-[tris(GalNAc-alkyl)-amidodecanoyl)]-4-hydroxyprolinol (Hyp-(GalNAc-alkyl)3)
cagatgcttgtgatttttgat

SEQ ID NO: 873 - RNA, 21 nt, synthetic construct
  source 1..21: mol_type = other RNA
  modified_base 1: mod_base = OTHER; note = 2'-O-methyladenosine-3'-phosphorothioate
  modified_base 2: mod_base = OTHER; note = 2'-O-methylguanosine-3'-phosphorothioate
  modified_base 3: mod_base = OTHER; note = 2'-O-methyladenosine-3'-phosphate
  modified_base 4: mod_base = OTHER; note = 2'-O-methyluridine-3'-phosphate
  modified_base 5: mod_base = OTHER; note = 2'-O-methylguanosine-3'-phosphate
  modified_base 6: mod_base = OTHER; note = 2'-O-methylcytidine-3'-phosphate
  modified_base 7: mod_base = OTHER; note = 2'-fluorouridine-3'-phosphate
  modified_base 8: mod_base = OTHER; note = 2'-O-methyluridine-3'-phosphate
  modified_base 9: mod_base = OTHER; note = 2'-fluoroguanosine-3'-phosphate
  modified_base 10: mod_base = OTHER; note = 2'-fluorouridine-3'-phosphate
  modified_base 11: mod_base = OTHER; note = 2'-fluoroguanosine-3'-phosphate
  modified_base 12: mod_base = OTHER; note = 2'-O-methyladenosine-3'-phosphate
  modified_base 13: mod_base = OTHER; note = 2'-O-methyluridine-3'-phosphate
  modified_base 14: mod_base = OTHER; note = 2'-O-methyluridine-3'-phosphate
  modified_base 15: mod_base = OTHER; note = 2'-O-methyluridine-3'-phosphate
  modified_base 16: mod_base = OTHER; note = 2'-O-methyluridine-3'-phosphate
  modified_base 17: mod_base = OTHER; note = 2'-O-methyluridine-3'-phosphate
  modified_base 18: mod_base = OTHER; note = 2'-O-methylguanosine-3'-phosphate
  modified_base 19: mod_base = OTHER; note = 2'-O-methyladenosine-3'-phosphate
  modified_base 20: mod_base = OTHER; note = 2'-O-methyladenosine-3'-phosphate
  modified_base 21: mod_base = OTHER; note = 2'-O-methyluridine-3'-phosphate N-[tris(GalNAc-alkyl)-amidodecanoyl)]-4-hydroxyprolinol (Hyp-(GalNAc-alkyl)3)
agatgcttgtgatttttgaat

SEQ ID NO: 874 - RNA, 21 nt, synthetic construct
  source 1..21: mol_type = other RNA
  modified_base 1: mod_base = OTHER; note = 2'-O-methylguanosine-3'-phosphorothioate
  modified_base 2: mod_base = OTHER; note = 2'-O-methyladenosine-3'-phosphorothioate
  modified_base 3: mod_base = OTHER; note = 2'-O-methyluridine-3'-phosphate
  modified_base 4: mod_base = OTHER; note = 2'-O-methylguanosine-3'-phosphate
  modified_base 5: mod_base = OTHER; note = 2'-O-methylcytidine-3'-phosphate
  modified_base 6: mod_base = OTHER; note = 2'-O-methyluridine-3'-phosphate
  modified_base 7: mod_base = OTHER; note = 2'-fluorouridine-3'-phosphate
  modified_base 8: mod_base = OTHER; note = 2'-O-methylguanosine-3'-phosphate
  modified_base 9: mod_base = OTHER; note = 2'-fluorouridine-3'-phosphate
  modified_base 10: mod_base = OTHER; note = 2'-fluoroguanosine-3'-phosphate
  modified_base 11: mod_base = OTHER; note = 2'-fluoroadenosine-3'-phosphate
  modified_base 12: mod_base = OTHER; note = 2'-O-methyluridine-3'-phosphate
  modified_base 13: mod_base = OTHER; note = 2'-O-methyluridine-3'-phosphate
  modified_base 14: mod_base = OTHER; note = 2'-O-methyluridine-3'-phosphate
  modified_base 15: mod_base = OTHER; note = 2'-O-methyluridine-3'-phosphate
  modified_base 16: mod_base = OTHER; note = 2'-O-methyluridine-3'-phosphate
  modified_base 17: mod_base = OTHER; note = 2'-O-methylguanosine-3'-phosphate
  modified_base 18: mod_base = OTHER; note = 2'-O-methyladenosine-3'-phosphate
  modified_base 19: mod_base = OTHER; note = 2'-O-methyladenosine-3'-phosphate
  modified_base 20: mod_base = OTHER; note = 2'-O-methylcytidine-3'-phosphate
  modified_base 21: mod_base = OTHER; note = 2'-O-methyluridine-3'-phosphate N-[tris(GalNAc-alkyl)-amidodecanoyl)]-4-hydroxyprolinol (Hyp-(GalNAc-alkyl)3)
gatgcttgtgatttttgaact

SEQ ID NO: 875 - RNA, 21 nt, synthetic construct
  source 1..21: mol_type = other RNA
  modified_base 1: mod_base = OTHER; note = 2'-O-methyluridine-3'-phosphorothioate
  modified_base 2: mod_base = OTHER; note = 2'-O-methylguanosine-3'-phosphorothioate
  modified_base 3: mod_base = OTHER; note = 2'-O-methyluridine-3'-phosphate
  modified_base 4: mod_base = OTHER; note = 2'-O-methylguanosine-3'-phosphate
  modified_base 5: mod_base = OTHER; note = 2'-O-methyladenosine-3'-phosphate
  modified_base 6: mod_base = OTHER; note = 2'-O-methyluridine-3'-phosphate
  modified_base 7: mod_base = OTHER; note = 2'-fluorouridine-3'-phosphate
  modified_base 8: mod_base = OTHER; note = 2'-O-methyluridine-3'-phosphate
  modified_base 9: mod_base = OTHER; note = 2'-fluorouridine-3'-phosphate
  modified_base 10: mod_base = OTHER; note = 2'-fluorouridine-3'-phosphate
  modified_base 11: mod_base = OTHER; note = 2'-fluoroguanosine-3'-phosphate
  modified_base 12: mod_base = OTHER; note = 2'-O-methyladenosine-3'-phosphate
  modified_base 13: mod_base = OTHER; note = 2'-O-methyladenosine-3'-phosphate
  modified_base 14: mod_base = OTHER; note = 2'-O-methylcytidine-3'-phosphate
  modified_base 15: mod_base = OTHER; note = 2'-O-methyladenosine-3'-phosphate
  modified_base 16: mod_base = OTHER; note = 2'-O-methyladenosine-3'-phosphate
  modified_base 17: mod_base = OTHER; note = 2'-O-methyluridine-3'-phosphate
  modified_base 18: mod_base = OTHER; note = 2'-O-methyladenosine-3'-phosphate
  modified_base 19: mod_base = OTHER; note = 2'-O-methylcytidine-3'-phosphate
  modified_base 20: mod_base = OTHER; note = 2'-O-methylguanosine-3'-phosphate
  modified_base 21: mod_base = OTHER; note = 2'-O-methyluridine-3'-phosphate N-[tris(GalNAc-alkyl)-amidodecanoyl)]-4-hydroxyprolinol (Hyp-(GalNAc-alkyl)3)
tgtgatttttgaacaatacgt

SEQ ID NO: 876 - RNA, 21 nt, synthetic construct
  source 1..21: mol_type = other RNA
  modified_base 1: mod_base = OTHER; note = 2'-O-methylguanosine-3'-phosphorothioate
  modified_base 2: mod_base = OTHER; note = 2'-O-methyluridine-3'-phosphorothioate
  modified_base 3: mod_base = OTHER; note = 2'-O-methylguanosine-3'-phosphate
  modified_base 4: mod_base = OTHER; note = 2'-O-methyladenosine-3'-phosphate
  modified_base 5: mod_base = OTHER; note = 2'-O-methyluridine-3'-phosphate
  modified_base 6: mod_base = OTHER; note = 2'-O-methyluridine-3'-phosphate
  modified_base 7: mod_base = OTHER; note = 2'-fluorouridine-3'-phosphate
  modified_base 8: mod_base = OTHER; note = 2'-O-methyluridine-3'-phosphate
  modified_base 9: mod_base = OTHER; note = 2'-fluorouridine-3'-phosphate
  modified_base 10: mod_base = OTHER; note = 2'-fluoroguanosine-3'-phosphate
  modified_base 11: mod_base = OTHER; note = 2'-fluoroadenosine-3'-phosphate
  modified_base 12: mod_base = OTHER; note = 2'-O-methyladenosine-3'-phosphate
  modified_base 13: mod_base = OTHER; note = 2'-O-methylcytidine-3'-phosphate
  modified_base 14: mod_base = OTHER; note = 2'-O-methyladenosine-3'-phosphate
  modified_base 15: mod_base = OTHER; note = 2'-O-methyladenosine-3'-phosphate
  modified_base 16: mod_base = OTHER; note = 2'-O-methyluridine-3'-phosphate
  modified_base 17: mod_base = OTHER; note = 2'-O-methyladenosine-3'-phosphate
  modified_base 18: mod_base = OTHER; note = 2'-O-methylcytidine-3'-phosphate
  modified_base 19: mod_base = OTHER; note = 2'-O-methylguanosine-3'-phosphate
  modified_base 20: mod_base = OTHER; note = 2'-O-methyluridine-3'-phosphate
  modified_base 21: mod_base = OTHER; note = 2'-O-methyluridine-3'-phosphate N-[tris(GalNAc-alkyl)-amidodecanoyl)]-4-hydroxyprolinol (Hyp-(GalNAc-alkyl)3)
gtgatttttgaacaatacgtt

SEQ ID NO: 877 - RNA, 21 nt, synthetic construct
  source 1..21: mol_type = other RNA
  modified_base 1: mod_base = OTHER; note = 2'-O-methyluridine-3'-phosphorothioate
  modified_base 2: mod_base = OTHER; note = 2'-O-methylguanosine-3'-phosphorothioate
  modified_base 3: mod_base = OTHER; note = 2'-O-methyladenosine-3'-phosphate
  modified_base 4: mod_base = OTHER; note = 2'-O-methyluridine-3'-phosphate
  modified_base 5: mod_base = OTHER; note = 2'-O-methyluridine-3'-phosphate
  modified_base 6: mod_base = OTHER; note = 2'-O-methyluridine-3'-phosphate
  modified_base 7: mod_base = OTHER; note = 2'-fluorouridine-3'-phosphate
  modified_base 8: mod_base = OTHER; note = 2'-O-methyluridine-3'-phosphate
  modified_base 9: mod_base = OTHER; note = 2'-fluoroguanosine-3'-phosphate
  modified_base 10: mod_base = OTHER; note = 2'-fluoroadenosine-3'-phosphate
  modified_base 11: mod_base = OTHER; note = 2'-fluoroadenosine-3'-phosphate
  modified_base 12: mod_base = OTHER; note = 2'-O-methylcytidine-3'-phosphate
  modified_base 13: mod_base = OTHER; note = 2'-O-methyladenosine-3'-phosphate
  modified_base 14: mod_base = OTHER; note = 2'-O-methyladenosine-3'-phosphate
  modified_base 15: mod_base = OTHER; note = 2'-O-methyluridine-3'-phosphate
  modified_base 16: mod_base = OTHER; note = 2'-O-methyladenosine-3'-phosphate
  modified_base 17: mod_base = OTHER; note = 2'-O-methylcytidine-3'-phosphate
  modified_base 18: mod_base = OTHER; note = 2'-O-methylguanosine-3'-phosphate
  modified_base 19: mod_base = OTHER; note = 2'-O-methyluridine-3'-phosphate
  modified_base 20: mod_base = OTHER; note = 2'-O-methylguanosine-3'-phosphate
  modified_base 21: mod_base = OTHER; note = 2'-O-methyluridine-3'-phosphate N-[tris(GalNAc-alkyl)-amidodecanoyl)]-4-hydroxyprolinol (Hyp-(GalNAc-alkyl)3)
tgatttttgaacaatacgtgt

SEQ ID NO: 878 - RNA, 21 nt, synthetic construct
  source 1..21: mol_type = other RNA
  modified_base 1: mod_base = OTHER; note = 2'-O-methylguanosine-3'-phosphorothioate
  modified_base 2: mod_base = OTHER; note = 2'-O-methyladenosine-3'-phosphorothioate
  modified_base 3: mod_base = OTHER; note = 2'-O-methyluridine-3'-phosphate
  modified_base 4: mod_base = OTHER; note = 2'-O-methyluridine-3'-phosphate
  modified_base 5: mod_base = OTHER; note = 2'-O-methyluridine-3'-phosphate
  modified_base 6: mod_base = OTHER; note = 2'-O-methyluridine-3'-phosphate
  modified_base 7: mod_base = OTHER; note = 2'-fluorouridine-3'-phosphate
  modified_base 8: mod_base = OTHER; note = 2'-O-methylguanosine-3'-phosphate
  modified_base 9: mod_base = OTHER; note = 2'-fluoroadenosine-3'-phosphate
  modified_base 10: mod_base = OTHER; note = 2'-fluoroadenosine-3'-phosphate
  modified_base 11: mod_base = OTHER; note = 2'-fluorocytidine-3'-phosphate
  modified_base 12: mod_base = OTHER; note = 2'-O-methyladenosine-3'-phosphate
  modified_base 13: mod_base = OTHER; note = 2'-O-methyladenosine-3'-phosphate
  modified_base 14: mod_base = OTHER; note = 2'-O-methyluridine-3'-phosphate
  modified_base 15: mod_base = OTHER; note = 2'-O-methyladenosine-3'-phosphate
  modified_base 16: mod_base = OTHER; note = 2'-O-methylcytidine-3'-phosphate
  modified_base 17: mod_base = OTHER; note = 2'-O-methylguanosine-3'-phosphate
  modified_base 18: mod_base = OTHER; note = 2'-O-methyluridine-3'-phosphate
  modified_base 19: mod_base = OTHER; note = 2'-O-methylguanosine-3'-phosphate
  modified_base 20: mod_base = OTHER; note = 2'-O-methyladenosine-3'-phosphate
  modified_base 21: mod_base = OTHER; note = 2'-O-methyluridine-3'-phosphate N-[tris(GalNAc-alkyl)-amidodecanoyl)]-4-hydroxyprolinol (Hyp-(GalNAc-alkyl)3)
gatttttgaacaatacgtgat

SEQ ID NO: 879 - RNA, 21 nt, synthetic construct
  source 1..21: mol_type = other RNA
  modified_base 1: mod_base = OTHER; note = 2'-O-methyladenosine-3'-phosphorothioate
  modified_base 2: mod_base = OTHER; note = 2'-O-methyluridine-3'-phosphorothioate
  modified_base 3: mod_base = OTHER; note = 2'-O-methyluridine-3'-phosphate
  modified_base 4: mod_base = OTHER; note = 2'-O-methyluridine-3'-phosphate
  modified_base 5: mod_base = OTHER; note = 2'-O-methyluridine-3'-phosphate
  modified_base 6: mod_base = OTHER; note = 2'-O-methyluridine-3'-phosphate
  modified_base 7: mod_base = OTHER; note = 2'-fluoroguanosine-3'-phosphate
  modified_base 8: mod_base = OTHER; note = 2'-O-methyladenosine-3'-phosphate
  modified_base 9: mod_base = OTHER; note = 2'-fluoroadenosine-3'-phosphate
  modified_base 10: mod_base = OTHER; note = 2'-fluorocytidine-3'-phosphate
  modified_base 11: mod_base = OTHER; note = 2'-fluoroadenosine-3'-phosphate
  modified_base 12: mod_base = OTHER; note = 2'-O-methyladenosine-3'-phosphate
  modified_base 13: mod_base = OTHER; note = 2'-O-methyluridine-3'-phosphate
  modified_base 14: mod_base = OTHER; note = 2'-O-methyladenosine-3'-phosphate
  modified_base 15: mod_base = OTHER; note = 2'-O-methylcytidine-3'-phosphate
  modified_base 16: mod_base = OTHER; note = 2'-O-methylguanosine-3'-phosphate
  modified_base 17: mod_base = OTHER; note = 2'-O-methyluridine-3'-phosphate
  modified_base 18: mod_base = OTHER; note = 2'-O-methylguanosine-3'-phosphate
  modified_base 19: mod_base = OTHER; note = 2'-O-methyladenosine-3'-phosphate
  modified_base 20: mod_base = OTHER; note = 2'-O-methyladenosine-3'-phosphate
  modified_base 21: mod_base = OTHER; note = 2'-O-methyluridine-3'-phosphate N-[tris(GalNAc-alkyl)-amidodecanoyl)]-4-hydroxyprolinol (Hyp-(GalNAc-alkyl)3)
atttttgaacaatacgtgaat

SEQ ID NO: 880 - RNA, 21 nt, synthetic construct
  source 1..21: mol_type = other RNA
  modified_base 1: mod_base = OTHER; note = 2'-O-methyluridine-3'-phosphorothioate
  modified_base 2: mod_base = OTHER; note = 2'-O-methylguanosine-3'-phosphorothioate
  modified_base 3: mod_base = OTHER; note = 2'-O-methyladenosine-3'-phosphate
  modified_base 4: mod_base = OTHER; note = 2'-O-methyladenosine-3'-phosphate
  modified_base 5: mod_base = OTHER; note = 2'-O-methylcytidine-3'-phosphate
  modified_base 6: mod_base = OTHER; note = 2'-O-methyladenosine-3'-phosphate
  modified_base 7: mod_base = OTHER; note = 2'-fluoroadenosine-3'-phosphate
  modified_base 8: mod_base = OTHER; note = 2'-O-methyluridine-3'-phosphate
  modified_base 9: mod_base = OTHER; note = 2'-fluoroadenosine-3'-phosphate
  modified_base 10: mod_base = OTHER; note = 2'-fluorocytidine-3'-phosphate
  modified_base 11: mod_base = OTHER; note = 2'-fluoroguanosine-3'-phosphate
  modified_base 12: mod_base = OTHER; note = 2'-O-methyluridine-3'-phosphate
  modified_base 13: mod_base = OTHER; note = 2'-O-methylguanosine-3'-phosphate
  modified_base 14: mod_base = OTHER; note = 2'-O-methyladenosine-3'-phosphate
  modified_base 15: mod_base = OTHER; note = 2'-O-methyladenosine-3'-phosphate
  modified_base 16: mod_base = OTHER; note = 2'-O-methyladenosine-3'-phosphate
  modified_base 17: mod_base = OTHER; note = 2'-O-methylguanosine-3'-phosphate
  modified_base 18: mod_base = OTHER; note = 2'-O-methyladenosine-3'-phosphate
  modified_base 19: mod_base = OTHER; note = 2'-O-methyluridine-3'-phosphate
  modified_base 20: mod_base = OTHER; note = 2'-O-methylguanosine-3'-phosphate
  modified_base 21: mod_base = OTHER; note = 2'-O-methyluridine-3'-phosphate N-[tris(GalNAc-alkyl)-amidodecanoyl)]-4-hydroxyprolinol (Hyp-(GalNAc-alkyl)3)
tgaacaatacgtgaaagatgt

SEQ ID NO: 881 - RNA, 21 nt, synthetic construct
  source 1..21: mol_type = other RNA
  modified_base 1: mod_base = OTHER; note = 2'-O-methylguanosine-3'-phosphorothioate
  modified_base 2: mod_base = OTHER; note = 2'-O-methyladenosine-3'-phosphorothioate
  modified_base 3: mod_base = OTHER; note = 2'-O-methyluridine-3'-phosphate
  modified_base 4: mod_base = OTHER; note = 2'-O-methylguanosine-3'-phosphate
  modified_base 5: mod_base = OTHER; note = 2'-O-methylcytidine-3'-phosphate
  modified_base 6: mod_base = OTHER; note = 2'-O-methyladenosine-3'-phosphate
  modified_base 7: mod_base = OTHER; note = 2'-fluoroadenosine-3'-phosphate
  modified_base 8: mod_base = OTHER; note = 2'-O-methylguanosine-3'-phosphate
  modified_base 9: mod_base = OTHER; note = 2'-fluorocytidine-3'-phosphate
  modified_base 10: mod_base = OTHER; note = 2'-fluoroadenosine-3'-phosphate
  modified_base 11: mod_base = OTHER; note = 2'-fluorocytidine-3'-phosphate
  modified_base 12: mod_base = OTHER; note = 2'-O-methylcytidine-3'-phosphate
  modified_base 13: mod_base = OTHER; note = 2'-O-methyluridine-3'-phosphate
  modified_base 14: mod_base = OTHER; note = 2'-O-methylguanosine-3'-phosphate
  modified_base 15: mod_base = OTHER; note = 2'-O-methyladenosine-3'-phosphate
  modified_base 16: mod_base = OTHER; note = 2'-O-methyladenosine-3'-phosphate
  modified_base 17: mod_base = OTHER; note = 2'-O-methyluridine-3'-phosphate
  modified_base 18: mod_base = OTHER; note = 2'-O-methyluridine-3'-phosphate
  modified_base 19: mod_base = OTHER; note = 2'-O-methyluridine-3'-phosphate
  modified_base 20: mod_base = OTHER; note = 2'-O-methylcytidine-3'-phosphate
  modified_base 21: mod_base = OTHER; note = 2'-O-methyluridine-3'-phosphate N-[tris(GalNAc-alkyl)-amidodecanoyl)]-4-hydroxyprolinol (Hyp-(GalNAc-alkyl)3)
gatgcaagcacctgaatttct

SEQ ID NO: 882 - RNA, 21 nt, synthetic construct
  source 1..21: mol_type = other RNA
  modified_base 1: mod_base = OTHER; note = 2'-O-methyladenosine-3'-phosphorothioate
  modified_base 2: mod_base = OTHER; note = 2'-O-methyluridine-3'-phosphorothioate
  modified_base 3: mod_base = OTHER; note = 2'-O-methylguanosine-3'-phosphate
  modified_base 4: mod_base = OTHER; note = 2'-O-methylcytidine-3'-phosphate
  modified_base 5: mod_base = OTHER; note = 2'-O-methyladenosine-3'-phosphate
  modified_base 6: mod_base = OTHER; note = 2'-O-methyladenosine-3'-phosphate
  modified_base 7: mod_base = OTHER; note = 2'-fluoroguanosine-3'-phosphate
  modified_base 8: mod_base = OTHER; note = 2'-O-methylcytidine-3'-phosphate
  modified_base 9: mod_base = OTHER; note = 2'-fluoroadenosine-3'-phosphate
  modified_base 10: mod_base = OTHER; note = 2'-fluorocytidine-3'-phosphate
  modified_base 11: mod_base = OTHER; note = 2'-fluorocytidine-3'-phosphate
  modified_base 12: mod_base = OTHER; note = 2'-O-methyluridine-3'-phosphate
  modified_base 13: mod_base = OTHER; note = 2'-O-methylguanosine-3'-phosphate
  modified_base 14: mod_base = OTHER; note = 2'-O-methyladenosine-3'-phosphate
  modified_base 15: mod_base = OTHER; note = 2'-O-methyladenosine-3'-phosphate
  modified_base 16: mod_base = OTHER; note = 2'-O-methyluridine-3'-phosphate
  modified_base 17: mod_base = OTHER; note = 2'-O-methyluridine-3'-phosphate
  modified_base 18: mod_base = OTHER; note = 2'-O-methyluridine-3'-phosphate
  modified_base 19: mod_base = OTHER; note = 2'-O-methylcytidine-3'-phosphate
  modified_base 20: mod_base = OTHER; note = 2'-O-methyluridine-3'-phosphate
  modified_base 21: mod_base = OTHER; note = 2'-O-methyluridine-3'-phosphate N-[tris(GalNAc-alkyl)-amidodecanoyl)]-4-hydroxyprolinol (Hyp-(GalNAc-alkyl)3)
atgcaagcacctgaatttctt

SEQ ID NO: 883 - RNA, 21 nt, synthetic construct
  source 1..21: mol_type = other RNA
  modified_base 1: mod_base = OTHER; note = 2'-O-methyluridine-3'-phosphorothioate
  modified_base 2: mod_base = OTHER; note = 2'-O-methylguanosine-3'-phosphorothioate
  modified_base 3: mod_base = OTHER; note = 2'-O-methylcytidine-3'-phosphate
  modified_base 4: mod_base = OTHER; note = 2'-O-methyladenosine-3'-phosphate
  modified_base 5: mod_base = OTHER; note = 2'-O-methyladenosine-3'-phosphate
  modified_base 6: mod_base = OTHER; note = 2'-O-methylguanosine-3'-phosphate
  modified_base 7: mod_base = OTHER; note = 2'-fluorocytidine-3'-phosphate
  modified_base 8: mod_base = OTHER; note = 2'-O-methyladenosine-3'-phosphate
  modified_base 9: mod_base = OTHER; note = 2'-fluorocytidine-3'-phosphate
  modified_base 10: mod_base = OTHER; note = 2'-fluorocytidine-3'-phosphate
  modified_base 11: mod_base = OTHER; note = 2'-fluorouridine-3'-phosphate
  modified_base 12: mod_base = OTHER; note = 2'-O-methylguanosine-3'-phosphate
  modified_base 13: mod_base = OTHER; note = 2'-O-methyladenosine-3'-phosphate
  modified_base 14: mod_base = OTHER; note = 2'-O-methyladenosine-3'-phosphate
  modified_base 15: mod_base = OTHER; note = 2'-O-methyluridine-3'-phosphate
  modified_base 16: mod_base = OTHER; note = 2'-O-methyluridine-3'-phosphate
  modified_base 17: mod_base = OTHER; note = 2'-O-methyluridine-3'-phosphate
  modified_base 18: mod_base = OTHER; note = 2'-O-methylcytidine-3'-phosphate
  modified_base 19: mod_base = OTHER; note = 2'-O-methyluridine-3'-phosphate
  modified_base 20: mod_base = OTHER; note = 2'-O-methylguanosine-3'-phosphate
  modified_base 21: mod_base = OTHER; note = 2'-O-methyluridine-3'-phosphate N-[tris(GalNAc-alkyl)-amidodecanoyl)]-4-hydroxyprolinol (Hyp-(GalNAc-alkyl)3)
tgcaagcacctgaatttctgt

SEQ ID NO: 884 - RNA, 21 nt, synthetic construct
  source 1..21: mol_type = other RNA
  modified_base 1: mod_base = OTHER; note = 2'-O-methylguanosine-3'-phosphorothioate
  modified_base 2: mod_base = OTHER; note = 2'-O-methylcytidine-3'-phosphorothioate
  modified_base 3: mod_base = OTHER; note = 2'-O-methyladenosine-3'-phosphate
  modified_base 4: mod_base = OTHER; note = 2'-O-methyladenosine-3'-phosphate
  modified_base 5: mod_base = OTHER; note = 2'-O-methylguanosine-3'-phosphate
  modified_base 6: mod_base = OTHER; note = 2'-O-methylcytidine-3'-phosphate
  modified_base 7: mod_base = OTHER; note = 2'-fluoroadenosine-3'-phosphate
  modified_base 8: mod_base = OTHER; note = 2'-O-methylcytidine-3'-phosphate
  modified_base 9: mod_base = OTHER; note = 2'-fluorocytidine-3'-phosphate
  modified_base 10: mod_base = OTHER; note = 2'-fluorouridine-3'-phosphate
  modified_base 11: mod_base = OTHER; note = 2'-fluoroguanosine-3'-phosphate
  modified_base 12: mod_base = OTHER; note = 2'-O-methyladenosine-3'-phosphate
  modified_base 13: mod_base = OTHER; note = 2'-O-methyladenosine-3'-phosphate
  modified_base 14: mod_base = OTHER; note = 2'-O-methyluridine-3'-phosphate
  modified_base 15: mod_base = OTHER; note = 2'-O-methyluridine-3'-phosphate
  modified_base 16: mod_base = OTHER; note = 2'-O-methyluridine-3'-phosphate
  modified_base 17: mod_base = OTHER; note = 2'-O-methylcytidine-3'-phosphate
  modified_base 18: mod_base = OTHER; note = 2'-O-methyluridine-3'-phosphate
  modified_base 19: mod_base = OTHER; note = 2'-O-methylguanosine-3'-phosphate
  modified_base 20: mod_base = OTHER; note = 2'-O-methyluridine-3'-phosphate
  modified_base 21: mod_base = OTHER; note = 2'-O-methyluridine-3'-phosphate N-[tris(GalNAc-alkyl)-amidodecanoyl)]-4-hydroxyprolinol (Hyp-(GalNAc-alkyl)3)
gcaagcacctgaatttctgtt

SEQ ID NO: 885 - RNA, 21 nt, synthetic construct
  source 1..21: mol_type = other RNA
  modified_base 1: mod_base = OTHER; note = 2'-O-methylcytidine-3'-phosphorothioate
  modified_base 2: mod_base = OTHER; note = 2'-O-methyladenosine-3'-phosphorothioate
  modified_base 3: mod_base = OTHER; note = 2'-O-methyladenosine-3'-phosphate
  modified_base 4: mod_base = OTHER; note = 2'-O-methylguanosine-3'-phosphate
  modified_base 5: mod_base = OTHER; note = 2'-O-methylcytidine-3'-phosphate
  modified_base 6: mod_base = OTHER; note = 2'-O-methyladenosine-3'-phosphate
  modified_base 7: mod_base = OTHER; note = 2'-fluorocytidine-3'-phosphate
  modified_base 8: mod_base = OTHER; note = 2'-O-methylcytidine-3'-phosphate
  modified_base 9: mod_base = OTHER; note = 2'-fluorouridine-3'-phosphate
  modified_base 10: mod_base = OTHER; note = 2'-fluoroguanosine-3'-phosphate
  modified_base 11: mod_base = OTHER; note = 2'-fluoroadenosine-3'-phosphate
  modified_base 12: mod_base = OTHER; note = 2'-O-methyladenosine-3'-phosphate
  modified_base 13: mod_base = OTHER; note = 2'-O-methyluridine-3'-phosphate
  modified_base 14: mod_base = OTHER; note = 2'-O-methyluridine-3'-phosphate
  modified_base 15: mod_base = OTHER; note = 2'-O-methyluridine-3'-phosphate
  modified_base 16: mod_base = OTHER; note = 2'-O-methylcytidine-3'-phosphate
  modified_base 17: mod_base = OTHER; note = 2'-O-methyluridine-3'-phosphate
  modified_base 18: mod_base = OTHER; note = 2'-O-methylguanosine-3'-phosphate
  modified_base 19: mod_base = OTHER; note = 2'-O-methyluridine-3'-phosphate
  modified_base 20: mod_base = OTHER; note = 2'-O-methyluridine-3'-phosphate
  modified_base 21: mod_base = OTHER; note = 2'-O-methyluridine-3'-phosphate N-[tris(GalNAc-alkyl)-amidodecanoyl)]-4-hydroxyprolinol (Hyp-(GalNAc-alkyl)3)
caagcacctgaatttctgttt

SEQ ID NO: 886 - RNA, 21 nt, synthetic construct
  source 1..21: mol_type = other RNA
  modified_base 1: mod_base = OTHER; note = 2'-O-methyladenosine-3'-phosphorothioate
  modified_base 2: mod_base = OTHER; note = 2'-O-methyladenosine-3'-phosphorothioate
  modified_base 3: mod_base = OTHER; note = 2'-O-methylguanosine-3'-phosphate
  modified_base 4: mod_base = OTHER; note = 2'-O-methylcytidine-3'-phosphate
  modified_base 5: mod_base = OTHER; note = 2'-O-methyladenosine-3'-phosphate
  modified_base 6: mod_base = OTHER; note = 2'-O-methylcytidine-3'-phosphate
  modified_base 7: mod_base = OTHER; note = 2'-fluorocytidine-3'-phosphate
  modified_base 8: mod_base = OTHER; note = 2'-O-methyluridine-3'-phosphate
  modified_base 9: mod_base = OTHER; note = 2'-fluoroguanosine-3'-phosphate
  modified_base 10: mod_base = OTHER; note = 2'-fluoroadenosine-3'-phosphate
  modified_base 11: mod_base = OTHER; note = 2'-fluoroadenosine-3'-phosphate
  modified_base 12: mod_base = OTHER; note = 2'-O-methyluridine-3'-phosphate
  modified_base 13: mod_base = OTHER; note = 2'-O-methyluridine-3'-phosphate
  modified_base 14: mod_base = OTHER; note = 2'-O-methyluridine-3'-phosphate
  modified_base 15: mod_base = OTHER; note = 2'-O-methylcytidine-3'-phosphate
  modified_base 16: mod_base = OTHER; note = 2'-O-methyluridine-3'-phosphate
  modified_base 17: mod_base = OTHER; note = 2'-O-methylguanosine-3'-phosphate
  modified_base 18: mod_base = OTHER; note = 2'-O-methyluridine-3'-phosphate
  modified_base 19: mod_base = OTHER; note = 2'-O-methyluridine-3'-phosphate
  modified_base 20: mod_base = OTHER; note = 2'-O-methyluridine-3'-phosphate
  modified_base 21: mod_base = OTHER; note = 2'-O-methyluridine-3'-phosphate N-[tris(GalNAc-alkyl)-amidodecanoyl)]-4-hydroxyprolinol (Hyp-(GalNAc-alkyl)3)
aagcacctgaatttctgtttt

SEQ ID NO: 887 - RNA, 21 nt, synthetic construct
  source 1..21: mol_type = other RNA
  modified_base 1: mod_base = OTHER; note = 2'-O-methyladenosine-3'-phosphorothioate
  modified_base 2: mod_base = OTHER; note = 2'-O-methylguanosine-3'-phosphorothioate
  modified_base 3: mod_base = OTHER; note = 2'-O-methylcytidine-3'-phosphate
  modified_base 4: mod_base = OTHER; note = 2'-O-methyladenosine-3'-phosphate
  modified_base 5: mod_base = OTHER; note = 2'-O-methylcytidine-3'-phosphate
  modified_base 6: mod_base = OTHER; note = 2'-O-methylcytidine-3'-phosphate
  modified_base 7: mod_base = OTHER; note = 2'-fluorouridine-3'-phosphate
  modified_base 8: mod_base = OTHER; note = 2'-O-methylguanosine-3'-phosphate
  modified_base 9: mod_base = OTHER; note = 2'-fluoroadenosine-3'-phosphate
  modified_base 10: mod_base = OTHER; note = 2'-fluoroadenosine-3'-phosphate
  modified_base 11: mod_base = OTHER; note = 2'-fluorouridine-3'-phosphate
  modified_base 12: mod_base = OTHER; note = 2'-O-methyluridine-3'-phosphate
  modified_base 13: mod_base = OTHER; note = 2'-O-methyluridine-3'-phosphate
  modified_base 14: mod_base = OTHER; note = 2'-O-methylcytidine-3'-phosphate
  modified_base 15: mod_base = OTHER; note = 2'-O-methyluridine-3'-phosphate
  modified_base 16: mod_base = OTHER; note = 2'-O-methylguanosine-3'-phosphate
  modified_base 17: mod_base = OTHER; note = 2'-O-methyluridine-3'-phosphate
  modified_base 18: mod_base = OTHER; note = 2'-O-methyluridine-3'-phosphate
  modified_base 19: mod_base = OTHER; note = 2'-O-methyluridine-3'-phosphate
  modified_base 20: mod_base = OTHER; note = 2'-O-methylguanosine-3'-phosphate
  modified_base 21: mod_base = OTHER; note = 2'-O-methyluridine-3'-phosphate N-[tris(GalNAc-alkyl)-amidodecanoyl)]-4-hydroxyprolinol (Hyp-(GalNAc-alkyl)3)
agcacctgaatttctgtttgt

SEQ ID NO: 888 - RNA, 21 nt, synthetic construct
  source 1..21: mol_type = other RNA
  modified_base 1: mod_base = OTHER; note = 2'-O-methylguanosine-3'-phosphorothioate
  modified_base 2: mod_base = OTHER; note = 2'-O-methylcytidine-3'-phosphorothioate
  modified_base 3: mod_base = OTHER; note = 2'-O-methyladenosine-3'-phosphate
  modified_base 4: mod_base = OTHER; note = 2'-O-methylcytidine-3'-phosphate
  modified_base 5: mod_base = OTHER; note = 2'-O-methylcytidine-3'-phosphate
  modified_base 6: mod_base = OTHER; note = 2'-O-methyluridine-3'-phosphate
  modified_base 7: mod_base = OTHER; note = 2'-fluoroguanosine-3'-phosphate
  modified_base 8: mod_base = OTHER; note = 2'-O-methyladenosine-3'-phosphate
  modified_base 9: mod_base = OTHER; note = 2'-fluoroadenosine-3'-phosphate
  modified_base 10: mod_base = OTHER; note = 2'-fluorouridine-3'-phosphate
  modified_base 11: mod_base = OTHER; note = 2'-fluorouridine-3'-phosphate
  modified_base 12: mod_base = OTHER; note = 2'-O-methyluridine-3'-phosphate
  modified_base 13: mod_base = OTHER; note = 2'-O-methylcytidine-3'-phosphate
  modified_base 14: mod_base = OTHER; note = 2'-O-methyluridine-3'-phosphate
  modified_base 15: mod_base = OTHER; note = 2'-O-methylguanosine-3'-phosphate
  modified_base 16: mod_base = OTHER; note = 2'-O-methyluridine-3'-phosphate
  modified_base 17: mod_base = OTHER; note = 2'-O-methyluridine-3'-phosphate
  modified_base 18: mod_base = OTHER; note = 2'-O-methyluridine-3'-phosphate
  modified_base 19: mod_base = OTHER; note = 2'-O-methylguanosine-3'-phosphate
  modified_base 20: mod_base = OTHER; note = 2'-O-methyladenosine-3'-phosphate
  modified_base 21: mod_base = OTHER; note = 2'-O-methyluridine-3'-phosphate N-[tris(GalNAc-alkyl)-amidodecanoyl)]-4-hydroxyprolinol (Hyp-(GalNAc-alkyl)3)
gcacctgaatttctgtttgat

SEQ ID NO: 889 - RNA, 21 nt, synthetic construct
  source 1..21: mol_type = other RNA
  modified_base 1: mod_base = OTHER; note = 2'-O-methylcytidine-3'-phosphorothioate
  modified_base 2: mod_base = OTHER; note = 2'-O-methyladenosine-3'-phosphorothioate
  modified_base 3: mod_base = OTHER; note = 2'-O-methylcytidine-3'-phosphate
  modified_base 4: mod_base = OTHER; note = 2'-O-methylcytidine-3'-phosphate
  modified_base 5: mod_base = OTHER; note = 2'-O-methyluridine-3'-phosphate
  modified_base 6: mod_base = OTHER; note = 2'-O-methylguanosine-3'-phosphate
  modified_base 7: mod_base = OTHER; note = 2'-fluoroadenosine-3'-phosphate
  modified_base 8: mod_base = OTHER; note = 2'-O-methyladenosine-3'-phosphate
  modified_base 9: mod_base = OTHER; note = 2'-fluorouridine-3'-phosphate
  modified_base 10: mod_base = OTHER; note = 2'-fluorouridine-3'-phosphate
  modified_base 11: mod_base = OTHER; note = 2'-fluorouridine-3'-phosphate
  modified_base 12: mod_base = OTHER; note = 2'-O-methylcytidine-3'-phosphate
  modified_base 13: mod_base = OTHER; note = 2'-O-methyluridine-3'-phosphate
  modified_base 14: mod_base = OTHER; note = 2'-O-methylguanosine-3'-phosphate
  modified_base 15: mod_base = OTHER; note = 2'-O-methyluridine-3'-phosphate
  modified_base 16: mod_base = OTHER; note = 2'-O-methyluridine-3'-phosphate
  modified_base 17: mod_base = OTHER; note = 2'-O-methyluridine-3'-phosphate
  modified_base 18: mod_base = OTHER; note = 2'-O-methylguanosine-3'-phosphate
  modified_base 19: mod_base = OTHER; note = 2'-O-methyladenosine-3'-phosphate
  modified_base 20: mod_base = OTHER; note = 2'-O-methyladenosine-3'-phosphate
  modified_base 21: mod_base = OTHER; note = 2'-O-methyluridine-3'-phosphate N-[tris(GalNAc-alkyl)-amidodecanoyl)]-4-hydroxyprolinol (Hyp-(GalNAc-alkyl)3)
cacctgaatttctgtttgaat

SEQ ID NO: 890 - RNA, 21 nt, synthetic construct
  source 1..21: mol_type = other RNA
  modified_base 1: mod_base = OTHER; note = 2'-O-methyladenosine-3'-phosphorothioate
  modified_base 2: mod_base = OTHER; note = 2'-O-methylcytidine-3'-phosphorothioate
  modified_base 3: mod_base = OTHER; note = 2'-O-methylcytidine-3'-phosphate
  modified_base 4: mod_base = OTHER; note = 2'-O-methyluridine-3'-phosphate
  modified_base 5: mod_base = OTHER; note = 2'-O-methylguanosine-3'-phosphate
  modified_base 6: mod_base = OTHER; note = 2'-O-methyladenosine-3'-phosphate
  modified_base 7: mod_base = OTHER; note = 2'-fluoroadenosine-3'-phosphate
  modified_base 8: mod_base = OTHER; note = 2'-O-methyluridine-3'-phosphate
  modified_base 9: mod_base = OTHER; note = 2'-fluorouridine-3'-phosphate
  modified_base 10: mod_base = OTHER; note = 2'-fluorouridine-3'-phosphate
  modified_base 11: mod_base = OTHER; note = 2'-fluorocytidine-3'-phosphate
  modified_base 12: mod_base = OTHER; note = 2'-O-methyluridine-3'-phosphate
  modified_base 13: mod_base = OTHER; note = 2'-O-methylguanosine-3'-phosphate
  modified_base 14: mod_base = OTHER; note = 2'-O-methyluridine-3'-phosphate
  modified_base 15: mod_base = OTHER; note = 2'-O-methyluridine-3'-phosphate
  modified_base 16: mod_base = OTHER; note = 2'-O-methyluridine-3'-phosphate
  modified_base 17: mod_base = OTHER; note = 2'-O-methylguanosine-3'-phosphate
  modified_base 18: mod_base = OTHER; note = 2'-O-methyladenosine-3'-phosphate
  modified_base 19: mod_base = OTHER; note = 2'-O-methyladenosine-3'-phosphate
  modified_base 20: mod_base = OTHER; note = 2'-O-methyluridine-3'-phosphate
  modified_base 21: mod_base = OTHER; note = 2'-O-methyluridine-3'-phosphate N-[tris(GalNAc-alkyl)-amidodecanoyl)]-4-hydroxyprolinol (Hyp-(GalNAc-alkyl)3)
acctgaatttctgtttgaatt

SEQ ID NO: 891 - RNA, 21 nt, synthetic construct
  source 1..21: mol_type = other RNA
  modified_base 1: mod_base = OTHER; note = 2'-O-methylcytidine-3'-phosphorothioate
  modified_base 2: mod_base = OTHER; note = 2'-O-methylcytidine-3'-phosphorothioate
  modified_base 3: mod_base = OTHER; note = 2'-O-methyluridine-3'-phosphate
  modified_base 4: mod_base = OTHER; note = 2'-O-methylguanosine-3'-phosphate
  modified_base 5: mod_base = OTHER; note = 2'-O-methyladenosine-3'-phosphate
  modified_base 6: mod_base = OTHER; note = 2'-O-methyladenosine-3'-phosphate
  modified_base 7: mod_base = OTHER; note = 2'-fluorouridine-3'-phosphate
  modified_base 8: mod_base = OTHER; note = 2'-O-methyluridine-3'-phosphate
  modified_base 9: mod_base = OTHER; note = 2'-fluorouridine-3'-phosphate
  modified_base 10: mod_base = OTHER; note = 2'-fluorocytidine-3'-phosphate
  modified_base 11: mod_base = OTHER; note = 2'-fluorouridine-3'-phosphate
  modified_base 12: mod_base = OTHER; note = 2'-O-methylguanosine-3'-phosphate
  modified_base 13: mod_base = OTHER; note = 2'-O-methyluridine-3'-phosphate
  modified_base 14: mod_base = OTHER; note = 2'-O-methyluridine-3'-phosphate
  modified_base 15: mod_base = OTHER; note = 2'-O-methyluridine-3'-phosphate
  modified_base 16: mod_base = OTHER; note = 2'-O-methylguanosine-3'-phosphate
  modified_base 17: mod_base = OTHER; note = 2'-O-methyladenosine-3'-phosphate
  modified_base 18: mod_base = OTHER; note = 2'-O-methyladenosine-3'-phosphate
  modified_base 19: mod_base = OTHER; note = 2'-O-methyluridine-3'-phosphate
  modified_base 20: mod_base = OTHER; note = 2'-O-methylguanosine-3'-phosphate
  modified_base 21: mod_base = OTHER; note = 2'-O-methyluridine-3'-phosphate N-[tris(GalNAc-alkyl)-amidodecanoyl)]-4-hydroxyprolinol (Hyp-(GalNAc-alkyl)3)
cctgaatttctgtttgaatgt

SEQ ID NO: 892 - RNA, 21 nt, synthetic construct
  source 1..21: mol_type = other RNA
  modified_base 1: mod_base = OTHER; note = 2'-O-methyluridine-3'-phosphorothioate
  modified_base 2: mod_base = OTHER; note = 2'-O-methylguanosine-3'-phosphorothioate
  modified_base 3: mod_base = OTHER; note = 2'-O-methyladenosine-3'-phosphate
  modified_base 4: mod_base = OTHER; note = 2'-O-methyladenosine-3'-phosphate
  modified_base 5: mod_base = OTHER; note = 2'-O-methyluridine-3'-phosphate
  modified_base 6: mod_base = OTHER; note = 2'-O-methyluridine-3'-phosphate
  modified_base 7: mod_base = OTHER; note = 2'-fluorouridine-3'-phosphate
  modified_base 8: mod_base = OTHER; note = 2'-O-methylcytidine-3'-phosphate
  modified_base 9: mod_base = OTHER; note = 2'-fluorouridine-3'-phosphate
  modified_base 10: mod_base = OTHER; note = 2'-fluoroguanosine-3'-phosphate
  modified_base 11: mod_base = OTHER; note = 2'-fluorouridine-3'-phosphate
  modified_base 12: mod_base = OTHER; note = 2'-O-methyluridine-3'-phosphate
  modified_base 13: mod_base = OTHER; note = 2'-O-methyluridine-3'-phosphate
  modified_base 14: mod_base = OTHER; note = 2'-O-methylguanosine-3'-phosphate
  modified_base 15: mod_base = OTHER; note = 2'-O-methyladenosine-3'-phosphate
  modified_base 16: mod_base = OTHER; note = 2'-O-methyladenosine-3'-phosphate
  modified_base 17: mod_base = OTHER; note = 2'-O-methyluridine-3'-phosphate
  modified_base 18: mod_base = OTHER; note = 2'-O-methylguanosine-3'-phosphate
  modified_base 19: mod_base = OTHER; note = 2'-O-methylcytidine-3'-phosphate
  modified_base 20: mod_base = OTHER; note = 2'-O-methylguanosine-3'-phosphate
  modified_base 21: mod_base = OTHER; note = 2'-O-methyluridine-3'-phosphate N-[tris(GalNAc-alkyl)-amidodecanoyl)]-4-hydroxyprolinol (Hyp-(GalNAc-alkyl)3)
tgaatttctgtttgaatgcgt

SEQ ID NO: 893 - RNA, 21 nt, synthetic construct
  source 1..21: mol_type = other RNA
  modified_base 1: mod_base = OTHER; note = 2'-O-methylguanosine-3'-phosphorothioate
  modified_base 2: mod_base = OTHER; note = 2'-O-methyladenosine-3'-phosphorothioate
  modified_base 3: mod_base = OTHER; note = 2'-O-methyladenosine-3'-phosphate
  modified_base 4: mod_base = OTHER; note = 2'-O-methyluridine-3'-phosphate
  modified_base 5: mod_base = OTHER; note = 2'-O-methyluridine-3'-phosphate
  modified_base 6: mod_base = OTHER; note = 2'-O-methyluridine-3'-phosphate
  modified_base 7: mod_base = OTHER; note = 2'-fluorocytidine-3'-phosphate
  modified_base 8: mod_base = OTHER; note = 2'-O-methyluridine-3'-phosphate
  modified_base 9: mod_base = OTHER; note = 2'-fluoroguanosine-3'-phosphate
  modified_base 10: mod_base = OTHER; note = 2'-fluorouridine-3'-phosphate
  modified_base 11: mod_base = OTHER; note = 2'-fluorouridine-3'-phosphate
  modified_base 12: mod_base = OTHER; note = 2'-O-methyluridine-3'-phosphate
  modified_base 13: mod_base = OTHER; note = 2'-O-methylguanosine-3'-phosphate
  modified_base 14: mod_base = OTHER; note = 2'-O-methyladenosine-3'-phosphate
  modified_base 15: mod_base = OTHER; note = 2'-O-methyladenosine-3'-phosphate
  modified_base 16: mod_base = OTHER; note = 2'-O-methyluridine-3'-phosphate
  modified_base 17: mod_base = OTHER; note = 2'-O-methylguanosine-3'-phosphate
  modified_base 18: mod_base = OTHER; note = 2'-O-methylcytidine-3'-phosphate
  modified_base 19: mod_base = OTHER; note = 2'-O-methylguanosine-3'-phosphate
  modified_base 20: mod_base = OTHER; note = 2'-O-methylguanosine-3'-phosphate
  modified_base 21: mod_base = OTHER; note = 2'-O-methyluridine-3'-phosphate N-[tris(GalNAc-alkyl)-amidodecanoyl)]-4-hydroxyprolinol (Hyp-(GalNAc-alkyl)3)
gaatttctgtttgaatgcggt

SEQ ID NO: 894 - RNA, 21 nt, synthetic construct
  source 1..21: mol_type = other RNA
  modified_base 1: mod_base = OTHER; note = 2'-O-methyladenosine-3'-phosphorothioate
  modified_base 2: mod_base = OTHER; note = 2'-O-methyladenosine-3'-phosphorothioate
  modified_base 3: mod_base = OTHER; note = 2'-O-methyluridine-3'-phosphate
  modified_base 4: mod_base = OTHER; note = 2'-O-methyluridine-3'-phosphate
  modified_base 5: mod_base = OTHER; note = 2'-O-methyluridine-3'-phosphate
  modified_base 6: mod_base = OTHER; note = 2'-O-methylcytidine-3'-phosphate
  modified_base 7: mod_base = OTHER; note = 2'-fluorouridine-3'-phosphate
  modified_base 8: mod_base = OTHER; note = 2'-O-methylguanosine-3'-phosphate
  modified_base 9: mod_base = OTHER; note = 2'-fluorouridine-3'-phosphate
  modified_base 10: mod_base = OTHER; note = 2'-fluorouridine-3'-phosphate
  modified_base 11: mod_base = OTHER; note = 2'-fluorouridine-3'-phosphate
  modified_base 12: mod_base = OTHER; note = 2'-O-methylguanosine-3'-phosphate
  modified_base 13: mod_base = OTHER; note = 2'-O-methyladenosine-3'-phosphate
  modified_base 14: mod_base = OTHER; note = 2'-O-methyladenosine-3'-phosphate
  modified_base 15: mod_base = OTHER; note = 2'-O-methyluridine-3'-phosphate
  modified_base 16: mod_base = OTHER; note = 2'-O-methylguanosine-3'-phosphate
  modified_base 17: mod_base = OTHER; note = 2'-O-methylcytidine-3'-phosphate
  modified_base 18: mod_base = OTHER; note = 2'-O-methylguanosine-3'-phosphate
  modified_base 19: mod_base = OTHER; note = 2'-O-methylguanosine-3'-phosphate
  modified_base 20: mod_base = OTHER; note = 2'-O-methyladenosine-3'-phosphate
  modified_base 21: mod_base = OTHER; note = 2'-O-methyluridine-3'-phosphate N-[tris(GalNAc-alkyl)-amidodecanoyl)]-4-hydroxyprolinol (Hyp-(GalNAc-alkyl)3)
aatttctgtttgaatgcggat

SEQ ID NO: 895 - RNA, 21 nt, synthetic construct
  source 1..21: mol_type = other RNA
  modified_base 1: mod_base = OTHER; note = 2'-O-methyluridine-3'-phosphorothioate
  modified_base 2: mod_base = OTHER; note = 2'-O-methyluridine-3'-phosphorothioate
  modified_base 3: mod_base = OTHER; note = 2'-O-methylguanosine-3'-phosphate
  modified_base 4: mod_base = OTHER; note = 2'-O-methyladenosine-3'-phosphate
  modified_base 5: mod_base = OTHER; note = 2'-O-methyladenosine-3'-phosphate
  modified_base 6: mod_base = OTHER; note = 2'-O-methyluridine-3'-phosphate
  modified_base 7: mod_base = OTHER; note = 2'-fluoroguanosine-3'-phosphate
  modified_base 8: mod_base = OTHER; note = 2'-O-methylcytidine-3'-phosphate
  modified_base 9: mod_base = OTHER; note = 2'-fluoroguanosine-3'-phosphate
  modified_base 10: mod_base = OTHER; note = 2'-fluoroguanosine-3'-phosphate
  modified_base 11: mod_base = OTHER; note = 2'-fluoroadenosine-3'-phosphate
  modified_base 12: mod_base = OTHER; note = 2'-O-methyladenosine-3'-phosphate
  modified_base 13: mod_base = OTHER; note = 2'-O-methylcytidine-3'-phosphate
  modified_base 14: mod_base = OTHER; note = 2'-O-methylcytidine-3'-phosphate
  modified_base 15: mod_base = OTHER; note = 2'-O-methyladenosine-3'-phosphate
  modified_base 16: mod_base = OTHER; note = 2'-O-methyluridine-3'-phosphate
  modified_base 17: mod_base = OTHER; note = 2'-O-methyladenosine-3'-phosphate
  modified_base 18: mod_base = OTHER; note = 2'-O-methylguanosine-3'-phosphate
  modified_base 19: mod_base = OTHER; note = 2'-O-methylcytidine-3'-phosphate
  modified_base 20: mod_base = OTHER; note = 2'-O-methyluridine-3'-phosphate
  modified_base 21: mod_base = OTHER; note = 2'-O-methyluridine-3'-phosphate N-[tris(GalNAc-alkyl)-amidodecanoyl)]-4-hydroxyprolinol (Hyp-(GalNAc-alkyl)3)
ttgaatgcggaaccatagctt

SEQ ID NO: 896 - RNA, 21 nt, synthetic construct
  source 1..21: mol_type = other RNA
  modified_base 1: mod_base = OTHER; note = 2'-O-methyluridine-3'-phosphorothioate
  modified_base 2: mod_base = OTHER; note = 2'-O-methylguanosine-3'-phosphorothioate
  modified_base 3: mod_base = OTHER; note = 2'-O-methyladenosine-3'-phosphate
  modified_base 4: mod_base = OTHER; note = 2'-O-methyladenosine-3'-phosphate
  modified_base 5: mod_base = OTHER; note = 2'-O-methyluridine-3'-phosphate
  modified_base 6: mod_base = OTHER; note = 2'-O-methylguanosine-3'-phosphate
  modified_base 7: mod_base = OTHER; note = 2'-fluorocytidine-3'-phosphate
  modified_base 8: mod_base = OTHER; note = 2'-O-methylguanosine-3'-phosphate
  modified_base 9: mod_base = OTHER; note = 2'-fluoroguanosine-3'-phosphate
  modified_base 10: mod_base = OTHER; note = 2'-fluoroadenosine-3'-phosphate
  modified_base 11: mod_base = OTHER; note = 2'-fluoroadenosine-3'-phosphate
  modified_base 12: mod_base = OTHER; note = 2'-O-methylcytidine-3'-phosphate
  modified_base 13: mod_base = OTHER; note = 2'-O-methylcytidine-3'-phosphate
  modified_base 14: mod_base = OTHER; note = 2'-O-methyladenosine-3'-phosphate
  modified_base 15: mod_base = OTHER; note = 2'-O-methyluridine-3'-phosphate
  modified_base 16: mod_base = OTHER; note = 2'-O-methyladenosine-3'-phosphate
  modified_base 17: mod_base = OTHER; note = 2'-O-methylguanosine-3'-phosphate
  modified_base 18: mod_base = OTHER; note = 2'-O-methylcytidine-3'-phosphate
  modified_base 19: mod_base = OTHER; note = 2'-O-methyluridine-3'-phosphate
  modified_base 20: mod_base = OTHER; note = 2'-O-methylguanosine-3'-phosphate
  modified_base 21: mod_base = OTHER; note = 2'-O-methyluridine-3'-phosphate N-[tris(GalNAc-alkyl)-amidodecanoyl)]-4-hydroxyprolinol (Hyp-(GalNAc-alkyl)3)
tgaatgcggaaccatagctgt

SEQ ID NO: 897 - RNA, 21 nt, synthetic construct
  source 1..21: mol_type = other RNA
  modified_base 1: mod_base = OTHER; note = 2'-O-methylguanosine-3'-phosphorothioate
  modified_base 2: mod_base = OTHER; note = 2'-O-methyladenosine-3'-phosphorothioate
  modified_base 3: mod_base = OTHER; note = 2'-O-methyladenosine-3'-phosphate
  modified_base 4: mod_base = OTHER; note = 2'-O-methyluridine-3'-phosphate
  modified_base 5: mod_base = OTHER; note = 2'-O-methylguanosine-3'-phosphate
  modified_base 6: mod_base = OTHER; note = 2'-O-methylcytidine-3'-phosphate
  modified_base 7: mod_base = OTHER; note = 2'-fluoroguanosine-3'-phosphate
  modified_base 8: mod_base = OTHER; note = 2'-O-methylguanosine-3'-phosphate
  modified_base 9: mod_base = OTHER; note = 2'-fluoroadenosine-3'-phosphate
  modified_base 10: mod_base = OTHER; note = 2'-fluoroadenosine-3'-phosphate
  modified_base 11: mod_base = OTHER; note = 2'-fluorocytidine-3'-phosphate
  modified_base 12: mod_base = OTHER; note = 2'-O-methylcytidine-3'-phosphate
  modified_base 13: mod_base = OTHER; note = 2'-O-methyladenosine-3'-phosphate
  modified_base 14: mod_base = OTHER; note = 2'-O-methyluridine-3'-phosphate
  modified_base 15: mod_base = OTHER; note = 2'-O-methyladenosine-3'-phosphate
  modified_base 16: mod_base = OTHER; note = 2'-O-methylguanosine-3'-phosphate
  modified_base 17: mod_base = OTHER; note = 2'-O-methylcytidine-3'-phosphate
  modified_base 18: mod_base = OTHER; note = 2'-O-methyluridine-3'-phosphate
  modified_base 19: mod_base = OTHER; note = 2'-O-methylguanosine-3'-phosphate
  modified_base 20: mod_base = OTHER; note = 2'-O-methylguanosine-3'-phosphate
  modified_base 21: mod_base = OTHER; note = 2'-O-methyluridine-3'-phosphate N-[tris(GalNAc-alkyl)-amidodecanoyl)]-4-hydroxyprolinol (Hyp-(GalNAc-alkyl)3)
gaatgcggaaccatagctggt

SEQ ID NO: 898 - RNA, 21 nt, synthetic construct
  source 1..21: mol_type = other RNA
  modified_base 1: mod_base = OTHER; note = 2'-O-methylcytidine-3'-phosphorothioate
  modified_base 2: mod_base = OTHER; note = 2'-O-methylguanosine-3'-phosphorothioate
  modified_base 3: mod_base = OTHER; note = 2'-O-methylguanosine-3'-phosphate
  modified_base 4: mod_base = OTHER; note = 2'-O-methyladenosine-3'-phosphate
  modified_base 5: mod_base = OTHER; note = 2'-O-methyladenosine-3'-phosphate
  modified_base 6: mod_base = OTHER; note = 2'-O-methylcytidine-3'-phosphate
  modified_base 7: mod_base = OTHER; note = 2'-fluorocytidine-3'-phosphate
  modified_base 8: mod_base = OTHER; note = 2'-O-methyladenosine-3'-phosphate
  modified_base 9: mod_base = OTHER; note = 2'-fluorouridine-3'-phosphate
  modified_base 10: mod_base = OTHER; note = 2'-fluoroadenosine-3'-phosphate
  modified_base 11: mod_base = OTHER; note = 2'-fluoroguanosine-3'-phosphate
  modified_base 12: mod_base = OTHER; note = 2'-O-methylcytidine-3'-phosphate
  modified_base 13: mod_base = OTHER; note = 2'-O-methyluridine-3'-phosphate
  modified_base 14: mod_base = OTHER; note = 2'-O-methylguanosine-3'-phosphate
  modified_base 15: mod_base = OTHER; note = 2'-O-methylguanosine-3'-phosphate
  modified_base 16: mod_base = OTHER; note = 2'-O-methyluridine-3'-phosphate
  modified_base 17: mod_base = OTHER; note = 2'-O-methyluridine-3'-phosphate
  modified_base 18: mod_base = OTHER; note = 2'-O-methyladenosine-3'-phosphate
  modified_base 19: mod_base = OTHER; note = 2'-O-methyluridine-3'-phosphate
  modified_base 20: mod_base = OTHER; note = 2'-O-methyluridine-3'-phosphate
  modified_base 21: mod_base = OTHER; note = 2'-O-methyluridine-3'-phosphate N-[tris(GalNAc-alkyl)-amidodecanoyl)]-4-hydroxyprolinol (Hyp-(GalNAc-alkyl)3)
cggaaccatagctggttattt

SEQ ID NO: 899 - RNA, 21 nt, synthetic construct
  source 1..21: mol_type = other RNA
  modified_base 1: mod_base = OTHER; note = 2'-O-methylguanosine-3'-phosphorothioate
  modified_base 2: mod_base = OTHER; note = 2'-O-methylguanosine-3'-phosphorothioate
  modified_base 3: mod_base = OTHER; note = 2'-O-methyladenosine-3'-phosphate
  modified_base 4: mod_base = OTHER; note = 2'-O-methyladenosine-3'-phosphate
  modified_base 5: mod_base = OTHER; note = 2'-O-methylcytidine-3'-phosphate
  modified_base 6: mod_base = OTHER; note = 2'-O-methylcytidine-3'-phosphate
  modified_base 7: mod_base = OTHER; note = 2'-fluoroadenosine-3'-phosphate
  modified_base 8: mod_base = OTHER; note = 2'-O-methyluridine-3'-phosphate
  modified_base 9: mod_base = OTHER; note = 2'-fluoroadenosine-3'-phosphate
  modified_base 10: mod_base = OTHER; note = 2'-fluoroguanosine-3'-phosphate
  modified_base 11: mod_base = OTHER; note = 2'-fluorocytidine-3'-phosphate
  modified_base 12: mod_base = OTHER; note = 2'-O-methyluridine-3'-phosphate
  modified_base 13: mod_base = OTHER; note = 2'-O-methylguanosine-3'-phosphate
  modified_base 14: mod_base = OTHER; note = 2'-O-methylguanosine-3'-phosphate
  modified_base 15: mod_base = OTHER; note = 2'-O-methyluridine-3'-phosphate
  modified_base 16: mod_base = OTHER; note = 2'-O-methyluridine-3'-phosphate
  modified_base 17: mod_base = OTHER; note = 2'-O-methyladenosine-3'-phosphate
  modified_base 18: mod_base = OTHER; note = 2'-O-methyluridine-3'-phosphate
  modified_base 19: mod_base = OTHER; note = 2'-O-methyluridine-3'-phosphate
  modified_base 20: mod_base = OTHER; note = 2'-O-methyluridine-3'-phosphate
  modified_base 21: mod_base = OTHER; note = 2'-O-methyluridine-3'-phosphate N-[tris(GalNAc-alkyl)-amidodecanoyl)]-4-hydroxyprolinol (Hyp-(GalNAc-alkyl)3)
ggaaccatagctggttatttt

SEQ ID NO: 900 - RNA, 21 nt, synthetic construct
  source 1..21: mol_type = other RNA
  modified_base 1: mod_base = OTHER; note = 2'-O-methylguanosine-3'-phosphorothioate
  modified_base 2: mod_base = OTHER; note = 2'-O-methyladenosine-3'-phosphorothioate
  modified_base 3: mod_base = OTHER; note = 2'-O-methyladenosine-3'-phosphate
  modified_base 4: mod_base = OTHER; note = 2'-O-methylcytidine-3'-phosphate
  modified_base 5: mod_base = OTHER; note = 2'-O-methylcytidine-3'-phosphate
  modified_base 6: mod_base = OTHER; note = 2'-O-methyladenosine-3'-phosphate
  modified_base 7: mod_base = OTHER; note = 2'-fluorouridine-3'-phosphate
  modified_base 8: mod_base = OTHER; note = 2'-O-methyladenosine-3'-phosphate
  modified_base 9: mod_base = OTHER; note = 2'-fluoroguanosine-3'-phosphate
  modified_base 10: mod_base = OTHER; note = 2'-fluorocytidine-3'-phosphate
  modified_base 11: mod_base = OTHER; note = 2'-fluorouridine-3'-phosphate
  modified_base 12: mod_base = OTHER; note = 2'-O-methylguanosine-3'-phosphate
  modified_base 13: mod_base = OTHER; note = 2'-O-methylguanosine-3'-phosphate
  modified_base 14: mod_base = OTHER; note = 2'-O-methyluridine-3'-phosphate
  modified_base 15: mod_base = OTHER; note = 2'-O-methyluridine-3'-phosphate
  modified_base 16: mod_base = OTHER; note = 2'-O-methyladenosine-3'-phosphate
  modified_base 17: mod_base = OTHER; note = 2'-O-methyluridine-3'-phosphate
  modified_base 18: mod_base = OTHER; note = 2'-O-methyluridine-3'-phosphate
  modified_base 19: mod_base = OTHER; note = 2'-O-methyluridine-3'-phosphate
  modified_base 20: mod_base = OTHER; note = 2'-O-methylcytidine-3'-phosphate
  modified_base 21: mod_base = OTHER; note = 2'-O-methyluridine-3'-phosphate N-[tris(GalNAc-alkyl)-amidodecanoyl)]-4-hydroxyprolinol (Hyp-(GalNAc-alkyl)3)
gaaccatagctggttatttct

SEQ ID NO: 901 - RNA, 21 nt, synthetic construct
  source 1..21: mol_type = other RNA
  modified_base 1: mod_base = OTHER; note = 2'-O-methyladenosine-3'-phosphorothioate
  modified_base 2: mod_base = OTHER; note = 2'-O-methyladenosine-3'-phosphorothioate
  modified_base 3: mod_base = OTHER; note = 2'-O-methylcytidine-3'-phosphate
  modified_base 4: mod_base = OTHER; note = 2'-O-methylcytidine-3'-phosphate
  modified_base 5: mod_base = OTHER; note = 2'-O-methyladenosine-3'-phosphate
  modified_base 6: mod_base = OTHER; note = 2'-O-methyluridine-3'-phosphate
  modified_base 7: mod_base = OTHER; note = 2'-fluoroadenosine-3'-phosphate
  modified_base 8: mod_base = OTHER; note = 2'-O-methylguanosine-3'-phosphate
  modified_base 9: mod_base = OTHER; note = 2'-fluorocytidine-3'-phosphate
  modified_base 10: mod_base = OTHER; note = 2'-fluorouridine-3'-phosphate
  modified_base 11: mod_base = OTHER; note = 2'-fluoroguanosine-3'-phosphate
  modified_base 12: mod_base = OTHER; note = 2'-O-methylguanosine-3'-phosphate
  modified_base 13: mod_base = OTHER; note = 2'-O-methyluridine-3'-phosphate
  modified_base 14: mod_base = OTHER; note = 2'-O-methyluridine-3'-phosphate
  modified_base 15: mod_base = OTHER; note = 2'-O-methyladenosine-3'-phosphate
  modified_base 16: mod_base = OTHER; note = 2'-O-methyluridine-3'-phosphate
  modified_base 17: mod_base = OTHER; note = 2'-O-methyluridine-3'-phosphate
  modified_base 18: mod_base = OTHER; note = 2'-O-methyluridine-3'-phosphate
  modified_base 19: mod_base = OTHER; note = 2'-O-methylcytidine-3'-phosphate
  modified_base 20: mod_base = OTHER; note = 2'-O-methyluridine-3'-phosphate
  modified_base 21: mod_base = OTHER; note = 2'-O-methyluridine-3'-phosphate N-[tris(GalNAc-alkyl)-amidodecanoyl)]-4-hydroxyprolinol (Hyp-(GalNAc-alkyl)3)
aaccatagctggttatttctt

SEQ ID NO: 902 - RNA, 21 nt, synthetic construct
  source 1..21: mol_type = other RNA
  modified_base 1: mod_base = OTHER; note = 2'-O-methyladenosine-3'-phosphorothioate
  modified_base 2: mod_base = OTHER; note = 2'-O-methylcytidine-3'-phosphorothioate
  modified_base 3: mod_base = OTHER; note = 2'-O-methylcytidine-3'-phosphate
  modified_base 4: mod_base = OTHER; note = 2'-O-methyladenosine-3'-phosphate
  modified_base 5: mod_base = OTHER; note = 2'-O-methyluridine-3'-phosphate
  modified_base 6: mod_base = OTHER; note = 2'-O-methyladenosine-3'-phosphate
  modified_base 7: mod_base = OTHER; note = 2'-fluoroguanosine-3'-phosphate
  modified_base 8: mod_base = OTHER; note = 2'-O-methylcytidine-3'-phosphate
  modified_base 9: mod_base = OTHER; note = 2'-fluorouridine-3'-phosphate
  modified_base 10: mod_base = OTHER; note = 2'-fluoroguanosine-3'-phosphate
  modified_base 11: mod_base = OTHER; note = 2'-fluoroguanosine-3'-phosphate
  modified_base 12: mod_base = OTHER; note = 2'-O-methyluridine-3'-phosphate
  modified_base 13: mod_base = OTHER; note = 2'-O-methyluridine-3'-phosphate
  modified_base 14: mod_base = OTHER; note = 2'-O-methyladenosine-3'-phosphate
  modified_base 15: mod_base = OTHER; note = 2'-O-methyluridine-3'-phosphate
  modified_base 16: mod_base = OTHER; note = 2'-O-methyluridine-3'-phosphate
  modified_base 17: mod_base = OTHER; note = 2'-O-methyluridine-3'-phosphate
  modified_base 18: mod_base = OTHER; note = 2'-O-methylcytidine-3'-phosphate
  modified_base 19: mod_base = OTHER; note = 2'-O-methyluridine-3'-phosphate
  modified_base 20: mod_base = OTHER; note = 2'-O-methylcytidine-3'-phosphate
  modified_base 21: mod_base = OTHER; note = 2'-O-methyluridine-3'-phosphate N-[tris(GalNAc-alkyl)-amidodecanoyl)]-4-hydroxyprolinol (Hyp-(GalNAc-alkyl)3)
accatagctggttatttctct

SEQ ID NO: 903 - RNA, 21 nt, synthetic construct
  source 1..21: mol_type = other RNA
  modified_base 1: mod_base = OTHER; note = 2'-O-methylcytidine-3'-phosphorothioate
  modified_base 2: mod_base = OTHER; note = 2'-O-methylcytidine-3'-phosphorothioate
  modified_base 3: mod_base = OTHER; note = 2'-O-methyladenosine-3'-phosphate
  modified_base 4: mod_base = OTHER; note = 2'-O-methyluridine-3'-phosphate
  modified_base 5: mod_base = OTHER; note = 2'-O-methyladenosine-3'-phosphate
  modified_base 6: mod_base = OTHER; note = 2'-O-methylguanosine-3'-phosphate
  modified_base 7: mod_base = OTHER; note = 2'-fluorocytidine-3'-phosphate
  modified_base 8: mod_base = OTHER; note = 2'-O-methyluridine-3'-phosphate
  modified_base 9: mod_base = OTHER; note = 2'-fluoroguanosine-3'-phosphate
  modified_base 10: mod_base = OTHER; note = 2'-fluoroguanosine-3'-phosphate
  modified_base 11: mod_base = OTHER; note = 2'-fluorouridine-3'-phosphate
  modified_base 12: mod_base = OTHER; note = 2'-O-methyluridine-3'-phosphate
  modified_base 13: mod_base = OTHER; note = 2'-O-methyladenosine-3'-phosphate
  modified_base 14: mod_base = OTHER; note = 2'-O-methyluridine-3'-phosphate
  modified_base 15: mod_base = OTHER; note = 2'-O-methyluridine-3'-phosphate
  modified_base 16: mod_base = OTHER; note = 2'-O-methyluridine-3'-phosphate
  modified_base 17: mod_base = OTHER; note = 2'-O-methylcytidine-3'-phosphate
  modified_base 18: mod_base = OTHER; note = 2'-O-methyluridine-3'-phosphate
  modified_base 19: mod_base = OTHER; note = 2'-O-methylcytidine-3'-phosphate
  modified_base 20: mod_base = OTHER; note = 2'-O-methylcytidine-3'-phosphate
  modified_base 21: mod_base = OTHER; note = 2'-O-methyluridine-3'-phosphate N-[tris(GalNAc-alkyl)-amidodecanoyl)]-4-hydroxyprolinol (Hyp-(GalNAc-alkyl)3)
ccatagctggttatttctcct

SEQ ID NO: 904 - RNA, 21 nt, synthetic construct
  source 1..21: mol_type = other RNA
  modified_base 1: mod_base = OTHER; note = 2'-O-methylcytidine-3'-phosphorothioate
  modified_base 2: mod_base = OTHER; note = 2'-O-methyladenosine-3'-phosphorothioate
  modified_base 3: mod_base = OTHER; note = 2'-O-methyluridine-3'-phosphate
  modified_base 4: mod_base = OTHER; note = 2'-O-methyladenosine-3'-phosphate
  modified_base 5: mod_base = OTHER; note = 2'-O-methylguanosine-3'-phosphate
  modified_base 6: mod_base = OTHER; note = 2'-O-methylcytidine-3'-phosphate
  modified_base 7: mod_base = OTHER; note = 2'-fluorouridine-3'-phosphate
  modified_base 8: mod_base = OTHER; note = 2'-O-methylguanosine-3'-phosphate
  modified_base 9: mod_base = OTHER; note = 2'-fluoroguanosine-3'-phosphate
  modified_base 10: mod_base = OTHER; note = 2'-fluorouridine-3'-phosphate
  modified_base 11: mod_base = OTHER; note = 2'-fluorouridine-3'-phosphate
  modified_base 12: mod_base = OTHER; note = 2'-O-methyladenosine-3'-phosphate
  modified_base 13: mod_base = OTHER; note = 2'-O-methyluridine-3'-phosphate
  modified_base 14: mod_base = OTHER; note = 2'-O-methyluridine-3'-phosphate
  modified_base 15: mod_base = OTHER; note = 2'-O-methyluridine-3'-phosphate
  modified_base 16: mod_base = OTHER; note = 2'-O-methylcytidine-3'-phosphate
  modified_base 17: mod_base = OTHER; note = 2'-O-methyluridine-3'-phosphate
  modified_base 18: mod_base = OTHER; note = 2'-O-methylcytidine-3'-phosphate
  modified_base 19: mod_base = OTHER; note = 2'-O-methylcytidine-3'-phosphate
  modified_base 20: mod_base = OTHER; note = 2'-O-methylcytidine-3'-phosphate
  modified_base 21: mod_base = OTHER; note = 2'-O-methyluridine-3'-phosphate N-[tris(GalNAc-alkyl)-amidodecanoyl)]-4-hydroxyprolinol (Hyp-(GalNAc-alkyl)3)
catagctggttatttctccct

SEQ ID NO: 905 - RNA, 21 nt, synthetic construct
  source 1..21: mol_type = other RNA
  modified_base 1: mod_base = OTHER; note = 2'-O-methylcytidine-3'-phosphorothioate
  modified_base 2: mod_base = OTHER; note = 2'-O-methyluridine-3'-phosphorothioate
  modified_base 3: mod_base = OTHER; note = 2'-O-methylguanosine-3'-phosphate
  modified_base 4: mod_base = OTHER; note = 2'-O-methylguanosine-3'-phosphate
  modified_base 5: mod_base = OTHER; note = 2'-O-methyluridine-3'-phosphate
  modified_base 6: mod_base = OTHER; note = 2'-O-methyluridine-3'-phosphate
  modified_base 7: mod_base = OTHER; note = 2'-fluoroadenosine-3'-phosphate
  modified_base 8: mod_base = OTHER; note = 2'-O-methyluridine-3'-phosphate
  modified_base 9: mod_base = OTHER; note = 2'-fluorouridine-3'-phosphate
  modified_base 10: mod_base = OTHER; note = 2'-fluorouridine-3'-phosphate
  modified_base 11: mod_base = OTHER; note = 2'-fluorocytidine-3'-phosphate
  modified_base 12: mod_base = OTHER; note = 2'-O-methyluridine-3'-phosphate
  modified_base 13: mod_base = OTHER; note = 2'-O-methylcytidine-3'-phosphate
  modified_base 14: mod_base = OTHER; note = 2'-O-methylcytidine-3'-phosphate
  modified_base 15: mod_base = OTHER; note = 2'-O-methylcytidine-3'-phosphate
  modified_base 16: mod_base = OTHER; note = 2'-O-methyluridine-3'-phosphate
  modified_base 17: mod_base = OTHER; note = 2'-O-methyluridine-3'-phosphate
  modified_base 18: mod_base = OTHER; note = 2'-O-methylguanosine-3'-phosphate
  modified_base 19: mod_base = OTHER; note = 2'-O-methyluridine-3'-phosphate
  modified_base 20: mod_base = OTHER; note = 2'-O-methylguanosine-3'-phosphate
  modified_base 21: mod_base = OTHER; note = 2'-O-methyluridine-3'-phosphate N-[tris(GalNAc-alkyl)-amidodecanoyl)]-4-hydroxyprolinol (Hyp-(GalNAc-alkyl)3)
ctggttatttctcccttgtgt

SEQ ID NO: 906 - RNA, 21 nt, synthetic construct
  source 1..21: mol_type = other RNA
  modified_base 1: mod_base = OTHER; note = 2'-O-methyluridine-3'-phosphorothioate
  modified_base 2: mod_base = OTHER; note = 2'-O-methylguanosine-3'-phosphorothioate
  modified_base 3: mod_base = OTHER; note = 2'-O-methylguanosine-3'-phosphate
  modified_base 4: mod_base = OTHER; note = 2'-O-methyluridine-3'-phosphate
  modified_base 5: mod_base = OTHER; note = 2'-O-methyluridine-3'-phosphate
  modified_base 6: mod_base = OTHER; note = 2'-O-methyladenosine-3'-phosphate
  modified_base 7: mod_base = OTHER; note = 2'-fluorouridine-3'-phosphate
  modified_base 8: mod_base = OTHER; note = 2'-O-methyluridine-3'-phosphate
  modified_base 9: mod_base = OTHER; note = 2'-fluorouridine-3'-phosphate
  modified_base 10: mod_base = OTHER; note = 2'-fluorocytidine-3'-phosphate
  modified_base 11: mod_base = OTHER; note = 2'-fluorouridine-3'-phosphate
  modified_base 12: mod_base = OTHER; note = 2'-O-methylcytidine-3'-phosphate
  modified_base 13: mod_base = OTHER; note = 2'-O-methylcytidine-3'-phosphate
  modified_base 14: mod_base = OTHER; note = 2'-O-methylcytidine-3'-phosphate
  modified_base 15: mod_base = OTHER; note = 2'-O-methyluridine-3'-phosphate
  modified_base 16: mod_base = OTHER; note = 2'-O-methyluridine-3'-phosphate
  modified_base 17: mod_base = OTHER; note = 2'-O-methylguanosine-3'-phosphate
  modified_base 18: mod_base = OTHER; note = 2'-O-methyluridine-3'-phosphate
  modified_base 19: mod_base = OTHER; note = 2'-O-methylguanosine-3'-phosphate
  modified_base 20: mod_base = OTHER; note = 2'-O-methyluridine-3'-phosphate
  modified_base 21: mod_base = OTHER; note = 2'-O-methyluridine-3'-phosphate N-[tris(GalNAc-alkyl)-amidodecanoyl)]-4-hydroxyprolinol (Hyp-(GalNAc-alkyl)3)
tggttatttctcccttgtgtt

SEQ ID NO: 907 - RNA, 21 nt, synthetic construct
  source 1..21: mol_type = other RNA
  modified_base 1: mod_base = OTHER; note = 2'-O-methylguanosine-3'-phosphorothioate
  modified_base 2: mod_base = OTHER; note = 2'-O-methylguanosine-3'-phosphorothioate
  modified_base 3: mod_base = OTHER; note = 2'-O-methyluridine-3'-phosphate
  modified_base 4: mod_base = OTHER; note = 2'-O-methyluridine-3'-phosphate
  modified_base 5: mod_base = OTHER; note = 2'-O-methyladenosine-3'-phosphate
  modified_base 6: mod_base = OTHER; note = 2'-O-methyluridine-3'-phosphate
  modified_base 7: mod_base = OTHER; note = 2'-fluorouridine-3'-phosphate
  modified_base 8: mod_base = OTHER; note = 2'-O-methyluridine-3'-phosphate
  modified_base 9: mod_base = OTHER; note = 2'-fluorocytidine-3'-phosphate
  modified_base 10: mod_base = OTHER; note = 2'-fluorouridine-3'-phosphate
  modified_base 11: mod_base = OTHER; note = 2'-fluorocytidine-3'-phosphate
  modified_base 12: mod_base = OTHER; note = 2'-O-methylcytidine-3'-phosphate
  modified_base 13: mod_base = OTHER; note = 2'-O-methylcytidine-3'-phosphate
  modified_base 14: mod_base = OTHER; note = 2'-O-methyluridine-3'-phosphate
  modified_base 15: mod_base = OTHER; note = 2'-O-methyluridine-3'-phosphate
  modified_base 16: mod_base = OTHER; note = 2'-O-methylguanosine-3'-phosphate
  modified_base 17: mod_base = OTHER; note = 2'-O-methyluridine-3'-phosphate
  modified_base 18: mod_base = OTHER; note = 2'-O-methylguanosine-3'-phosphate
  modified_base 19: mod_base = OTHER; note = 2'-O-methyluridine-3'-phosphate
  modified_base 20: mod_base = OTHER; note = 2'-O-methyluridine-3'-phosphate
  modified_base 21: mod_base = OTHER; note = 2'-O-methyluridine-3'-phosphate N-[tris(GalNAc-alkyl)-amidodecanoyl)]-4-hydroxyprolinol (Hyp-(GalNAc-alkyl)3)
ggttatttctcccttgtgttt

SEQ ID NO: 908 - RNA, 21 nt, synthetic construct
  source 1..21: mol_type = other RNA
  modified_base 1: mod_base = OTHER; note = 2'-O-methyluridine-3'-phosphorothioate
  modified_base 2: mod_base = OTHER; note = 2'-O-methyluridine-3'-phosphorothioate
  modified_base 3: mod_base = OTHER; note = 2'-O-methyladenosine-3'-phosphate
  modified_base 4: mod_base = OTHER; note = 2'-O-methyluridine-3'-phosphate
  modified_base 5: mod_base = OTHER; note = 2'-O-methyluridine-3'-phosphate
  modified_base 6: mod_base = OTHER; note = 2'-O-methyluridine-3'-phosphate
  modified_base 7: mod_base = OTHER; note = 2'-fluorocytidine-3'-phosphate
  modified_base 8: mod_base = OTHER; note = 2'-O-methyluridine-3'-phosphate
  modified_base 9: mod_base = OTHER; note = 2'-fluorocytidine-3'-phosphate
  modified_base 10: mod_base = OTHER; note = 2'-fluorocytidine-3'-phosphate
  modified_base 11: mod_base = OTHER; note = 2'-fluorocytidine-3'-phosphate
  modified_base 12: mod_base = OTHER; note = 2'-O-methyluridine-3'-phosphate
  modified_base 13: mod_base = OTHER; note = 2'-O-methyluridine-3'-phosphate
  modified_base 14: mod_base = OTHER; note = 2'-O-methylguanosine-3'-phosphate
  modified_base 15: mod_base = OTHER; note = 2'-O-methyluridine-3'-phosphate
  modified_base 16: mod_base = OTHER; note = 2'-O-methylguanosine-3'-phosphate
  modified_base 17: mod_base = OTHER; note = 2'-O-methyluridine-3'-phosphate
  modified_base 18: mod_base = OTHER; note = 2'-O-methyluridine-3'-phosphate
  modified_base 19: mod_base = OTHER; note = 2'-O-methyladenosine-3'-phosphate
  modified_base 20: mod_base = OTHER; note = 2'-O-methylguanosine-3'-phosphate
  modified_base 21: mod_base = OTHER; note = 2'-O-methyluridine-3'-phosphate N-[tris(GalNAc-alkyl)-amidodecanoyl)]-4-hydroxyprolinol (Hyp-(GalNAc-alkyl)3)
ttatttctcccttgtgttagt

SEQ ID NO: 909 - RNA, 21 nt, synthetic construct
  source 1..21: mol_type = other RNA
  modified_base 1: mod_base = OTHER; note = 2'-O-methyluridine-3'-phosphorothioate
  modified_base 2: mod_base = OTHER; note = 2'-O-methyladenosine-3'-phosphorothioate
  modified_base 3: mod_base = OTHER; note = 2'-O-methyluridine-3'-phosphate
  modified_base 4: mod_base = OTHER; note = 2'-O-methyluridine-3'-phosphate
  modified_base 5: mod_base = OTHER; note = 2'-O-methyluridine-3'-phosphate
  modified_base 6: mod_base = OTHER; note = 2'-O-methylcytidine-3'-phosphate
  modified_base 7: mod_base = OTHER; note = 2'-fluorouridine-3'-phosphate
  modified_base 8: mod_base = OTHER; note = 2'-O-methylcytidine-3'-phosphate
  modified_base 9: mod_base = OTHER; note = 2'-fluorocytidine-3'-phosphate
  modified_base 10: mod_base = OTHER; note = 2'-fluorocytidine-3'-phosphate
  modified_base 11: mod_base = OTHER; note = 2'-fluorouridine-3'-phosphate
  modified_base 12: mod_base = OTHER; note = 2'-O-methyluridine-3'-phosphate
  modified_base 13: mod_base = OTHER; note = 2'-O-methylguanosine-3'-phosphate
  modified_base 14: mod_base = OTHER; note = 2'-O-methyluridine-3'-phosphate
  modified_base 15: mod_base = OTHER; note = 2'-O-methylguanosine-3'-phosphate
  modified_base 16: mod_base = OTHER; note = 2'-O-methyluridine-3'-phosphate
  modified_base 17: mod_base = OTHER; note = 2'-O-methyluridine-3'-phosphate
  modified_base 18: mod_base = OTHER; note = 2'-O-methyladenosine-3'-phosphate
  modified_base 19: mod_base = OTHER; note = 2'-O-methylguanosine-3'-phosphate
  modified_base 20: mod_base = OTHER; note = 2'-O-methyluridine-3'-phosphate
  modified_base 21: mod_base = OTHER; note = 2'-O-methyluridine-3'-phosphate N-[tris(GalNAc-alkyl)-amidodecanoyl)]-4-hydroxyprolinol (Hyp-(GalNAc-alkyl)3)
tatttctcccttgtgttagtt

SEQ ID NO: 910 - RNA, 21 nt, synthetic construct
  source 1..21: mol_type = other RNA
  modified_base 1: mod_base = OTHER; note = 2'-O-methyladenosine-3'-phosphorothioate
  modified_base 2: mod_base = OTHER; note = 2'-O-methyluridine-3'-phosphorothioate
  modified_base 3: mod_base = OTHER; note = 2'-O-methyluridine-3'-phosphate
  modified_base 4: mod_base = OTHER; note = 2'-O-methyluridine-3'-phosphate
  modified_base 5: mod_base = OTHER; note = 2'-O-methylcytidine-3'-phosphate
  modified_base 6: mod_base = OTHER; note = 2'-O-methyluridine-3'-phosphate
  modified_base 7: mod_base = OTHER; note = 2'-fluorocytidine-3'-phosphate
  modified_base 8: mod_base = OTHER; note = 2'-O-methylcytidine-3'-phosphate
  modified_base 9: mod_base = OTHER; note = 2'-fluorocytidine-3'-phosphate
  modified_base 10: mod_base = OTHER; note = 2'-fluorouridine-3'-phosphate
  modified_base 11: mod_base = OTHER; note = 2'-fluorouridine-3'-phosphate
  modified_base 12: mod_base = OTHER; note = 2'-O-methylguanosine-3'-phosphate
  modified_base 13: mod_base = OTHER; note = 2'-O-methyluridine-3'-phosphate
  modified_base 14: mod_base = OTHER; note = 2'-O-methylguanosine-3'-phosphate
  modified_base 15: mod_base = OTHER; note = 2'-O-methyluridine-3'-phosphate
  modified_base 16: mod_base = OTHER; note = 2'-O-methyluridine-3'-phosphate
  modified_base 17: mod_base = OTHER; note = 2'-O-methyladenosine-3'-phosphate
  modified_base 18: mod_base = OTHER; note = 2'-O-methylguanosine-3'-phosphate
  modified_base 19: mod_base = OTHER; note = 2'-O-methyluridine-3'-phosphate
  modified_base 20: mod_base = OTHER; note = 2'-O-methyladenosine-3'-phosphate
  modified_base 21: mod_base = OTHER; note = 2'-O-methyluridine-3'-phosphate N-[tris(GalNAc-alkyl)-amidodecanoyl)]-4-hydroxyprolinol (Hyp-(GalNAc-alkyl)3)
atttctcccttgtgttagtat

SEQ ID NO: 911 - RNA, 21 nt, synthetic construct
  source 1..21: mol_type = other RNA
  modified_base 1: mod_base = OTHER; note = 2'-O-methyluridine-3'-phosphorothioate
  modified_base 2: mod_base = OTHER; note = 2'-O-methyluridine-3'-phosphorothioate
  modified_base 3: mod_base = OTHER; note = 2'-O-methyluridine-3'-phosphate
  modified_base 4: mod_base = OTHER; note = 2'-O-methylcytidine-3'-phosphate
  modified_base 5: mod_base = OTHER; note = 2'-O-methyluridine-3'-phosphate
  modified_base 6: mod_base = OTHER; note = 2'-O-methylcytidine-3'-phosphate
  modified_base 7: mod_base = OTHER; note = 2'-fluorocytidine-3'-phosphate
  modified_base 8: mod_base = OTHER; note = 2'-O-methylcytidine-3'-phosphate
  modified_base 9: mod_base = OTHER; note = 2'-fluorouridine-3'-phosphate
  modified_base 10: mod_base = OTHER; note = 2'-fluorouridine-3'-phosphate
  modified_base 11: mod_base = OTHER; note = 2'-fluoroguanosine-3'-phosphate
  modified_base 12: mod_base = OTHER; note = 2'-O-methyluridine-3'-phosphate
  modified_base 13: mod_base = OTHER; note = 2'-O-methylguanosine-3'-phosphate
  modified_base 14: mod_base = OTHER; note = 2'-O-methyluridine-3'-phosphate
  modified_base 15: mod_base = OTHER; note = 2'-O-methyluridine-3'-phosphate
  modified_base 16: mod_base = OTHER; note = 2'-O-methyladenosine-3'-phosphate
  modified_base 17: mod_base = OTHER; note = 2'-O-methylguanosine-3'-phosphate
  modified_base 18: mod_base = OTHER; note = 2'-O-methyluridine-3'-phosphate
  modified_base 19: mod_base = OTHER; note = 2'-O-methyladenosine-3'-phosphate
  modified_base 20: mod_base = OTHER; note = 2'-O-methyladenosine-3'-phosphate
  modified_base 21: mod_base = OTHER; note = 2'-O-methyluridine-3'-phosphate N-[tris(GalNAc-alkyl)-amidodecanoyl)]-4-hydroxyprolinol (Hyp-(GalNAc-alkyl)3)
tttctcccttgtgttagtaat

SEQ ID NO: 912 - RNA, 21 nt, synthetic construct
  source 1..21: mol_type = other RNA
  modified_base 1: mod_base = OTHER; note = 2'-O-methyluridine-3'-phosphorothioate
  modified_base 2: mod_base = OTHER; note = 2'-O-methylcytidine-3'-phosphorothioate
  modified_base 3: mod_base = OTHER; note = 2'-O-methylcytidine-3'-phosphate
  modified_base 4: mod_base = OTHER; note = 2'-O-methylcytidine-3'-phosphate
  modified_base 5: mod_base = OTHER; note = 2'-O-methyluridine-3'-phosphate
  modified_base 6: mod_base = OTHER; note = 2'-O-methyluridine-3'-phosphate
  modified_base 7: mod_base = OTHER; note = 2'-fluoroguanosine-3'-phosphate
  modified_base 8: mod_base = OTHER; note = 2'-O-methyluridine-3'-phosphate
  modified_base 9: mod_base = OTHER; note = 2'-fluoroguanosine-3'-phosphate
  modified_base 10: mod_base = OTHER; note = 2'-fluorouridine-3'-phosphate
  modified_base 11: mod_base = OTHER; note = 2'-fluorouridine-3'-phosphate
  modified_base 12: mod_base = OTHER; note = 2'-O-methyladenosine-3'-phosphate
  modified_base 13: mod_base = OTHER; note = 2'-O-methylguanosine-3'-phosphate
  modified_base 14: mod_base = OTHER; note = 2'-O-methyluridine-3'-phosphate
  modified_base 15: mod_base = OTHER; note = 2'-O-methyladenosine-3'-phosphate
  modified_base 16: mod_base = OTHER; note = 2'-O-methyladenosine-3'-phosphate
  modified_base 17: mod_base = OTHER; note = 2'-O-methyluridine-3'-phosphate
  modified_base 18: mod_base = OTHER; note = 2'-O-methyladenosine-3'-phosphate
  modified_base 19: mod_base = OTHER; note = 2'-O-methyladenosine-3'-phosphate
  modified_base 20: mod_base = OTHER; note = 2'-O-methyladenosine-3'-phosphate
  modified_base 21: mod_base = OTHER; note = 2'-O-methyluridine-3'-phosphate N-[tris(GalNAc-alkyl)-amidodecanoyl)]-4-hydroxyprolinol (Hyp-(GalNAc-alkyl)3)
tcccttgtgttagtaataaat

SEQ ID NO: 913 - RNA, 21 nt, synthetic construct
  source 1..21: mol_type = other RNA
  modified_base 1: mod_base = OTHER; note = 2'-O-methylcytidine-3'-phosphorothioate
  modified_base 2: mod_base = OTHER; note = 2'-O-methylcytidine-3'-phosphorothioate
  modified_base 3: mod_base = OTHER; note = 2'-O-methylcytidine-3'-phosphate
  modified_base 4: mod_base = OTHER; note = 2'-O-methyluridine-3'-phosphate
  modified_base 5: mod_base = OTHER; note = 2'-O-methyluridine-3'-phosphate
  modified_base 6: mod_base = OTHER; note = 2'-O-methylguanosine-3'-phosphate
  modified_base 7: mod_base = OTHER; note = 2'-fluorouridine-3'-phosphate
  modified_base 8: mod_base = OTHER; note = 2'-O-methylguanosine-3'-phosphate
  modified_base 9: mod_base = OTHER; note = 2'-fluorouridine-3'-phosphate
  modified_base 10: mod_base = OTHER; note = 2'-fluorouridine-3'-phosphate
  modified_base 11: mod_base = OTHER; note = 2'-fluoroadenosine-3'-phosphate
  modified_base 12: mod_base = OTHER; note = 2'-O-methylguanosine-3'-phosphate
  modified_base 13: mod_base = OTHER; note = 2'-O-methyluridine-3'-phosphate
  modified_base 14: mod_base = OTHER; note = 2'-O-methyladenosine-3'-phosphate
  modified_base 15: mod_base = OTHER; note = 2'-O-methyladenosine-3'-phosphate
  modified_base 16: mod_base = OTHER; note = 2'-O-methyluridine-3'-phosphate
  modified_base 17: mod_base = OTHER; note = 2'-O-methyladenosine-3'-phosphate
  modified_base 18: mod_base = OTHER; note = 2'-O-methyladenosine-3'-phosphate
  modified_base 19: mod_base = OTHER; note = 2'-O-methyladenosine-3'-phosphate
  modified_base 20: mod_base = OTHER; note = 2'-O-methylcytidine-3'-phosphate
  modified_base 21: mod_base = OTHER; note = 2'-O-methyluridine-3'-phosphate N-[tris(GalNAc-alkyl)-amidodecanoyl)]-4-hydroxyprolinol (Hyp-(GalNAc-alkyl)3)
cccttgtgttagtaataaact

SEQ ID NO: 914 - RNA, 21 nt, synthetic construct
  source 1..21: mol_type = other RNA
  modified_base 1: mod_base = OTHER; note = 2'-O-methylcytidine-3'-phosphorothioate
  modified_base 2: mod_base = OTHER; note = 2'-O-methylcytidine-3'-phosphorothioate
  modified_base 3: mod_base = OTHER; note = 2'-O-methyluridine-3'-phosphate
  modified_base 4: mod_base = OTHER; note = 2'-O-methyluridine-3'-phosphate
  modified_base 5: mod_base = OTHER; note = 2'-O-methylguanosine-3'-phosphate
  modified_base 6: mod_base = OTHER; note = 2'-O-methyluridine-3'-phosphate
  modified_base 7: mod_base = OTHER; note = 2'-fluoroguanosine-3'-phosphate
  modified_base 8: mod_base = OTHER; note = 2'-O-methyluridine-3'-phosphate
  modified_base 9: mod_base = OTHER; note = 2'-fluorouridine-3'-phosphate
  modified_base 10: mod_base = OTHER; note = 2'-fluoroadenosine-3'-phosphate
  modified_base 11: mod_base = OTHER; note = 2'-fluoroguanosine-3'-phosphate
  modified_base 12: mod_base = OTHER; note = 2'-O-methyluridine-3'-phosphate
  modified_base 13: mod_base = OTHER; note = 2'-O-methyladenosine-3'-phosphate
  modified_base 14: mod_base = OTHER; note = 2'-O-methyladenosine-3'-phosphate
  modified_base 15: mod_base = OTHER; note = 2'-O-methyluridine-3'-phosphate
  modified_base 16: mod_base = OTHER; note = 2'-O-methyladenosine-3'-phosphate
  modified_base 17: mod_base = OTHER; note = 2'-O-methyladenosine-3'-phosphate
  modified_base 18: mod_base = OTHER; note = 2'-O-methyladenosine-3'-phosphate
  modified_base 19: mod_base = OTHER; note = 2'-O-methylcytidine-3'-phosphate
  modified_base 20: mod_base = OTHER; note = 2'-O-methylguanosine-3'-phosphate
  modified_base 21: mod_base = OTHER; note = 2'-O-methyluridine-3'-phosphate N-[tris(GalNAc-alkyl)-amidodecanoyl)]-4-hydroxyprolinol (Hyp-(GalNAc-alkyl)3)
ccttgtgttagtaataaacgt

SEQ ID NO: 915 - RNA, 21 nt, synthetic construct
  source 1..21: mol_type = other RNA
  modified_base 1: mod_base = OTHER; note = 2'-O-methylcytidine-3'-phosphorothioate
  modified_base 2: mod_base = OTHER; note = 2'-O-methyluridine-3'-phosphorothioate
  modified_base 3: mod_base = OTHER; note = 2'-O-methyluridine-3'-phosphate
  modified_base 4: mod_base = OTHER; note = 2'-O-methylguanosine-3'-phosphate
  modified_base 5: mod_base = OTHER; note = 2'-O-methyluridine-3'-phosphate
  modified_base 6: mod_base = OTHER; note = 2'-O-methylguanosine-3'-phosphate
  modified_base 7: mod_base = OTHER; note = 2'-fluorouridine-3'-phosphate
  modified_base 8: mod_base = OTHER; note = 2'-O-methyluridine-3'-phosphate
  modified_base 9: mod_base = OTHER; note = 2'-fluoroadenosine-3'-phosphate
  modified_base 10: mod_base = OTHER; note = 2'-fluoroguanosine-3'-phosphate
  modified_base 11: mod_base = OTHER; note = 2'-fluorouridine-3'-phosphate
  modified_base 12: mod_base = OTHER; note = 2'-O-methyladenosine-3'-phosphate
  modified_base 13: mod_base = OTHER; note = 2'-O-methyladenosine-3'-phosphate
  modified_base 14: mod_base = OTHER; note = 2'-O-methyluridine-3'-phosphate
  modified_base 15: mod_base = OTHER; note = 2'-O-methyladenosine-3'-phosphate
  modified_base 16: mod_base = OTHER; note = 2'-O-methyladenosine-3'-phosphate
  modified_base 17: mod_base = OTHER; note = 2'-O-methyladenosine-3'-phosphate
  modified_base 18: mod_base = OTHER; note = 2'-O-methylcytidine-3'-phosphate
  modified_base 19: mod_base = OTHER; note = 2'-O-methylguanosine-3'-phosphate
  modified_base 20: mod_base = OTHER; note = 2'-O-methyluridine-3'-phosphate
  modified_base 21: mod_base = OTHER; note = 2'-O-methyluridine-3'-phosphate N-[tris(GalNAc-alkyl)-amidodecanoyl)]-4-hydroxyprolinol (Hyp-(GalNAc-alkyl)3)
cttgtgttagtaataaacgtt

SEQ ID NO: 916 - RNA, 21 nt, synthetic construct
  source 1..21: mol_type = other RNA
  modified_base 1: mod_base = OTHER; note = 2'-O-methyluridine-3'-phosphorothioate
  modified_base 2: mod_base = OTHER; note = 2'-O-methyluridine-3'-phosphorothioate
  modified_base 3: mod_base = OTHER; note = 2'-O-methylguanosine-3'-phosphate
  modified_base 4: mod_base = OTHER; note = 2'-O-methyluridine-3'-phosphate
  modified_base 5: mod_base = OTHER; note = 2'-O-methylguanosine-3'-phosphate
  modified_base 6: mod_base = OTHER; note = 2'-O-methyluridine-3'-phosphate
  modified_base 7: mod_base = OTHER; note = 2'-fluorouridine-3'-phosphate
  modified_base 8: mod_base = OTHER; note = 2'-O-methyladenosine-3'-phosphate
  modified_base 9: mod_base = OTHER; note = 2'-fluoroguanosine-3'-phosphate
  modified_base 10: mod_base = OTHER; note = 2'-fluorouridine-3'-phosphate
  modified_base 11: mod_base = OTHER; note = 2'-fluoroadenosine-3'-phosphate
  modified_base 12: mod_base = OTHER; note = 2'-O-methyladenosine-3'-phosphate
  modified_base 13: mod_base = OTHER; note = 2'-O-methyluridine-3'-phosphate
  modified_base 14: mod_base = OTHER; note = 2'-O-methyladenosine-3'-phosphate
  modified_base 15: mod_base = OTHER; note = 2'-O-methyladenosine-3'-phosphate
  modified_base 16: mod_base = OTHER; note = 2'-O-methyladenosine-3'-phosphate
  modified_base 17: mod_base = OTHER; note = 2'-O-methylcytidine-3'-phosphate
  modified_base 18: mod_base = OTHER; note = 2'-O-methylguanosine-3'-phosphate
  modified_base 19: mod_base = OTHER; note = 2'-O-methyluridine-3'-phosphate
  modified_base 20: mod_base = OTHER; note = 2'-O-methylcytidine-3'-phosphate
  modified_base 21: mod_base = OTHER; note = 2'-O-methyluridine-3'-phosphate N-[tris(GalNAc-alkyl)-amidodecanoyl)]-4-hydroxyprolinol (Hyp-(GalNAc-alkyl)3)
ttgtgttagtaataaacgtct

SEQ ID NO: 917 - RNA, 21 nt, synthetic construct
  source 1..21: mol_type = other RNA
  modified_base 1: mod_base = OTHER; note = 2'-O-methyluridine-3'-phosphorothioate
  modified_base 2: mod_base = OTHER; note = 2'-O-methylguanosine-3'-phosphorothioate
  modified_base 3: mod_base = OTHER; note = 2'-O-methyluridine-3'-phosphate
  modified_base 4: mod_base = OTHER; note = 2'-O-methylguanosine-3'-phosphate
  modified_base 5: mod_base = OTHER; note = 2'-O-methyluridine-3'-phosphate
  modified_base 6: mod_base = OTHER; note = 2'-O-methyluridine-3'-phosphate
  modified_base 7: mod_base = OTHER; note = 2'-fluoroadenosine-3'-phosphate
  modified_base 8: mod_base = OTHER; note = 2'-O-methylguanosine-3'-phosphate
  modified_base 9: mod_base = OTHER; note = 2'-fluorouridine-3'-phosphate
  modified_base 10: mod_base = OTHER; note = 2'-fluoroadenosine-3'-phosphate
  modified_base 11: mod_base = OTHER; note = 2'-fluoroadenosine-3'-phosphate
  modified_base 12: mod_base = OTHER; note = 2'-O-methyluridine-3'-phosphate
  modified_base 13: mod_base = OTHER; note = 2'-O-methyladenosine-3'-phosphate
  modified_base 14: mod_base = OTHER; note = 2'-O-methyladenosine-3'-phosphate
  modified_base 15: mod_base = OTHER; note = 2'-O-methyladenosine-3'-phosphate
  modified_base 16: mod_base = OTHER; note = 2'-O-methylcytidine-3'-phosphate
  modified_base 17: mod_base = OTHER; note = 2'-O-methylguanosine-3'-phosphate
  modified_base 18: mod_base = OTHER; note = 2'-O-methyluridine-3'-phosphate
  modified_base 19: mod_base = OTHER; note = 2'-O-methylcytidine-3'-phosphate
  modified_base 20: mod_base = OTHER; note = 2'-O-methyluridine-3'-phosphate
  modified_base 21: mod_base = OTHER; note = 2'-O-methyluridine-3'-phosphate N-[tris(GalNAc-alkyl)-amidodecanoyl)]-4-hydroxyprolinol (Hyp-(GalNAc-alkyl)3)
tgtgttagtaataaacgtctt

SEQ ID NO: 918 - RNA, 21 nt, synthetic construct
  source 1..21: mol_type = other RNA
  modified_base 1: mod_base = OTHER; note = 2'-O-methylguanosine-3'-phosphorothioate
  modified_base 2: mod_base = OTHER; note = 2'-O-methyluridine-3'-phosphorothioate
  modified_base 3: mod_base = OTHER; note = 2'-O-methylguanosine-3'-phosphate
  modified_base 4: mod_base = OTHER; note = 2'-O-methyluridine-3'-phosphate
  modified_base 5: mod_base = OTHER; note = 2'-O-methyluridine-3'-phosphate
  modified_base 6: mod_base = OTHER; note = 2'-O-methyladenosine-3'-phosphate
  modified_base 7: mod_base = OTHER; note = 2'-fluoroguanosine-3'-phosphate
  modified_base 8: mod_base = OTHER; note = 2'-O-methyluridine-3'-phosphate
  modified_base 9: mod_base = OTHER; note = 2'-fluoroadenosine-3'-phosphate
  modified_base 10: mod_base = OTHER; note = 2'-fluoroadenosine-3'-phosphate
  modified_base 11: mod_base = OTHER; note = 2'-fluorouridine-3'-phosphate
  modified_base 12: mod_base = OTHER; note = 2'-O-methyladenosine-3'-phosphate
  modified_base 13: mod_base = OTHER; note = 2'-O-methyladenosine-3'-phosphate
  modified_base 14: mod_base = OTHER; note = 2'-O-methyladenosine-3'-phosphate
  modified_base 15: mod_base = OTHER; note = 2'-O-methylcytidine-3'-phosphate
  modified_base 16: mod_base = OTHER; note = 2'-O-methylguanosine-3'-phosphate
  modified_base 17: mod_base = OTHER; note = 2'-O-methyluridine-3'-phosphate
  modified_base 18: mod_base = OTHER; note = 2'-O-methylcytidine-3'-phosphate
  modified_base 19: mod_base = OTHER; note = 2'-O-methyluridine-3'-phosphate
  modified_base 20: mod_base = OTHER; note = 2'-O-methyluridine-3'-phosphate
  modified_base 21: mod_base = OTHER; note = 2'-O-methyluridine-3'-phosphate N-[tris(GalNAc-alkyl)-amidodecanoyl)]-4-hydroxyprolinol (Hyp-(GalNAc-alkyl)3)
gtgttagtaataaacgtcttt

SEQ ID NO: 919 - RNA, 21 nt, synthetic construct
  source 1..21: mol_type = other RNA
  modified_base 1: mod_base = OTHER; note = 2'-O-methyluridine-3'-phosphorothioate
  modified_base 2: mod_base = OTHER; note = 2'-O-methylguanosine-3'-phosphorothioate
  modified_base 3: mod_base = OTHER; note = 2'-O-methyluridine-3'-phosphate
  modified_base 4: mod_base = OTHER; note = 2'-O-methyluridine-3'-phosphate
  modified_base 5: mod_base = OTHER; note = 2'-O-methyladenosine-3'-phosphate
  modified_base 6: mod_base = OTHER; note = 2'-O-methylguanosine-3'-phosphate
  modified_base 7: mod_base = OTHER; note = 2'-fluorouridine-3'-phosphate
  modified_base 8: mod_base = OTHER; note = 2'-O-methyladenosine-3'-phosphate
  modified_base 9: mod_base = OTHER; note = 2'-fluoroadenosine-3'-phosphate
  modified_base 10: mod_base = OTHER; note = 2'-fluorouridine-3'-phosphate
  modified_base 11: mod_base = OTHER; note = 2'-fluoroadenosine-3'-phosphate
  modified_base 12: mod_base = OTHER; note = 2'-O-methyladenosine-3'-phosphate
  modified_base 13: mod_base = OTHER; note = 2'-O-methyladenosine-3'-phosphate
  modified_base 14: mod_base = OTHER; note = 2'-O-methylcytidine-3'-phosphate
  modified_base 15: mod_base = OTHER; note = 2'-O-methylguanosine-3'-phosphate
  modified_base 16: mod_base = OTHER; note = 2'-O-methyluridine-3'-phosphate
  modified_base 17: mod_base = OTHER; note = 2'-O-methylcytidine-3'-phosphate
  modified_base 18: mod_base = OTHER; note = 2'-O-methyluridine-3'-phosphate
  modified_base 19: mod_base = OTHER; note = 2'-O-methyluridine-3'-phosphate
  modified_base 20: mod_base = OTHER; note = 2'-O-methylguanosine-3'-phosphate
  modified_base 21: mod_base = OTHER; note = 2'-O-methyluridine-3'-phosphate N-[tris(GalNAc-alkyl)-amidodecanoyl)]-4-hydroxyprolinol (Hyp-(GalNAc-alkyl)3)
tgttagtaataaacgtcttgt

SEQ ID NO: 920 - RNA, 21 nt, synthetic construct
  source 1..21: mol_type = other RNA
  modified_base 1: mod_base = OTHER; note = 2'-O-methylguanosine-3'-phosphorothioate
  modified_base 2: mod_base = OTHER; note = 2'-O-methyluridine-3'-phosphorothioate
  modified_base 3: mod_base = OTHER; note = 2'-O-methyluridine-3'-phosphate
  modified_base 4: mod_base = OTHER; note = 2'-O-methyladenosine-3'-phosphate
  modified_base 5: mod_base = OTHER; note = 2'-O-methylguanosine-3'-phosphate
  modified_base 6: mod_base = OTHER; note = 2'-O-methyluridine-3'-phosphate
  modified_base 7: mod_base = OTHER; note = 2'-fluoroadenosine-3'-phosphate
  modified_base 8: mod_base = OTHER; note = 2'-O-methyladenosine-3'-phosphate
  modified_base 9: mod_base = OTHER; note = 2'-fluorouridine-3'-phosphate
  modified_base 10: mod_base = OTHER; note = 2'-fluoroadenosine-3'-phosphate
  modified_base 11: mod_base = OTHER; note = 2'-fluoroadenosine-3'-phosphate
  modified_base 12: mod_base = OTHER; note = 2'-O-methyladenosine-3'-phosphate
  modified_base 13: mod_base = OTHER; note = 2'-O-methylcytidine-3'-phosphate
  modified_base 14: mod_base = OTHER; note = 2'-O-methylguanosine-3'-phosphate
  modified_base 15: mod_base = OTHER; note = 2'-O-methyluridine-3'-phosphate
  modified_base 16: mod_base = OTHER; note = 2'-O-methylcytidine-3'-phosphate
  modified_base 17: mod_base = OTHER; note = 2'-O-methyluridine-3'-phosphate
  modified_base 18: mod_base = OTHER; note = 2'-O-methyluridine-3'-phosphate
  modified_base 19: mod_base = OTHER; note = 2'-O-methylguanosine-3'-phosphate
  modified_base 20: mod_base = OTHER; note = 2'-O-methylcytidine-3'-phosphate
  modified_base 21: mod_base = OTHER; note = 2'-O-methyluridine-3'-phosphate N-[tris(GalNAc-alkyl)-amidodecanoyl)]-4-hydroxyprolinol (Hyp-(GalNAc-alkyl)3)
gttagtaataaacgtcttgct

SEQ ID NO: 921 - RNA, 21 nt, synthetic construct
  source 1..21: mol_type = other RNA
  modified_base 1: mod_base = OTHER; note = 2'-O-methyluridine-3'-phosphorothioate
  modified_base 2: mod_base = OTHER; note = 2'-O-methyluridine-3'-phosphorothioate
  modified_base 3: mod_base = OTHER; note = 2'-O-methyladenosine-3'-phosphate
  modified_base 4: mod_base = OTHER; note = 2'-O-methylguanosine-3'-phosphate
  modified_base 5: mod_base = OTHER; note = 2'-O-methyluridine-3'-phosphate
  modified_base 6: mod_base = OTHER; note = 2'-O-methyladenosine-3'-phosphate
  modified_base 7: mod_base = OTHER; note = 2'-fluoroadenosine-3'-phosphate
  modified_base 8: mod_base = OTHER; note = 2'-O-methyluridine-3'-phosphate
  modified_base 9: mod_base = OTHER; note = 2'-fluoroadenosine-3'-phosphate
  modified_base 10: mod_base = OTHER; note = 2'-fluoroadenosine-3'-phosphate
  modified_base 11: mod_base = OTHER; note = 2'-fluoroadenosine-3'-phosphate
  modified_base 12: mod_base = OTHER; note = 2'-O-methylcytidine-3'-phosphate
  modified_base 13: mod_base = OTHER; note = 2'-O-methylguanosine-3'-phosphate
  modified_base 14: mod_base = OTHER; note = 2'-O-methyluridine-3'-phosphate
  modified_base 15: mod_base = OTHER; note = 2'-O-methylcytidine-3'-phosphate
  modified_base 16: mod_base = OTHER; note = 2'-O-methyluridine-3'-phosphate
  modified_base 17: mod_base = OTHER; note = 2'-O-methyluridine-3'-phosphate
  modified_base 18: mod_base = OTHER; note = 2'-O-methylguanosine-3'-phosphate
  modified_base 19: mod_base = OTHER; note = 2'-O-methylcytidine-3'-phosphate
  modified_base 20: mod_base = OTHER; note = 2'-O-methylcytidine-3'-phosphate
  modified_base 21: mod_base = OTHER; note = 2'-O-methyluridine-3'-phosphate N-[tris(GalNAc-alkyl)-amidodecanoyl)]-4-hydroxyprolinol (Hyp-(GalNAc-alkyl)3)
ttagtaataaacgtcttgcct

SEQ ID NO: 922 - RNA, 21 nt, synthetic construct
  source 1..21: mol_type = other RNA
  modified_base 1: mod_base = OTHER; note = 2'-O-methyladenosine-3'-phosphorothioate
  modified_base 2: mod_base = OTHER; note = 2'-O-methyladenosine-3'-phosphorothioate
  modified_base 3: mod_base = OTHER; note = 2'-O-methyladenosine-3'-phosphate
  modified_base 4: mod_base = OTHER; note = 2'-O-methylcytidine-3'-phosphate
  modified_base 5: mod_base = OTHER; note = 2'-O-methylguanosine-3'-phosphate
  modified_base 6: mod_base = OTHER; note = 2'-O-methyluridine-3'-phosphate
  modified_base 7: mod_base = OTHER; note = 2'-fluorocytidine-3'-phosphate
  modified_base 8: mod_base = OTHER; note = 2'-O-methyluridine-3'-phosphate
  modified_base 9: mod_base = OTHER; note = 2'-fluorouridine-3'-phosphate
  modified_base 10: mod_base = OTHER; note = 2'-fluoroguanosine-3'-phosphate
  modified_base 11: mod_base = OTHER; note = 2'-fluorocytidine-3'-phosphate
  modified_base 12: mod_base = OTHER; note = 2'-O-methylcytidine-3'-phosphate
  modified_base 13: mod_base = OTHER; note = 2'-O-methyladenosine-3'-phosphate
  modified_base 14: mod_base = OTHER; note = 2'-O-methylcytidine-3'-phosphate
  modified_base 15: mod_base = OTHER; note = 2'-O-methyladenosine-3'-phosphate
  modified_base 16: mod_base = OTHER; note = 2'-O-methyladenosine-3'-phosphate
  modified_base 17: mod_base = OTHER; note = 2'-O-methyluridine-3'-phosphate
  modified_base 18: mod_base = OTHER; note = 2'-O-methyladenosine-3'-phosphate
  modified_base 19: mod_base = OTHER; note = 2'-O-methyladenosine-3'-phosphate
  modified_base 20: mod_base = OTHER; note = 2'-O-methylguanosine-3'-phosphate
  modified_base 21: mod_base = OTHER; note = 2'-O-methyluridine-3'-phosphate N-[tris(GalNAc-alkyl)-amidodecanoyl)]-4-hydroxyprolinol (Hyp-(GalNAc-alkyl)3)
aaacgtcttgccacaataagt

SEQ ID NO: 923 - RNA, 21 nt, synthetic construct
  source 1..21: mol_type = other RNA
  modified_base 1: mod_base = OTHER; note = 2'-O-methyladenosine-3'-phosphorothioate
  modified_base 2: mod_base = OTHER; note = 2'-O-methyladenosine-3'-phosphorothioate
  modified_base 3: mod_base = OTHER; note = 2'-O-methylcytidine-3'-phosphate
  modified_base 4: mod_base = OTHER; note = 2'-O-methylguanosine-3'-phosphate
  modified_base 5: mod_base = OTHER; note = 2'-O-methyluridine-3'-phosphate
  modified_base 6: mod_base = OTHER; note = 2'-O-methylcytidine-3'-phosphate
  modified_base 7: mod_base = OTHER; note = 2'-fluorouridine-3'-phosphate
  modified_base 8: mod_base = OTHER; note = 2'-O-methyluridine-3'-phosphate
  modified_base 9: mod_base = OTHER; note = 2'-fluoroguanosine-3'-phosphate
  modified_base 10: mod_base = OTHER; note = 2'-fluorocytidine-3'-phosphate
  modified_base 11: mod_base = OTHER; note = 2'-fluorocytidine-3'-phosphate
  modified_base 12: mod_base = OTHER; note = 2'-O-methyladenosine-3'-phosphate
  modified_base 13: mod_base = OTHER; note = 2'-O-methylcytidine-3'-phosphate
  modified_base 14: mod_base = OTHER; note = 2'-O-methyladenosine-3'-phosphate
  modified_base 15: mod_base = OTHER; note = 2'-O-methyladenosine-3'-phosphate
  modified_base 16: mod_base = OTHER; note = 2'-O-methyluridine-3'-phosphate
  modified_base 17: mod_base = OTHER; note = 2'-O-methyladenosine-3'-phosphate
  modified_base 18: mod_base = OTHER; note = 2'-O-methyladenosine-3'-phosphate
  modified_base 19: mod_base = OTHER; note = 2'-O-methylguanosine-3'-phosphate
  modified_base 20: mod_base = OTHER; note = 2'-O-methylcytidine-3'-phosphate
  modified_base 21: mod_base = OTHER; note = 2'-O-methyluridine-3'-phosphate N-[tris(GalNAc-alkyl)-amidodecanoyl)]-4-hydroxyprolinol (Hyp-(GalNAc-alkyl)3)
aacgtcttgccacaataagct

SEQ ID NO: 924 - RNA, 21 nt, synthetic construct
  source 1..21: mol_type = other RNA
  modified_base 1: mod_base = OTHER; note = 2'-O-methyladenosine-3'-phosphorothioate
  modified_base 2: mod_base = OTHER; note = 2'-O-methylcytidine-3'-phosphorothioate
  modified_base 3: mod_base = OTHER; note = 2'-O-methylguanosine-3'-phosphate
  modified_base 4: mod_base = OTHER; note = 2'-O-methyluridine-3'-phosphate
  modified_base 5: mod_base = OTHER; note = 2'-O-methylcytidine-3'-phosphate
  modified_base 6: mod_base = OTHER; note = 2'-O-methyluridine-3'-phosphate
  modified_base 7: mod_base = OTHER; note = 2'-fluorouridine-3'-phosphate
  modified_base 8: mod_base = OTHER; note = 2'-O-methylguanosine-3'-phosphate
  modified_base 9: mod_base = OTHER; note = 2'-fluorocytidine-3'-phosphate
  modified_base 10: mod_base = OTHER; note = 2'-fluorocytidine-3'-phosphate
  modified_base 11: mod_base = OTHER; note = 2'-fluoroadenosine-3'-phosphate
  modified_base 12: mod_base = OTHER; note = 2'-O-methylcytidine-3'-phosphate
  modified_base 13: mod_base = OTHER; note = 2'-O-methyladenosine-3'-phosphate
  modified_base 14: mod_base = OTHER; note = 2'-O-methyladenosine-3'-phosphate
  modified_base 15: mod_base = OTHER; note = 2'-O-methyluridine-3'-phosphate
  modified_base 16: mod_base = OTHER; note = 2'-O-methyladenosine-3'-phosphate
  modified_base 17: mod_base = OTHER; note = 2'-O-methyladenosine-3'-phosphate
  modified_base 18: mod_base = OTHER; note = 2'-O-methylguanosine-3'-phosphate
  modified_base 19: mod_base = OTHER; note = 2'-O-methylcytidine-3'-phosphate
  modified_base 20: mod_base = OTHER; note = 2'-O-methylcytidine-3'-phosphate
  modified_base 21: mod_base = OTHER; note = 2'-O-methyluridine-3'-phosphate N-[tris(GalNAc-alkyl)-amidodecanoyl)]-4-hydroxyprolinol (Hyp-(GalNAc-alkyl)3)
acgtcttgccacaataagcct

SEQ ID NO: 925 - RNA, 21 nt, synthetic construct
  source 1..21: mol_type = other RNA
  modified_base 1: mod_base = OTHER; note = 2'-O-methyladenosine-3'-phosphorothioate
  modified_base 2: mod_base = OTHER; note = 2'-O-methylguanosine-3'-phosphorothioate
  modified_base 3: mod_base = OTHER; note = 2'-O-methyluridine-3'-phosphate
  modified_base 4: mod_base = OTHER; note = 2'-O-methyluridine-3'-phosphate
  modified_base 5: mod_base = OTHER; note = 2'-O-methylguanosine-3'-phosphate
  modified_base 6: mod_base = OTHER; note = 2'-O-methyladenosine-3'-phosphate
  modified_base 7: mod_base = OTHER; note = 2'-fluoroguanosine-3'-phosphate
  modified_base 8: mod_base = OTHER; note = 2'-O-methyladenosine-3'-phosphate
  modified_base 9: mod_base = OTHER; note = 2'-fluoroadenosine-3'-phosphate
  modified_base 10: mod_base = OTHER; note = 2'-fluorocytidine-3'-phosphate
  modified_base 11: mod_base = OTHER; note = 2'-fluoroadenosine-3'-phosphate
  modified_base 12: mod_base = OTHER; note = 2'-O-methyladenosine-3'-phosphate
  modified_base 13: mod_base = OTHER; note = 2'-O-methyladenosine-3'-phosphate
  modified_base 14: mod_base = OTHER; note = 2'-O-methyladenosine-3'-phosphate
  modified_base 15: mod_base = OTHER; note = 2'-O-methyladenosine-3'-phosphate
  modified_base 16: mod_base = OTHER; note = 2'-O-methyluridine-3'-phosphate
  modified_base 17: mod_base = OTHER; note = 2'-O-methyluridine-3'-phosphate
  modified_base 18: mod_base = OTHER; note = 2'-O-methylguanosine-3'-phosphate
  modified_base 19: mod_base = OTHER; note = 2'-O-methylguanosine-3'-phosphate
  modified_base 20: mod_base = OTHER; note = 2'-O-methylguanosine-3'-phosphate
  modified_base 21: mod_base = OTHER; note = 2'-O-methyluridine-3'-phosphate N-[tris(GalNAc-alkyl)-amidodecanoyl)]-4-hydroxyprolinol (Hyp-(GalNAc-alkyl)3)
agttgagaacaaaaattgggt

SEQ ID NO: 926 - RNA, 23 nt, synthetic construct
  source 1..23: mol_type = other RNA
  modified_base 1: mod_base = OTHER; note = 2'-O-methyladenosine-3'-phosphorothioate
  modified_base 2: mod_base = OTHER; note = 2'-fluorocytidine-3'-phosphorothioate
  modified_base 3: mod_base = OTHER; note = 2'-O-methylcytidine-3'-phosphate
  modified_base 4: mod_base = OTHER; note = 2'-O-methyladenosine-3'-phosphate
  modified_base 5: mod_base = OTHER; note = 2'-O-methylguanosine-3'-phosphate
  modified_base 6: mod_base = OTHER; note = 2'-fluoroadenosine-3'-phosphate
  modified_base 7: mod_base = OTHER; note = 2'-O-methyladenosine-3'-phosphate
  modified_base 8: mod_base = OTHER; note = 2'-fluorocytidine-3'-phosphate
  modified_base 9: mod_base = OTHER; note = 2'-fluoroadenosine-3'-phosphate
  modified_base 10: mod_base = OTHER; note = 2'-O-methyladenosine-3'-phosphate
  modified_base 11: mod_base = OTHER; note = 2'-O-methylcytidine-3'-phosphate
  modified_base 12: mod_base = OTHER; note = 2'-O-methylguanosine-3'-phosphate
  modified_base 13: mod_base = OTHER; note = 2'-O-methylguanosine-3'-phosphate
  modified_base 14: mod_base = OTHER; note = 2'-fluorocytidine-3'-phosphate
  modified_base 15: mod_base = OTHER; note = 2'-O-methyladenosine-3'-phosphate
  modified_base 16: mod_base = OTHER; note = 2'-fluoroguanosine-3'-phosphate
  modified_base 17: mod_base = OTHER; note = 2'-O-methylcytidine-3'-phosphate
  modified_base 18: mod_base = OTHER; note = 2'-O-methyluridine-3'-phosphate
  modified_base 19: mod_base = OTHER; note = 2'-O-methyluridine-3'-phosphate
  modified_base 20: mod_base = OTHER; note = 2'-O-methylcytidine-3'-phosphate
  modified_base 21: mod_base = OTHER; note = 2'-O-methyluridine-3'-phosphorothioate
  modified_base 22: mod_base = OTHER; note = 2'-O-methyluridine-3'-phosphorothioate
  modified_base 23: mod_base = OTHER; note = 2'-O-methylcytidine-3'-phosphate
accagaacaacggcagcttcttc

SEQ ID NO: 927 - RNA, 23 nt, synthetic construct
  source 1..23: mol_type = other RNA
  modified_base 1: mod_base = OTHER; note = 2'-O-methyladenosine-3'-phosphorothioate
  modified_base 2: mod_base = OTHER; note = 2'-fluorocytidine-3'-phosphorothioate
  modified_base 3: mod_base = OTHER; note = 2'-O-methylcytidine-3'-phosphate
  modified_base 4: mod_base = OTHER; note = 2'-O-methylcytidine-3'-phosphate
  modified_base 5: mod_base = OTHER; note = 2'-O-methyladenosine-3'-phosphate
  modified_base 6: mod_base = OTHER; note = 2'-fluoroguanosine-3'-phosphate
  modified_base 7: mod_base = OTHER; note = 2'-O-methyladenosine-3'-phosphate
  modified_base 8: mod_base = OTHER; note = 2'-fluoroadenosine-3'-phosphate
  modified_base 9: mod_base = OTHER; note = 2'-fluorocytidine-3'-phosphate
  modified_base 10: mod_base = OTHER; note = 2'-O-methyladenosine-3'-phosphate
  modified_base 11: mod_base = OTHER; note = 2'-O-methyladenosine-3'-phosphate
  modified_base 12: mod_base = OTHER; note = 2'-O-methylcytidine-3'-phosphate
  modified_base 13: mod_base = OTHER; note = 2'-O-methylguanosine-3'-phosphate
  modified_base 14: mod_base = OTHER; note = 2'-fluoroguanosine-3'-phosphate
  modified_base 15: mod_base = OTHER; note = 2'-O-methylcytidine-3'-phosphate
  modified_base 16: mod_base = OTHER; note = 2'-fluoroadenosine-3'-phosphate
  modified_base 17: mod_base = OTHER; note = 2'-O-methylguanosine-3'-phosphate
  modified_base 18: mod_base = OTHER; note = 2'-O-methylcytidine-3'-phosphate
  modified_base 19: mod_base = OTHER; note = 2'-O-methyluridine-3'-phosphate
  modified_base 20: mod_base = OTHER; note = 2'-O-methyluridine-3'-phosphate
  modified_base 21: mod_base = OTHER; note = 2'-O-methylcytidine-3'-phosphorothioate
  modified_base 22: mod_base = OTHER; note = 2'-O-methyluridine-3'-phosphorothioate
  modified_base 23: mod_base = OTHER; note = 2'-O-methyluridine-3'-phosphate
acccagaacaacggcagcttctt

SEQ ID NO: 928 - RNA, 23 nt, synthetic construct
  source 1..23: mol_type = other RNA
  modified_base 1: mod_base = OTHER; note = 2'-O-methyladenosine-3'-phosphorothioate
  modified_base 2: mod_base = OTHER; note = 2'-fluoroadenosine-3'-phosphorothioate
  modified_base 3: mod_base = OTHER; note = 2'-O-methylcytidine-3'-phosphate
  modified_base 4: mod_base = OTHER; note = 2'-O-methylcytidine-3'-phosphate
  modified_base 5: mod_base = OTHER; note = 2'-O-methylcytidine-3'-phosphate
  modified_base 6: mod_base = OTHER; note = 2'-fluoroadenosine-3'-phosphate
  modified_base 7: mod_base = OTHER; note = 2'-O-methylguanosine-3'-phosphate
  modified_base 8: mod_base = OTHER; note = 2'-fluoroadenosine-3'-phosphate
  modified_base 9: mod_base = OTHER; note = 2'-fluoroadenosine-3'-phosphate
  modified_base 10: mod_base = OTHER; note = 2'-O-methylcytidine-3'-phosphate
  modified_base 11: mod_base = OTHER; note = 2'-O-methyladenosine-3'-phosphate
  modified_base 12: mod_base = OTHER; note = 2'-O-methyladenosine-3'-phosphate
  modified_base 13: mod_base = OTHER; note = 2'-O-methylcytidine-3'-phosphate
  modified_base 14: mod_base = OTHER; note = 2'-fluoroguanosine-3'-phosphate
  modified_base 15: mod_base = OTHER; note = 2'-O-methylguanosine-3'-phosphate
  modified_base 16: mod_base = OTHER; note = 2'-fluorocytidine-3'-phosphate
  modified_base 17: mod_base = OTHER; note = 2'-O-methyladenosine-3'-phosphate
  modified_base 18: mod_base = OTHER; note = 2'-O-methylguanosine-3'-phosphate
  modified_base 19: mod_base = OTHER; note = 2'-O-methylcytidine-3'-phosphate
  modified_base 20: mod_base = OTHER; note = 2'-O-methyluridine-3'-phosphate
  modified_base 21: mod_base = OTHER; note = 2'-O-methyluridine-3'-phosphorothioate
  modified_base 22: mod_base = OTHER; note = 2'-O-methylcytidine-3'-phosphorothioate
  modified_base 23: mod_base = OTHER; note = 2'-O-methyluridine-3'-phosphate
aacccagaacaacggcagcttct

SEQ ID NO: 929 - RNA, 23 nt, synthetic construct
  source 1..23: mol_type = other RNA
  modified_base 1: mod_base = OTHER; note = 2'-O-methyladenosine-3'-phosphorothioate
  modified_base 2: mod_base = OTHER; note = 2'-fluoroadenosine-3'-phosphorothioate
  modified_base 3: mod_base = OTHER; note = 2'-O-methylguanosine-3'-phosphate
  modified_base 4: mod_base = OTHER; note = 2'-O-methyluridine-3'-phosphate
  modified_base 5: mod_base = OTHER; note = 2'-O-methyladenosine-3'-phosphate
  modified_base 6: mod_base = OTHER; note = 2'-fluorocytidine-3'-phosphate
  modified_base 7: mod_base = OTHER; note = 2'-O-methylcytidine-3'-phosphate
  modified_base 8: mod_base = OTHER; note = 2'-fluorocytidine-3'-phosphate
  modified_base 9: mod_base = OTHER; note = 2'-fluoroadenosine-3'-phosphate
  modified_base 10: mod_base = OTHER; note = 2'-O-methylguanosine-3'-phosphate
  modified_base 11: mod_base = OTHER; note = 2'-O-methyladenosine-3'-phosphate
  modified_base 12: mod_base = OTHER; note = 2'-O-methyladenosine-3'-phosphate
  modified_base 13: mod_base = OTHER; note = 2'-O-methylcytidine-3'-phosphate
  modified_base 14: mod_base = OTHER; note = 2'-fluoroadenosine-3'-phosphate
  modified_base 15: mod_base = OTHER; note = 2'-O-methyladenosine-3'-phosphate
  modified_base 16: mod_base = OTHER; note = 2'-fluorocytidine-3'-phosphate
  modified_base 17: mod_base = OTHER; note = 2'-O-methylguanosine-3'-phosphate
  modified_base 18: mod_base = OTHER; note = 2'-O-methylguanosine-3'-phosphate
  modified_base 19: mod_base = OTHER; note = 2'-O-methylcytidine-3'-phosphate
  modified_base 20: mod_base = OTHER; note = 2'-O-methyladenosine-3'-phosphate
  modified_base 21: mod_base = OTHER; note = 2'-O-methylguanosine-3'-phosphorothioate
  modified_base 22: mod_base = OTHER; note = 2'-O-methylcytidine-3'-phosphorothioate
  modified_base 23: mod_base = OTHER; note = 2'-O-methyluridine-3'-phosphate
aagtacccagaacaacggcagct

SEQ ID NO: 930 - RNA, 23 nt, synthetic construct
  source 1..23: mol_type = other RNA
  modified_base 1: mod_base = OTHER; note = 2'-O-methyladenosine-3'-phosphorothioate
  modified_base 2: mod_base = OTHER; note = 2'-fluorocytidine-3'-phosphorothioate
  modified_base 3: mod_base = OTHER; note = 2'-O-methyluridine-3'-phosphate
  modified_base 4: mod_base = OTHER; note = 2'-O-methylguanosine-3'-phosphate
  modified_base 5: mod_base = OTHER; note = 2'-O-methyluridine-3'-phosphate
  modified_base 6: mod_base = OTHER; note = 2'-fluoroadenosine-3'-phosphate
  modified_base 7: mod_base = OTHER; note = 2'-O-methylguanosine-3'-phosphate
  modified_base 8: mod_base = OTHER; note = 2'-fluorouridine-3'-phosphate
  modified_base 9: mod_base = OTHER; note = 2'-fluoroadenosine-3'-phosphate
  modified_base 10: mod_base = OTHER; note = 2'-O-methylcytidine-3'-phosphate
  modified_base 11: mod_base = OTHER; note = 2'-O-methylcytidine-3'-phosphate
  modified_base 12: mod_base = OTHER; note = 2'-O-methylcytidine-3'-phosphate
  modified_base 13: mod_base = OTHER; note = 2'-O-methyladenosine-3'-phosphate
  modified_base 14: mod_base = OTHER; note = 2'-fluoroguanosine-3'-phosphate
  modified_base 15: mod_base = OTHER; note = 2'-O-methyladenosine-3'-phosphate
  modified_base 16: mod_base = OTHER; note = 2'-fluoroadenosine-3'-phosphate
  modified_base 17: mod_base = OTHER; note = 2'-O-methylcytidine-3'-phosphate
  modified_base 18: mod_base = OTHER; note = 2'-O-methyladenosine-3'-phosphate
  modified_base 19: mod_base = OTHER; note = 2'-O-methyladenosine-3'-phosphate
  modified_base 20: mod_base = OTHER; note = 2'-O-methylcytidine-3'-phosphate
  modified_base 21: mod_base = OTHER; note = 2'-O-methylguanosine-3'-phosphorothioate
  modified_base 22: mod_base = OTHER; note = 2'-O-methylguanosine-3'-phosphorothioate
  modified_base 23: mod_base = OTHER; note = 2'-O-methylcytidine-3'-phosphate
actgtagtacccagaacaacggc

SEQ ID NO: 931 - RNA, 23 nt, synthetic construct
  source 1..23: mol_type = other RNA
  modified_base 1: mod_base = OTHER; note = 2'-O-methyladenosine-3'-phosphorothioate
  modified_base 2: mod_base = OTHER; note = 2'-fluorocytidine-3'-phosphorothioate
  modified_base 3: mod_base = OTHER; note = 2'-O-methylcytidine-3'-phosphate
  modified_base 4: mod_base = OTHER; note = 2'-O-methyluridine-3'-phosphate
  modified_base 5: mod_base = OTHER; note = 2'-O-methyluridine-3'-phosphate
  modified_base 6: mod_base = OTHER; note = 2'-fluorocytidine-3'-phosphate
  modified_base 7: mod_base = OTHER; note = 2'-O-methyluridine-3'-phosphate
  modified_base 8: mod_base = OTHER; note = 2'-fluoroguanosine-3'-phosphate
  modified_base 9: mod_base = OTHER; note = 2'-fluorocytidine-3'-phosphate
  modified_base 10: mod_base = OTHER; note = 2'-O-methyluridine-3'-phosphate
  modified_base 11: mod_base = OTHER; note = 2'-O-methylguanosine-3'-phosphate
  modified_base 12: mod_base = OTHER; note = 2'-O-methyluridine-3'-phosphate
  modified_base 13: mod_base = OTHER; note = 2'-O-methyladenosine-3'-phosphate
  modified_base 14: mod_base = OTHER; note = 2'-fluoroguanosine-3'-phosphate
  modified_base 15: mod_base = OTHER; note = 2'-O-methyluridine-3'-phosphate
  modified_base 16: mod_base = OTHER; note = 2'-fluoroadenosine-3'-phosphate
  modified_base 17: mod_base = OTHER; note = 2'-O-methylcytidine-3'-phosphate
  modified_base 18: mod_base = OTHER; note = 2'-O-methylcytidine-3'-phosphate
  modified_base 19: mod_base = OTHER; note = 2'-O-methylcytidine-3'-phosphate
  modified_base 20: mod_base = OTHER; note = 2'-O-methyladenosine-3'-phosphate
  modified_base 21: mod_base = OTHER; note = 2'-O-methylguanosine-3'-phosphorothioate
  modified_base 22: mod_base = OTHER; note = 2'-O-methyladenosine-3'-phosphorothioate
  modified_base 23: mod_base = OTHER; note = 2'-O-methyladenosine-3'-phosphate
accttctgctgtagtacccagaa

SEQ ID NO: 932 - RNA, 23 nt, synthetic construct
  source 1..23: mol_type = other RNA
  modified_base 1: mod_base = OTHER; note = 2'-O-methyladenosine-3'-phosphorothioate
  modified_base 2: mod_base = OTHER; note = 2'-fluorocytidine-3'-phosphorothioate
  modified_base 3: mod_base = OTHER; note = 2'-O-methyladenosine-3'-phosphate
  modified_base 4: mod_base = OTHER; note = 2'-O-methyluridine-3'-phosphate
  modified_base 5: mod_base = OTHER; note = 2'-O-methyladenosine-3'-phosphate
  modified_base 6: mod_base = OTHER; note = 2'-fluorocytidine-3'-phosphate
  modified_base 7: mod_base = OTHER; note = 2'-O-methylcytidine-3'-phosphate
  modified_base 8: mod_base = OTHER; note = 2'-fluorocytidine-3'-phosphate
  modified_base 9: mod_base = OTHER; note = 2'-fluorouridine-3'-phosphate
  modified_base 10: mod_base = OTHER; note = 2'-O-methyluridine-3'-phosphate
  modified_base 11: mod_base = OTHER; note = 2'-O-methylcytidine-3'-phosphate
  modified_base 12: mod_base = OTHER; note = 2'-O-methyluridine-3'-phosphate
  modified_base 13: mod_base = OTHER; note = 2'-O-methylguanosine-3'-phosphate
  modified_base 14: mod_base = OTHER; note = 2'-fluorocytidine-3'-phosphate
  modified_base 15: mod_base = OTHER; note = 2'-O-methyluridine-3'-phosphate
  modified_base 16: mod_base = OTHER; note = 2'-fluoroguanosine-3'-phosphate
  modified_base 17: mod_base = OTHER; note = 2'-O-methyluridine-3'-phosphate
  modified_base 18: mod_base = OTHER; note = 2'-O-methyladenosine-3'-phosphate
  modified_base 19: mod_base = OTHER; note = 2'-O-methylguanosine-3'-phosphate
  modified_base 20: mod_base = OTHER; note = 2'-O-methyluridine-3'-phosphate
  modified_base 21: mod_base = OTHER; note = 2'-O-methyladenosine-3'-phosphorothioate
  modified_base 22: mod_base = OTHER; note = 2'-O-methylcytidine-3'-phosphorothioate
  modified_base 23: mod_base = OTHER; note = 2'-O-methylcytidine-3'-phosphate
acatacccttctgctgtagtacc

SEQ ID NO: 933 - RNA, 23 nt, synthetic construct
  source 1..23: mol_type = other RNA
  modified_base 1: mod_base = OTHER; note = 2'-O-methyladenosine-3'-phosphorothioate
  modified_base 2: mod_base = OTHER; note = 2'-fluoroguanosine-3'-phosphorothioate
  modified_base 3: mod_base = OTHER; note = 2'-O-methylcytidine-3'-phosphate
  modified_base 4: mod_base = OTHER; note = 2'-O-methyladenosine-3'-phosphate
  modified_base 5: mod_base = OTHER; note = 2'-O-methyluridine-3'-phosphate
  modified_base 6: mod_base = OTHER; note = 2'-fluoroadenosine-3'-phosphate
  modified_base 7: mod_base = OTHER; note = 2'-O-methylcytidine-3'-phosphate
  modified_base 8: mod_base = OTHER; note = 2'-fluorocytidine-3'-phosphate
  modified_base 9: mod_base = OTHER; note = 2'-fluorocytidine-3'-phosphate
  modified_base 10: mod_base = OTHER; note = 2'-O-methyluridine-3'-phosphate
  modified_base 11: mod_base = OTHER; note = 2'-O-methyluridine-3'-phosphate
  modified_base 12: mod_base = OTHER; note = 2'-O-methylcytidine-3'-phosphate
  modified_base 13: mod_base = OTHER; note = 2'-O-methyluridine-3'-phosphate
  modified_base 14: mod_base = OTHER; note = 2'-fluoroguanosine-3'-phosphate
  modified_base 15: mod_base = OTHER; note = 2'-O-methylcytidine-3'-phosphate
  modified_base 16: mod_base = OTHER; note = 2'-fluorouridine-3'-phosphate
  modified_base 17: mod_base = OTHER; note = 2'-O-methylguanosine-3'-phosphate
  modified_base 18: mod_base = OTHER; note = 2'-O-methyluridine-3'-phosphate
  modified_base 19: mod_base = OTHER; note = 2'-O-methyladenosine-3'-phosphate
  modified_base 20: mod_base = OTHER; note = 2'-O-methylguanosine-3'-phosphate
  modified_base 21: mod_base = OTHER; note = 2'-O-methyluridine-3'-phosphorothioate
  modified_base 22: mod_base = OTHER; note = 2'-O-methyladenosine-3'-phosphorothioate
  modified_base 23: mod_base = OTHER; note = 2'-O-methylcytidine-3'-phosphate
agcatacccttctgctgtagtac

SEQ ID NO: 934 - RNA, 23 nt, synthetic construct
  source 1..23: mol_type = other RNA
  modified_base 1: mod_base = OTHER; note = 2'-O-methyladenosine-3'-phosphorothioate
  modified_base 2: mod_base = OTHER; note = 2'-fluorocytidine-3'-phosphorothioate
  modified_base 3: mod_base = OTHER; note = 2'-O-methylguanosine-3'-phosphate
  modified_base 4: mod_base = OTHER; note = 2'-O-methylcytidine-3'-phosphate
  modified_base 5: mod_base = OTHER; note = 2'-O-methyladenosine-3'-phosphate
  modified_base 6: mod_base = OTHER; note = 2'-fluorouridine-3'-phosphate
  modified_base 7: mod_base = OTHER; note = 2'-O-methyladenosine-3'-phosphate
  modified_base 8: mod_base = OTHER; note = 2'-fluorocytidine-3'-phosphate
  modified_base 9: mod_base = OTHER; note = 2'-fluorocytidine-3'-phosphate
  modified_base 10: mod_base = OTHER; note = 2'-O-methylcytidine-3'-phosphate
  modified_base 11: mod_base = OTHER; note = 2'-O-methyluridine-3'-phosphate
  modified_base 12: mod_base = OTHER; note = 2'-O-methyluridine-3'-phosphate
  modified_base 13: mod_base = OTHER; note = 2'-O-methylcytidine-3'-phosphate
  modified_base 14: mod_base = OTHER; note = 2'-fluorouridine-3'-phosphate
  modified_base 15: mod_base = OTHER; note = 2'-O-methylguanosine-3'-phosphate
  modified_base 16: mod_base = OTHER; note = 2'-fluorocytidine-3'-phosphate
  modified_base 17: mod_base = OTHER; note = 2'-O-methyluridine-3'-phosphate
  modified_base 18: mod_base = OTHER; note = 2'-O-methylguanosine-3'-phosphate
  modified_base 19: mod_base = OTHER; note = 2'-O-methyluridine-3'-phosphate
  modified_base 20: mod_base = OTHER; note = 2'-O-methyladenosine-3'-phosphate
  modified_base 21: mod_base = OTHER; note = 2'-O-methylguanosine-3'-phosphorothioate
  modified_base 22: mod_base = OTHER; note = 2'-O-methyluridine-3'-phosphorothioate
  modified_base 23: mod_base = OTHER; note = 2'-O-methyladenosine-3'-phosphate
acgcatacccttctgctgtagta

SEQ ID NO: 935 - RNA, 23 nt, synthetic construct
  source 1..23: mol_type = other RNA
  modified_base 1: mod_base = OTHER; note = 2'-O-methyladenosine-3'-phosphorothioate
  modified_base 2: mod_base = OTHER; note = 2'-fluorocytidine-3'-phosphorothioate
  modified_base 3: mod_base = OTHER; note = 2'-O-methylcytidine-3'-phosphate
  modified_base 4: mod_base = OTHER; note = 2'-O-methylguanosine-3'-phosphate
  modified_base 5: mod_base = OTHER; note = 2'-O-methylcytidine-3'-phosphate
  modified_base 6: mod_base = OTHER; note = 2'-fluoroadenosine-3'-phosphate
  modified_base 7: mod_base = OTHER; note = 2'-O-methyluridine-3'-phosphate
  modified_base 8: mod_base = OTHER; note = 2'-fluoroadenosine-3'-phosphate
  modified_base 9: mod_base = OTHER; note = 2'-fluorocytidine-3'-phosphate
  modified_base 10: mod_base = OTHER; note = 2'-O-methylcytidine-3'-phosphate
  modified_base 11: mod_base = OTHER; note = 2'-O-methylcytidine-3'-phosphate
  modified_base 12: mod_base = OTHER; note = 2'-O-methyluridine-3'-phosphate
  modified_base 13: mod_base = OTHER; note = 2'-O-methyluridine-3'-phosphate
  modified_base 14: mod_base = OTHER; note = 2'-fluorocytidine-3'-phosphate
  modified_base 15: mod_base = OTHER; note = 2'-O-methyluridine-3'-phosphate
  modified_base 16: mod_base = OTHER; note = 2'-fluoroguanosine-3'-phosphate
  modified_base 17: mod_base = OTHER; note = 2'-O-methylcytidine-3'-phosphate
  modified_base 18: mod_base = OTHER; note = 2'-O-methyluridine-3'-phosphate
  modified_base 19: mod_base = OTHER; note = 2'-O-methylguanosine-3'-phosphate
  modified_base 20: mod_base = OTHER; note = 2'-O-methyluridine-3'-phosphate
  modified_base 21: mod_base = OTHER; note = 2'-O-methyladenosine-3'-phosphorothioate
  modified_base 22: mod_base = OTHER; note = 2'-O-methylguanosine-3'-phosphorothioate
  modified_base 23: mod_base = OTHER; note = 2'-O-methyluridine-3'-phosphate
accgcatacccttctgctgtagt

SEQ ID NO: 936 - RNA, 23 nt, synthetic construct
  source 1..23: mol_type = other RNA
  modified_base 1: mod_base = OTHER; note = 2'-O-methyladenosine-3'-phosphorothioate
  modified_base 2: mod_base = OTHER; note = 2'-fluorouridine -3'-phosphorothioate
  modified_base 3: mod_base = OTHER; note = 2'-O-methylcytidine-3'-phosphate
  modified_base 4: mod_base = OTHER; note = 2'-O-methylcytidine-3'-phosphate
  modified_base 5: mod_base = OTHER; note = 2'-O-methylguanosine-3'-phosphate
  modified_base 6: mod_base = OTHER; note = 2'-fluorocytidine-3'-phosphate
  modified_base 7: mod_base = OTHER; note = 2'-O-methyladenosine-3'-phosphate
  modified_base 8: mod_base = OTHER; note = 2'-fluorouridine-3'-phosphate
  modified_base 9: mod_base = OTHER; note = 2'-fluoroadenosine-3'-phosphate
  modified_base 10: mod_base = OTHER; note = 2'-O-methylcytidine-3'-phosphate
  modified_base 11: mod_base = OTHER; note = 2'-O-methylcytidine-3'-phosphate
  modified_base 12: mod_base = OTHER; note = 2'-O-methylcytidine-3'-phosphate
  modified_base 13: mod_base = OTHER; note = 2'-O-methyluridine-3'-phosphate
  modified_base 14: mod_base = OTHER; note = 2'-fluorouridine-3'-phosphate
  modified_base 15: mod_base = OTHER; note = 2'-O-methylcytidine-3'-phosphate
  modified_base 16: mod_base = OTHER; note = 2'-fluorouridine-3'-phosphate
  modified_base 17: mod_base = OTHER; note = 2'-O-methylguanosine-3'-phosphate
  modified_base 18: mod_base = OTHER; note = 2'-O-methylcytidine-3'-phosphate
  modified_base 19: mod_base = OTHER; note = 2'-O-methyluridine-3'-phosphate
  modified_base 20: mod_base = OTHER; note = 2'-O-methylguanosine-3'-phosphate
  modified_base 21: mod_base = OTHER; note = 2'-O-methyluridine-3'-phosphorothioate
  modified_base 22: mod_base = OTHER; note = 2'-O-methyladenosine-3'-phosphorothioate
  modified_base 23: mod_base = OTHER; note = 2'-O-methylguanosine-3'-phosphate
atccgcatacccttctgctgtag

SEQ ID NO: 937 - RNA, 23 nt, synthetic construct
  source 1..23: mol_type = other RNA
  modified_base 1: mod_base = OTHER; note = 2'-O-methyladenosine-3'-phosphorothioate
  modified_base 2: mod_base = OTHER; note = 2'-fluorocytidine-3'-phosphorothioate
  modified_base 3: mod_base = OTHER; note = 2'-O-methyluridine-3'-phosphate
  modified_base 4: mod_base = OTHER; note = 2'-O-methyluridine-3'-phosphate
  modified_base 5: mod_base = OTHER; note = 2'-O-methylcytidine-3'-phosphate
  modified_base 6: mod_base = OTHER; note = 2'-fluorocytidine-3'-phosphate
  modified_base 7: mod_base = OTHER; note = 2'-O-methylguanosine-3'-phosphate
  modified_base 8: mod_base = OTHER; note = 2'-fluorocytidine-3'-phosphate
  modified_base 9: mod_base = OTHER; note = 2'-fluoroadenosine-3'-phosphate
  modified_base 10: mod_base = OTHER; note = 2'-O-methyluridine-3'-phosphate
  modified_base 11: mod_base = OTHER; note = 2'-O-methyladenosine-3'-phosphate
  modified_base 12: mod_base = OTHER; note = 2'-O-methylcytidine-3'-phosphate
  modified_base 13: mod_base = OTHER; note = 2'-O-methylcytidine-3'-phosphate
  modified_base 14: mod_base = OTHER; note = 2'-fluorocytidine-3'-phosphate
  modified_base 15: mod_base = OTHER; note = 2'-O-methyluridine-3'-phosphate
  modified_base 16: mod_base = OTHER; note = 2'-fluorouridine-3'-phosphate
  modified_base 17: mod_base = OTHER; note = 2'-O-methylcytidine-3'-phosphate
  modified_base 18: mod_base = OTHER; note = 2'-O-methyluridine-3'-phosphate
  modified_base 19: mod_base = OTHER; note = 2'-O-methylguanosine-3'-phosphate
  modified_base 20: mod_base = OTHER; note = 2'-O-methylcytidine-3'-phosphate
  modified_base 21: mod_base = OTHER; note = 2'-O-methyluridine-3'-phosphorothioate
  modified_base 22: mod_base = OTHER; note = 2'-O-methylguanosine-3'-phosphorothioate
  modified_base 23: mod_base = OTHER; note = 2'-O-methyluridine-3'-phosphate
acttccgcatacccttctgctgt

SEQ ID NO: 938 - RNA, 23 nt, synthetic construct
  source 1..23: mol_type = other RNA
  modified_base 1: mod_base = OTHER; note = 2'-O-methyladenosine-3'-phosphorothioate
  modified_base 2: mod_base = OTHER; note = 2'-fluorocytidine-3'-phosphorothioate
  modified_base 3: mod_base = OTHER; note = 2'-O-methyladenosine-3'-phosphate
  modified_base 4: mod_base = OTHER; note = 2'-O-methylguanosine-3'-phosphate
  modified_base 5: mod_base = OTHER; note = 2'-O-methylguanosine-3'-phosphate
  modified_base 6: mod_base = OTHER; note = 2'-fluorouridine-3'-phosphate
  modified_base 7: mod_base = OTHER; note = 2'-O-methyladenosine-3'-phosphate
  modified_base 8: mod_base = OTHER; note = 2'-fluorocytidine-3'-phosphate
  modified_base 9: mod_base = OTHER; note = 2'-fluorouridine-3'-phosphate
  modified_base 10: mod_base = OTHER; note = 2'-O-methylcytidine-3'-phosphate
  modified_base 11: mod_base = OTHER; note = 2'-O-methyluridine-3'-phosphate
  modified_base 12: mod_base = OTHER; note = 2'-O-methylcytidine-3'-phosphate
  modified_base 13: mod_base = OTHER; note = 2'-O-methyladenosine-3'-phosphate
  modified_base 14: mod_base = OTHER; note = 2'-fluorouridine-3'-phosphate
  modified_base 15: mod_base = OTHER; note = 2'-O-methyluridine-3'-phosphate
  modified_base 16: mod_base = OTHER; note = 2'-fluoroguanosine-3'-phosphate
  modified_base 17: mod_base = OTHER; note = 2'-O-methyluridine-3'-phosphate
  modified_base 18: mod_base = OTHER; note = 2'-O-methylguanosine-3'-phosphate
  modified_base 19: mod_base = OTHER; note = 2'-O-methylguanosine-3'-phosphate
  modified_base 20: mod_base = OTHER; note = 2'-O-methyladenosine-3'-phosphate
  modified_base 21: mod_base = OTHER; note = 2'-O-methyluridine-3'-phosphorothioate
  modified_base 22: mod_base = OTHER; note = 2'-O-methylguanosine-3'-phosphorothioate
  modified_base 23: mod_base = OTHER; note = 2'-O-methyladenosine-3'-phosphate
acaggtactctcattgtggatga

SEQ ID NO: 939 - RNA, 23 nt, synthetic construct
  source 1..23: mol_type = other RNA
  modified_base 1: mod_base = OTHER; note = 2'-O-methyladenosine-3'-phosphorothioate
  modified_base 2: mod_base = OTHER; note = 2'-fluorocytidine-3'-phosphorothioate
  modified_base 3: mod_base = OTHER; note = 2'-O-methyluridine-3'-phosphate
  modified_base 4: mod_base = OTHER; note = 2'-O-methylcytidine-3'-phosphate
  modified_base 5: mod_base = OTHER; note = 2'-O-methyladenosine-3'-phosphate
  modified_base 6: mod_base = OTHER; note = 2'-fluorocytidine-3'-phosphate
  modified_base 7: mod_base = OTHER; note = 2'-O-methyladenosine-3'-phosphate
  modified_base 8: mod_base = OTHER; note = 2'-fluoroguanosine-3'-phosphate
  modified_base 9: mod_base = OTHER; note = 2'-fluoroguanosine-3'-phosphate
  modified_base 10: mod_base = OTHER; note = 2'-O-methyluridine-3'-phosphate
  modified_base 11: mod_base = OTHER; note = 2'-O-methyladenosine-3'-phosphate
  modified_base 12: mod_base = OTHER; note = 2'-O-methylcytidine-3'-phosphate
  modified_base 13: mod_base = OTHER; note = 2'-O-methyluridine-3'-phosphate
  modified_base 14: mod_base = OTHER; note = 2'-fluorocytidine-3'-phosphate
  modified_base 15: mod_base = OTHER; note = 2'-O-methyluridine-3'-phosphate
  modified_base 16: mod_base = OTHER; note = 2'-fluorocytidine-3'-phosphate
  modified_base 17: mod_base = OTHER; note = 2'-O-methyladenosine-3'-phosphate
  modified_base 18: mod_base = OTHER; note = 2'-O-methyluridine-3'-phosphate
  modified_base 19: mod_base = OTHER; note = 2'-O-methyluridine-3'-phosphate
  modified_base 20: mod_base = OTHER; note = 2'-O-methylguanosine-3'-phosphate
  modified_base 21: mod_base = OTHER; note = 2'-O-methyluridine-3'-phosphorothioate
  modified_base 22: mod_base = OTHER; note = 2'-O-methylguanosine-3'-phosphorothioate
  modified_base 23: mod_base = OTHER; note = 2'-O-methylguanosine-3'-phosphate
actcacaggtactctcattgtgg

SEQ ID NO: 940 - RNA, 23 nt, synthetic construct
  source 1..23: mol_type = other RNA
  modified_base 1: mod_base = OTHER; note = 2'-O-methyladenosine-3'-phosphorothioate
  modified_base 2: mod_base = OTHER; note = 2'-fluorouridine -3'-phosphorothioate
  modified_base 3: mod_base = OTHER; note = 2'-O-methylguanosine-3'-phosphate
  modified_base 4: mod_base = OTHER; note = 2'-O-methyladenosine-3'-phosphate
  modified_base 5: mod_base = OTHER; note = 2'-O-methyladenosine-3'-phosphate
  modified_base 6: mod_base = OTHER; note = 2'-fluorouridine-3'-phosphate
  modified_base 7: mod_base = OTHER; note = 2'-O-methyluridine-3'-phosphate
  modified_base 8: mod_base = OTHER; note = 2'-fluoroguanosine-3'-phosphate
  modified_base 9: mod_base = OTHER; note = 2'-fluoroguanosine-3'-phosphate
  modified_base 10: mod_base = OTHER; note = 2'-O-methyladenosine-3'-phosphate
  modified_base 11: mod_base = OTHER; note = 2'-O-methylguanosine-3'-phosphate
  modified_base 12: mod_base = OTHER; note = 2'-O-methylcytidine-3'-phosphate
  modified_base 13: mod_base = OTHER; note = 2'-O-methyladenosine-3'-phosphate
  modified_base 14: mod_base = OTHER; note = 2'-fluoroguanosine-3'-phosphate
  modified_base 15: mod_base = OTHER; note = 2'-O-methylguanosine-3'-phosphate
  modified_base 16: mod_base = OTHER; note = 2'-fluorouridine-3'-phosphate
  modified_base 17: mod_base = OTHER; note = 2'-O-methyladenosine-3'-phosphate
  modified_base 18: mod_base = OTHER; note = 2'-O-methyluridine-3'-phosphate
  modified_base 19: mod_base = OTHER; note = 2'-O-methylguanosine-3'-phosphate
  modified_base 20: mod_base = OTHER; note = 2'-O-methyladenosine-3'-phosphate
  modified_base 21: mod_base = OTHER; note = 2'-O-methyladenosine-3'-phosphorothioate
  modified_base 22: mod_base = OTHER; note = 2'-O-methylguanosine-3'-phosphorothioate
  modified_base 23: mod_base = OTHER; note = 2'-O-methylguanosine-3'-phosphate
atgaattggagcaggtatgaagg

SEQ ID NO: 941 - RNA, 23 nt, synthetic construct
  source 1..23: mol_type = other RNA
  modified_base 1: mod_base = OTHER; note = 2'-O-methyladenosine-3'-phosphorothioate
  modified_base 2: mod_base = OTHER; note = 2'-fluorocytidine-3'-phosphorothioate
  modified_base 3: mod_base = OTHER; note = 2'-O-methyluridine-3'-phosphate
  modified_base 4: mod_base = OTHER; note = 2'-O-methylguanosine-3'-phosphate
  modified_base 5: mod_base = OTHER; note = 2'-O-methyladenosine-3'-phosphate
  modified_base 6: mod_base = OTHER; note = 2'-fluoroadenosine-3'-phosphate
  modified_base 7: mod_base = OTHER; note = 2'-O-methyluridine-3'-phosphate
  modified_base 8: mod_base = OTHER; note = 2'-fluorouridine-3'-phosphate
  modified_base 9: mod_base = OTHER; note = 2'-fluoroguanosine-3'-phosphate
  modified_base 10: mod_base = OTHER; note = 2'-O-methylguanosine-3'-phosphate
  modified_base 11: mod_base = OTHER; note = 2'-O-methyladenosine-3'-phosphate
  modified_base 12: mod_base = OTHER; note = 2'-O-methylguanosine-3'-phosphate
  modified_base 13: mod_base = OTHER; note = 2'-O-methylcytidine-3'-phosphate
  modified_base 14: mod_base = OTHER; note = 2'-fluoroadenosine-3'-phosphate
  modified_base 15: mod_base = OTHER; note = 2'-O-methylguanosine-3'-phosphate
  modified_base 16: mod_base = OTHER; note = 2'-fluoroguanosine-3'-phosphate
  modified_base 17: mod_base = OTHER; note = 2'-O-methyluridine-3'-phosphate
  modified_base 18: mod_base = OTHER; note = 2'-O-methyladenosine-3'-phosphate
  modified_base 19: mod_base = OTHER; note = 2'-O-methyluridine-3'-phosphate
  modified_base 20: mod_base = OTHER; note = 2'-O-methylguanosine-3'-phosphate
  modified_base 21: mod_base = OTHER; note = 2'-O-methyladenosine-3'-phosphorothioate
  modified_base 22: mod_base = OTHER; note = 2'-O-methyladenosine-3'-phosphorothioate
  modified_base 23: mod_base = OTHER; note = 2'-O-methylguanosine-3'-phosphate
actgaattggagcaggtatgaag

SEQ ID NO: 942 - RNA, 23 nt, synthetic construct
  source 1..23: mol_type = other RNA
  modified_base 1: mod_base = OTHER; note = 2'-O-methyladenosine-3'-phosphorothioate
  modified_base 2: mod_base = OTHER; note = 2'-fluorocytidine-3'-phosphorothioate
  modified_base 3: mod_base = OTHER; note = 2'-O-methylcytidine-3'-phosphate
  modified_base 4: mod_base = OTHER; note = 2'-O-methyluridine-3'-phosphate
  modified_base 5: mod_base = OTHER; note = 2'-O-methylguanosine-3'-phosphate
  modified_base 6: mod_base = OTHER; note = 2'-fluoroadenosine-3'-phosphate
  modified_base 7: mod_base = OTHER; note = 2'-O-methyladenosine-3'-phosphate
  modified_base 8: mod_base = OTHER; note = 2'-fluorouridine-3'-phosphate
  modified_base 9: mod_base = OTHER; note = 2'-fluorouridine-3'-phosphate
  modified_base 10: mod_base = OTHER; note = 2'-O-methylguanosine-3'-phosphate
  modified_base 11: mod_base = OTHER; note = 2'-O-methylguanosine-3'-phosphate
  modified_base 12: mod_base = OTHER; note = 2'-O-methyladenosine-3'-phosphate
  modified_base 13: mod_base = OTHER; note = 2'-O-methylguanosine-3'-phosphate
  modified_base 14: mod_base = OTHER; note = 2'-fluorocytidine-3'-phosphate
  modified_base 15: mod_base = OTHER; note = 2'-O-methyladenosine-3'-phosphate
  modified_base 16: mod_base = OTHER; note = 2'-fluoroguanosine-3'-phosphate
  modified_base 17: mod_base = OTHER; note = 2'-O-methylguanosine-3'-phosphate
  modified_base 18: mod_base = OTHER; note = 2'-O-methyluridine-3'-phosphate
  modified_base 19: mod_base = OTHER; note = 2'-O-methyladenosine-3'-phosphate
  modified_base 20: mod_base = OTHER; note = 2'-O-methyluridine-3'-phosphate
  modified_base 21: mod_base = OTHER; note = 2'-O-methylguanosine-3'-phosphorothioate
  modified_base 22: mod_base = OTHER; note = 2'-O-methyladenosine-3'-phosphorothioate
  modified_base 23: mod_base = OTHER; note = 2'-O-methyladenosine-3'-phosphate
acctgaattggagcaggtatgaa

SEQ ID NO: 943 - RNA, 23 nt, synthetic construct
  source 1..23: mol_type = other RNA
  modified_base 1: mod_base = OTHER; note = 2'-O-methyladenosine-3'-phosphorothioate
  modified_base 2: mod_base = OTHER; note = 2'-fluorocytidine-3'-phosphorothioate
  modified_base 3: mod_base = OTHER; note = 2'-O-methyluridine-3'-phosphate
  modified_base 4: mod_base = OTHER; note = 2'-O-methylguanosine-3'-phosphate
  modified_base 5: mod_base = OTHER; note = 2'-O-methyluridine-3'-phosphate
  modified_base 6: mod_base = OTHER; note = 2'-fluoroadenosine-3'-phosphate
  modified_base 7: mod_base = OTHER; note = 2'-O-methylguanosine-3'-phosphate
  modified_base 8: mod_base = OTHER; note = 2'-fluoroguanosine-3'-phosphate
  modified_base 9: mod_base = OTHER; note = 2'-fluoroguanosine-3'-phosphate
  modified_base 10: mod_base = OTHER; note = 2'-O-methylcytidine-3'-phosphate
  modified_base 11: mod_base = OTHER; note = 2'-O-methylcytidine-3'-phosphate
  modified_base 12: mod_base = OTHER; note = 2'-O-methyluridine-3'-phosphate
  modified_base 13: mod_base = OTHER; note = 2'-O-methyluridine-3'-phosphate
  modified_base 14: mod_base = OTHER; note = 2'-fluorouridine-3'-phosphate
  modified_base 15: mod_base = OTHER; note = 2'-O-methyluridine-3'-phosphate
  modified_base 16: mod_base = OTHER; note = 2'-fluorocytidine-3'-phosphate
  modified_base 17: mod_base = OTHER; note = 2'-O-methyladenosine-3'-phosphate
  modified_base 18: mod_base = OTHER; note = 2'-O-methyluridine-3'-phosphate
  modified_base 19: mod_base = OTHER; note = 2'-O-methylcytidine-3'-phosphate
  modified_base 20: mod_base = OTHER; note = 2'-O-methylcytidine-3'-phosphate
  modified_base 21: mod_base = OTHER; note = 2'-O-methyladenosine-3'-phosphorothioate
  modified_base 22: mod_base = OTHER; note = 2'-O-methylcytidine-3'-phosphorothioate
  modified_base 23: mod_base = OTHER; note = 2'-O-methyladenosine-3'-phosphate
actgtagggccttttcatccaca

SEQ ID NO: 944 - RNA, 23 nt, synthetic construct
  source 1..23: mol_type = other RNA
  modified_base 1: mod_base = OTHER; note = 2'-O-methyladenosine-3'-phosphorothioate
  modified_base 2: mod_base = OTHER; note = 2'-fluorocytidine-3'-phosphorothioate
  modified_base 3: mod_base = OTHER; note = 2'-O-methylcytidine-3'-phosphate
  modified_base 4: mod_base = OTHER; note = 2'-O-methyluridine-3'-phosphate
  modified_base 5: mod_base = OTHER; note = 2'-O-methylguanosine-3'-phosphate
  modified_base 6: mod_base = OTHER; note = 2'-fluorouridine-3'-phosphate
  modified_base 7: mod_base = OTHER; note = 2'-O-methyladenosine-3'-phosphate
  modified_base 8: mod_base = OTHER; note = 2'-fluoroguanosine-3'-phosphate
  modified_base 9: mod_base = OTHER; note = 2'-fluoroguanosine-3'-phosphate
  modified_base 10: mod_base = OTHER; note = 2'-O-methylguanosine-3'-phosphate
  modified_base 11: mod_base = OTHER; note = 2'-O-methylcytidine-3'-phosphate
  modified_base 12: mod_base = OTHER; note = 2'-O-methylcytidine-3'-phosphate
  modified_base 13: mod_base = OTHER; note = 2'-O-methyluridine-3'-phosphate
  modified_base 14: mod_base = OTHER; note = 2'-fluorouridine-3'-phosphate
  modified_base 15: mod_base = OTHER; note = 2'-O-methyluridine-3'-phosphate
  modified_base 16: mod_base = OTHER; note = 2'-fluorouridine-3'-phosphate
  modified_base 17: mod_base = OTHER; note = 2'-O-methylcytidine-3'-phosphate
  modified_base 18: mod_base = OTHER; note = 2'-O-methyladenosine-3'-phosphate
  modified_base 19: mod_base = OTHER; note = 2'-O-methyluridine-3'-phosphate
  modified_base 20: mod_base = OTHER; note = 2'-O-methylcytidine-3'-phosphate
  modified_base 21: mod_base = OTHER; note = 2'-O-methylcytidine-3'-phosphorothioate
  modified_base 22: mod_base = OTHER; note = 2'-O-methyladenosine-3'-phosphorothioate
  modified_base 23: mod_base = OTHER; note = 2'-O-methylcytidine-3'-phosphate
acctgtagggccttttcatccac

SEQ ID NO: 945 - RNA, 23 nt, synthetic construct
  source 1..23: mol_type = other RNA
  modified_base 1: mod_base = OTHER; note = 2'-O-methyladenosine-3'-phosphorothioate
  modified_base 2: mod_base = OTHER; note = 2'-fluoroadenosine-3'-phosphorothioate
  modified_base 3: mod_base = OTHER; note = 2'-O-methylguanosine-3'-phosphate
  modified_base 4: mod_base = OTHER; note = 2'-O-methyluridine-3'-phosphate
  modified_base 5: mod_base = OTHER; note = 2'-O-methyluridine-3'-phosphate
  modified_base 6: mod_base = OTHER; note = 2'-fluorouridine-3'-phosphate
  modified_base 7: mod_base = OTHER; note = 2'-O-methyluridine-3'-phosphate
  modified_base 8: mod_base = OTHER; note = 2'-fluoroguanosine-3'-phosphate
  modified_base 9: mod_base = OTHER; note = 2'-fluorocytidine-3'-phosphate
  modified_base 10: mod_base = OTHER; note = 2'-O-methyladenosine-3'-phosphate
  modified_base 11: mod_base = OTHER; note = 2'-O-methylguanosine-3'-phosphate
  modified_base 12: mod_base = OTHER; note = 2'-O-methylcytidine-3'-phosphate
  modified_base 13: mod_base = OTHER; note = 2'-O-methylguanosine-3'-phosphate
  modified_base 14: mod_base = OTHER; note = 2'-fluoroadenosine-3'-phosphate
  modified_base 15: mod_base = OTHER; note = 2'-O-methylcytidine-3'-phosphate
  modified_base 16: mod_base = OTHER; note = 2'-fluorouridine-3'-phosphate
  modified_base 17: mod_base = OTHER; note = 2'-O-methyladenosine-3'-phosphate
  modified_base 18: mod_base = OTHER; note = 2'-O-methylguanosine-3'-phosphate
  modified_base 19: mod_base = OTHER; note = 2'-O-methylcytidine-3'-phosphate
  modified_base 20: mod_base = OTHER; note = 2'-O-methyladenosine-3'-phosphate
  modified_base 21: mod_base = OTHER; note = 2'-O-methylcytidine-3'-phosphorothioate
  modified_base 22: mod_base = OTHER; note = 2'-O-methylcytidine-3'-phosphorothioate
  modified_base 23: mod_base = OTHER; note = 2'-O-methyladenosine-3'-phosphate
aagttttgcagcgactagcacca

SEQ ID NO: 946 - RNA, 23 nt, synthetic construct
  source 1..23: mol_type = other RNA
  modified_base 1: mod_base = OTHER; note = 2'-O-methyladenosine-3'-phosphorothioate
  modified_base 2: mod_base = OTHER; note = 2'-fluoroadenosine-3'-phosphorothioate
  modified_base 3: mod_base = OTHER; note = 2'-O-methyladenosine-3'-phosphate
  modified_base 4: mod_base = OTHER; note = 2'-O-methylguanosine-3'-phosphate
  modified_base 5: mod_base = OTHER; note = 2'-O-methyluridine-3'-phosphate
  modified_base 6: mod_base = OTHER; note = 2'-fluorouridine-3'-phosphate
  modified_base 7: mod_base = OTHER; note = 2'-O-methyluridine-3'-phosphate
  modified_base 8: mod_base = OTHER; note = 2'-fluorouridine-3'-phosphate
  modified_base 9: mod_base = OTHER; note = 2'-fluoroguanosine-3'-phosphate
  modified_base 10: mod_base = OTHER; note = 2'-O-methylcytidine-3'-phosphate
  modified_base 11: mod_base = OTHER; note = 2'-O-methyladenosine-3'-phosphate
  modified_base 12: mod_base = OTHER; note = 2'-O-methylguanosine-3'-phosphate
  modified_base 13: mod_base = OTHER; note = 2'-O-methylcytidine-3'-phosphate
  modified_base 14: mod_base = OTHER; note = 2'-fluoroguanosine-3'-phosphate
  modified_base 15: mod_base = OTHER; note = 2'-O-methyladenosine-3'-phosphate
  modified_base 16: mod_base = OTHER; note = 2'-fluorocytidine-3'-phosphate
  modified_base 17: mod_base = OTHER; note = 2'-O-methyluridine-3'-phosphate
  modified_base 18: mod_base = OTHER; note = 2'-O-methyladenosine-3'-phosphate
  modified_base 19: mod_base = OTHER; note = 2'-O-methylguanosine-3'-phosphate
  modified_base 20: mod_base = OTHER; note = 2'-O-methylcytidine-3'-phosphate
  modified_base 21: mod_base = OTHER; note = 2'-O-methyladenosine-3'-phosphorothioate
  modified_base 22: mod_base = OTHER; note = 2'-O-methylcytidine-3'-phosphorothioate
  modified_base 23: mod_base = OTHER; note = 2'-O-methylcytidine-3'-phosphate
aaagttttgcagcgactagcacc

SEQ ID NO: 947 - RNA, 23 nt, synthetic construct
  source 1..23: mol_type = other RNA
  modified_base 1: mod_base = OTHER; note = 2'-O-methyladenosine-3'-phosphorothioate
  modified_base 2: mod_base = OTHER; note = 2'-fluorocytidine-3'-phosphorothioate
  modified_base 3: mod_base = OTHER; note = 2'-O-methyladenosine-3'-phosphate
  modified_base 4: mod_base = OTHER; note = 2'-O-methyladenosine-3'-phosphate
  modified_base 5: mod_base = OTHER; note = 2'-O-methylguanosine-3'-phosphate
  modified_base 6: mod_base = OTHER; note = 2'-fluorouridine-3'-phosphate
  modified_base 7: mod_base = OTHER; note = 2'-O-methyluridine-3'-phosphate
  modified_base 8: mod_base = OTHER; note = 2'-fluorouridine-3'-phosphate
  modified_base 9: mod_base = OTHER; note = 2'-fluorouridine-3'-phosphate
  modified_base 10: mod_base = OTHER; note = 2'-O-methylguanosine-3'-phosphate
  modified_base 11: mod_base = OTHER; note = 2'-O-methylcytidine-3'-phosphate
  modified_base 12: mod_base = OTHER; note = 2'-O-methyladenosine-3'-phosphate
  modified_base 13: mod_base = OTHER; note = 2'-O-methylguanosine-3'-phosphate
  modified_base 14: mod_base = OTHER; note = 2'-fluorocytidine-3'-phosphate
  modified_base 15: mod_base = OTHER; note = 2'-O-methylguanosine-3'-phosphate
  modified_base 16: mod_base = OTHER; note = 2'-fluoroadenosine-3'-phosphate
  modified_base 17: mod_base = OTHER; note = 2'-O-methylcytidine-3'-phosphate
  modified_base 18: mod_base = OTHER; note = 2'-O-methyluridine-3'-phosphate
  modified_base 19: mod_base = OTHER; note = 2'-O-methyladenosine-3'-phosphate
  modified_base 20: mod_base = OTHER; note = 2'-O-methylguanosine-3'-phosphate
  modified_base 21: mod_base = OTHER; note = 2'-O-methylcytidine-3'-phosphorothioate
  modified_base 22: mod_base = OTHER; note = 2'-O-methyladenosine-3'-phosphorothioate
  modified_base 23: mod_base = OTHER; note = 2'-O-methylcytidine-3'-phosphate
acaagttttgcagcgactagcac

SEQ ID NO: 948 - RNA, 23 nt, synthetic construct
  source 1..23: mol_type = other RNA
  modified_base 1: mod_base = OTHER; note = 2'-O-methyladenosine-3'-phosphorothioate
  modified_base 2: mod_base = OTHER; note = 2'-fluorocytidine-3'-phosphorothioate
  modified_base 3: mod_base = OTHER; note = 2'-O-methyluridine-3'-phosphate
  modified_base 4: mod_base = OTHER; note = 2'-O-methyluridine-3'-phosphate
  modified_base 5: mod_base = OTHER; note = 2'-O-methylcytidine-3'-phosphate
  modified_base 6: mod_base = OTHER; note = 2'-fluoroguanosine-3'-phosphate
  modified_base 7: mod_base = OTHER; note = 2'-O-methylguanosine-3'-phosphate
  modified_base 8: mod_base = OTHER; note = 2'-fluorouridine-3'-phosphate
  modified_base 9: mod_base = OTHER; note = 2'-fluoroguanosine-3'-phosphate
  modified_base 10: mod_base = OTHER; note = 2'-O-methyluridine-3'-phosphate
  modified_base 11: mod_base = OTHER; note = 2'-O-methylcytidine-3'-phosphate
  modified_base 12: mod_base = OTHER; note = 2'-O-methyladenosine-3'-phosphate
  modified_base 13: mod_base = OTHER; note = 2'-O-methyladenosine-3'-phosphate
  modified_base 14: mod_base = OTHER; note = 2'-fluoroguanosine-3'-phosphate
  modified_base 15: mod_base = OTHER; note = 2'-O-methyluridine-3'-phosphate
  modified_base 16: mod_base = OTHER; note = 2'-fluorouridine-3'-phosphate
  modified_base 17: mod_base = OTHER; note = 2'-O-methyluridine-3'-phosphate
  modified_base 18: mod_base = OTHER; note = 2'-O-methyluridine-3'-phosphate
  modified_base 19: mod_base = OTHER; note = 2'-O-methylguanosine-3'-phosphate
  modified_base 20: mod_base = OTHER; note = 2'-O-methylcytidine-3'-phosphate
  modified_base 21: mod_base = OTHER; note = 2'-O-methyladenosine-3'-phosphorothioate
  modified_base 22: mod_base = OTHER; note = 2'-O-methylguanosine-3'-phosphorothioate
  modified_base 23: mod_base = OTHER; note = 2'-O-methylcytidine-3'-phosphate
acttcggtgtcaagttttgcagc

SEQ ID NO: 949 - RNA, 23 nt, synthetic construct
  source 1..23: mol_type = other RNA
  modified_base 1: mod_base = OTHER; note = 2'-O-methyladenosine-3'-phosphorothioate
  modified_base 2: mod_base = OTHER; note = 2'-fluorouridine -3'-phosphorothioate
  modified_base 3: mod_base = OTHER; note = 2'-O-methylcytidine-3'-phosphate
  modified_base 4: mod_base = OTHER; note = 2'-O-methyluridine-3'-phosphate
  modified_base 5: mod_base = OTHER; note = 2'-O-methyluridine-3'-phosphate
  modified_base 6: mod_base = OTHER; note = 2'-fluorocytidine-3'-phosphate
  modified_base 7: mod_base = OTHER; note = 2'-O-methylguanosine-3'-phosphate
  modified_base 8: mod_base = OTHER; note = 2'-fluoroguanosine-3'-phosphate
  modified_base 9: mod_base = OTHER; note = 2'-fluorouridine-3'-phosphate
  modified_base 10: mod_base = OTHER; note = 2'-O-methylguanosine-3'-phosphate
  modified_base 11: mod_base = OTHER; note = 2'-O-methyluridine-3'-phosphate
  modified_base 12: mod_base = OTHER; note = 2'-O-methylcytidine-3'-phosphate
  modified_base 13: mod_base = OTHER; note = 2'-O-methyladenosine-3'-phosphate
  modified_base 14: mod_base = OTHER; note = 2'-fluoroadenosine-3'-phosphate
  modified_base 15: mod_base = OTHER; note = 2'-O-methylguanosine-3'-phosphate
  modified_base 16: mod_base = OTHER; note = 2'-fluorouridine-3'-phosphate
  modified_base 17: mod_base = OTHER; note = 2'-O-methyluridine-3'-phosphate
  modified_base 18: mod_base = OTHER; note = 2'-O-methyluridine-3'-phosphate
  modified_base 19: mod_base = OTHER; note = 2'-O-methyluridine-3'-phosphate
  modified_base 20: mod_base = OTHER; note = 2'-O-methylguanosine-3'-phosphate
  modified_base 21: mod_base = OTHER; note = 2'-O-methylcytidine-3'-phosphorothioate
  modified_base 22: mod_base = OTHER; note = 2'-O-methyladenosine-3'-phosphorothioate
  modified_base 23: mod_base = OTHER; note = 2'-O-methylguanosine-3'-phosphate
atcttcggtgtcaagttttgcag

SEQ ID NO: 950 - RNA, 23 nt, synthetic construct
  source 1..23: mol_type = other RNA
  modified_base 1: mod_base = OTHER; note = 2'-O-methyladenosine-3'-phosphorothioate
  modified_base 2: mod_base = OTHER; note = 2'-fluorocytidine-3'-phosphorothioate
  modified_base 3: mod_base = OTHER; note = 2'-O-methyladenosine-3'-phosphate
  modified_base 4: mod_base = OTHER; note = 2'-O-methyladenosine-3'-phosphate
  modified_base 5: mod_base = OTHER; note = 2'-O-methylcytidine-3'-phosphate
  modified_base 6: mod_base = OTHER; note = 2'-fluorouridine-3'-phosphate
  modified_base 7: mod_base = OTHER; note = 2'-O-methyluridine-3'-phosphate
  modified_base 8: mod_base = OTHER; note = 2'-fluoroguanosine-3'-phosphate
  modified_base 9: mod_base = OTHER; note = 2'-fluorouridine-3'-phosphate
  modified_base 10: mod_base = OTHER; note = 2'-O-methylcytidine-3'-phosphate
  modified_base 11: mod_base = OTHER; note = 2'-O-methyluridine-3'-phosphate
  modified_base 12: mod_base = OTHER; note = 2'-O-methyluridine-3'-phosphate
  modified_base 13: mod_base = OTHER; note = 2'-O-methylcytidine-3'-phosphate
  modified_base 14: mod_base = OTHER; note = 2'-fluoroguanosine-3'-phosphate
  modified_base 15: mod_base = OTHER; note = 2'-O-methylguanosine-3'-phosphate
  modified_base 16: mod_base = OTHER; note = 2'-fluorouridine-3'-phosphate
  modified_base 17: mod_base = OTHER; note = 2'-O-methylguanosine-3'-phosphate
  modified_base 18: mod_base = OTHER; note = 2'-O-methyluridine-3'-phosphate
  modified_base 19: mod_base = OTHER; note = 2'-O-methylcytidine-3'-phosphate
  modified_base 20: mod_base = OTHER; note = 2'-O-methyladenosine-3'-phosphate
  modified_base 21: mod_base = OTHER; note = 2'-O-methyladenosine-3'-phosphorothioate
  modified_base 22: mod_base = OTHER; note = 2'-O-methylguanosine-3'-phosphorothioate
  modified_base 23: mod_base = OTHER; note = 2'-O-methyluridine-3'-phosphate
acaacttgtcttcggtgtcaagt

SEQ ID NO: 951 - RNA, 23 nt, synthetic construct
  source 1..23: mol_type = other RNA
  modified_base 1: mod_base = OTHER; note = 2'-O-methyladenosine-3'-phosphorothioate
  modified_base 2: mod_base = OTHER; note = 2'-fluorouridine -3'-phosphorothioate
  modified_base 3: mod_base = OTHER; note = 2'-O-methylcytidine-3'-phosphate
  modified_base 4: mod_base = OTHER; note = 2'-O-methyladenosine-3'-phosphate
  modified_base 5: mod_base = OTHER; note = 2'-O-methyladenosine-3'-phosphate
  modified_base 6: mod_base = OTHER; note = 2'-fluorocytidine-3'-phosphate
  modified_base 7: mod_base = OTHER; note = 2'-O-methyluridine-3'-phosphate
  modified_base 8: mod_base = OTHER; note = 2'-fluorouridine-3'-phosphate
  modified_base 9: mod_base = OTHER; note = 2'-fluoroguanosine-3'-phosphate
  modified_base 10: mod_base = OTHER; note = 2'-O-methyluridine-3'-phosphate
  modified_base 11: mod_base = OTHER; note = 2'-O-methylcytidine-3'-phosphate
  modified_base 12: mod_base = OTHER; note = 2'-O-methyluridine-3'-phosphate
  modified_base 13: mod_base = OTHER; note = 2'-O-methyluridine-3'-phosphate
  modified_base 14: mod_base = OTHER; note = 2'-fluorocytidine-3'-phosphate
  modified_base 15: mod_base = OTHER; note = 2'-O-methylguanosine-3'-phosphate
  modified_base 16: mod_base = OTHER; note = 2'-fluoroguanosine-3'-phosphate
  modified_base 17: mod_base = OTHER; note = 2'-O-methyluridine-3'-phosphate
  modified_base 18: mod_base = OTHER; note = 2'-O-methylguanosine-3'-phosphate
  modified_base 19: mod_base = OTHER; note = 2'-O-methyluridine-3'-phosphate
  modified_base 20: mod_base = OTHER; note = 2'-O-methylcytidine-3'-phosphate
  modified_base 21: mod_base = OTHER; note = 2'-O-methyladenosine-3'-phosphorothioate
  modified_base 22: mod_base = OTHER; note = 2'-O-methyladenosine-3'-phosphorothioate
  modified_base 23: mod_base = OTHER; note = 2'-O-methylguanosine-3'-phosphate
atcaacttgtcttcggtgtcaag

SEQ ID NO: 952 - RNA, 23 nt, synthetic construct
  source 1..23: mol_type = other RNA
  modified_base 1: mod_base = OTHER; note = 2'-O-methyladenosine-3'-phosphorothioate
  modified_base 2: mod_base = OTHER; note = 2'-fluorocytidine-3'-phosphorothioate
  modified_base 3: mod_base = OTHER; note = 2'-O-methylcytidine-3'-phosphate
  modified_base 4: mod_base = OTHER; note = 2'-O-methyluridine-3'-phosphate
  modified_base 5: mod_base = OTHER; note = 2'-O-methylcytidine-3'-phosphate
  modified_base 6: mod_base = OTHER; note = 2'-fluoroadenosine-3'-phosphate
  modified_base 7: mod_base = OTHER; note = 2'-O-methyladenosine-3'-phosphate
  modified_base 8: mod_base = OTHER; note = 2'-fluorocytidine-3'-phosphate
  modified_base 9: mod_base = OTHER; note = 2'-fluorouridine-3'-phosphate
  modified_base 10: mod_base = OTHER; note = 2'-O-methyluridine-3'-phosphate
  modified_base 11: mod_base = OTHER; note = 2'-O-methylguanosine-3'-phosphate
  modified_base 12: mod_base = OTHER; note = 2'-O-methyluridine-3'-phosphate
  modified_base 13: mod_base = OTHER; note = 2'-O-methylcytidine-3'-phosphate
  modified_base 14: mod_base = OTHER; note = 2'-fluorouridine-3'-phosphate
  modified_base 15: mod_base = OTHER; note = 2'-O-methyluridine-3'-phosphate
  modified_base 16: mod_base = OTHER; note = 2'-fluorocytidine-3'-phosphate
  modified_base 17: mod_base = OTHER; note = 2'-O-methylguanosine-3'-phosphate
  modified_base 18: mod_base = OTHER; note = 2'-O-methylguanosine-3'-phosphate
  modified_base 19: mod_base = OTHER; note = 2'-O-methyluridine-3'-phosphate
  modified_base 20: mod_base = OTHER; note = 2'-O-methylguanosine-3'-phosphate
  modified_base 21: mod_base = OTHER; note = 2'-O-methyluridine-3'-phosphorothioate
  modified_base 22: mod_base = OTHER; note = 2'-O-methylcytidine-3'-phosphorothioate
  modified_base 23: mod_base = OTHER; note = 2'-O-methyladenosine-3'-phosphate
acctcaacttgtcttcggtgtca

SEQ ID NO: 953 - RNA, 23 nt, synthetic construct
  source 1..23: mol_type = other RNA
  modified_base 1: mod_base = OTHER; note = 2'-O-methyladenosine-3'-phosphorothioate
  modified_base 2: mod_base = OTHER; note = 2'-fluorocytidine-3'-phosphorothioate
  modified_base 3: mod_base = OTHER; note = 2'-O-methylcytidine-3'-phosphate
  modified_base 4: mod_base = OTHER; note = 2'-O-methylcytidine-3'-phosphate
  modified_base 5: mod_base = OTHER; note = 2'-O-methyluridine-3'-phosphate
  modified_base 6: mod_base = OTHER; note = 2'-fluorocytidine-3'-phosphate
  modified_base 7: mod_base = OTHER; note = 2'-O-methyladenosine-3'-phosphate
  modified_base 8: mod_base = OTHER; note = 2'-fluoroadenosine-3'-phosphate
  modified_base 9: mod_base = OTHER; note = 2'-fluorocytidine-3'-phosphate
  modified_base 10: mod_base = OTHER; note = 2'-O-methyluridine-3'-phosphate
  modified_base 11: mod_base = OTHER; note = 2'-O-methyluridine-3'-phosphate
  modified_base 12: mod_base = OTHER; note = 2'-O-methylguanosine-3'-phosphate
  modified_base 13: mod_base = OTHER; note = 2'-O-methyluridine-3'-phosphate
  modified_base 14: mod_base = OTHER; note = 2'-fluorocytidine-3'-phosphate
  modified_base 15: mod_base = OTHER; note = 2'-O-methyluridine-3'-phosphate
  modified_base 16: mod_base = OTHER; note = 2'-fluorouridine-3'-phosphate
  modified_base 17: mod_base = OTHER; note = 2'-O-methylcytidine-3'-phosphate
  modified_base 18: mod_base = OTHER; note = 2'-O-methylguanosine-3'-phosphate
  modified_base 19: mod_base = OTHER; note = 2'-O-methylguanosine-3'-phosphate
  modified_base 20: mod_base = OTHER; note = 2'-O-methyluridine-3'-phosphate
  modified_base 21: mod_base = OTHER; note = 2'-O-methylguanosine-3'-phosphorothioate
  modified_base 22: mod_base = OTHER; note = 2'-O-methyluridine-3'-phosphorothioate
  modified_base 23: mod_base = OTHER; note = 2'-O-methylcytidine-3'-phosphate
accctcaacttgtcttcggtgtc

SEQ ID NO: 954 - RNA, 23 nt, synthetic construct
  source 1..23: mol_type = other RNA
  modified_base 1: mod_base = OTHER; note = 2'-O-methyladenosine-3'-phosphorothioate
  modified_base 2: mod_base = OTHER; note = 2'-fluoroadenosine-3'-phosphorothioate
  modified_base 3: mod_base = OTHER; note = 2'-O-methylcytidine-3'-phosphate
  modified_base 4: mod_base = OTHER; note = 2'-O-methylcytidine-3'-phosphate
  modified_base 5: mod_base = OTHER; note = 2'-O-methyladenosine-3'-phosphate
  modified_base 6: mod_base = OTHER; note = 2'-fluorouridine-3'-phosphate
  modified_base 7: mod_base = OTHER; note = 2'-O-methyluridine-3'-phosphate
  modified_base 8: mod_base = OTHER; note = 2'-fluoroguanosine-3'-phosphate
  modified_base 9: mod_base = OTHER; note = 2'-fluorocytidine-3'-phosphate
  modified_base 10: mod_base = OTHER; note = 2'-O-methylguanosine-3'-phosphate
  modified_base 11: mod_base = OTHER; note = 2'-O-methylguanosine-3'-phosphate
  modified_base 12: mod_base = OTHER; note = 2'-O-methylcytidine-3'-phosphate
  modified_base 13: mod_base = OTHER; note = 2'-O-methylcytidine-3'-phosphate
  modified_base 14: mod_base = OTHER; note = 2'-fluorocytidine-3'-phosphate
  modified_base 15: mod_base = OTHER; note = 2'-O-methyluridine-3'-phosphate
  modified_base 16: mod_base = OTHER; note = 2'-fluorocytidine-3'-phosphate
  modified_base 17: mod_base = OTHER; note = 2'-O-methyladenosine-3'-phosphate
  modified_base 18: mod_base = OTHER; note = 2'-O-methyladenosine-3'-phosphate
  modified_base 19: mod_base = OTHER; note = 2'-O-methylcytidine-3'-phosphate
  modified_base 20: mod_base = OTHER; note = 2'-O-methyluridine-3'-phosphate
  modified_base 21: mod_base = OTHER; note = 2'-O-methyluridine-3'-phosphorothioate
  modified_base 22: mod_base = OTHER; note = 2'-O-methylguanosine-3'-phosphorothioate
  modified_base 23: mod_base = OTHER; note = 2'-O-methyluridine-3'-phosphate
aaccattgcggccctcaacttgt

SEQ ID NO: 955 - RNA, 23 nt, synthetic construct
  source 1..23: mol_type = other RNA
  modified_base 1: mod_base = OTHER; note = 2'-O-methyladenosine-3'-phosphorothioate
  modified_base 2: mod_base = OTHER; note = 2'-fluoroadenosine-3'-phosphorothioate
  modified_base 3: mod_base = OTHER; note = 2'-O-methyladenosine-3'-phosphate
  modified_base 4: mod_base = OTHER; note = 2'-O-methylguanosine-3'-phosphate
  modified_base 5: mod_base = OTHER; note = 2'-O-methyladenosine-3'-phosphate
  modified_base 6: mod_base = OTHER; note = 2'-fluoroadenosine-3'-phosphate
  modified_base 7: mod_base = OTHER; note = 2'-O-methylguanosine-3'-phosphate
  modified_base 8: mod_base = OTHER; note = 2'-fluorouridine-3'-phosphate
  modified_base 9: mod_base = OTHER; note = 2'-fluorouridine-3'-phosphate
  modified_base 10: mod_base = OTHER; note = 2'-O-methylguanosine-3'-phosphate
  modified_base 11: mod_base = OTHER; note = 2'-O-methylguanosine-3'-phosphate
  modified_base 12: mod_base = OTHER; note = 2'-O-methylcytidine-3'-phosphate
  modified_base 13: mod_base = OTHER; note = 2'-O-methylcytidine-3'-phosphate
  modified_base 14: mod_base = OTHER; note = 2'-fluoroadenosine-3'-phosphate
  modified_base 15: mod_base = OTHER; note = 2'-O-methylguanosine-3'-phosphate
  modified_base 16: mod_base = OTHER; note = 2'-fluorocytidine-3'-phosphate
  modified_base 17: mod_base = OTHER; note = 2'-O-methyladenosine-3'-phosphate
  modified_base 18: mod_base = OTHER; note = 2'-O-methyluridine-3'-phosphate
  modified_base 19: mod_base = OTHER; note = 2'-O-methylcytidine-3'-phosphate
  modified_base 20: mod_base = OTHER; note = 2'-O-methylcytidine-3'-phosphate
  modified_base 21: mod_base = OTHER; note = 2'-O-methylcytidine-3'-phosphorothioate
  modified_base 22: mod_base = OTHER; note = 2'-O-methylguanosine-3'-phosphorothioate
  modified_base 23: mod_base = OTHER; note = 2'-O-methyladenosine-3'-phosphate
aaagaagttggccagcatcccga

SEQ ID NO: 956 - RNA, 23 nt, synthetic construct
  source 1..23: mol_type = other RNA
  modified_base 1: mod_base = OTHER; note = 2'-O-methyladenosine-3'-phosphorothioate
  modified_base 2: mod_base = OTHER; note = 2'-fluoroadenosine-3'-phosphorothioate
  modified_base 3: mod_base = OTHER; note = 2'-O-methylguanosine-3'-phosphate
  modified_base 4: mod_base = OTHER; note = 2'-O-methylcytidine-3'-phosphate
  modified_base 5: mod_base = OTHER; note = 2'-O-methylcytidine-3'-phosphate
  modified_base 6: mod_base = OTHER; note = 2'-fluorocytidine-3'-phosphate
  modified_base 7: mod_base = OTHER; note = 2'-O-methyladenosine-3'-phosphate
  modified_base 8: mod_base = OTHER; note = 2'-fluoroadenosine-3'-phosphate
  modified_base 9: mod_base = OTHER; note = 2'-fluoroguanosine-3'-phosphate
  modified_base 10: mod_base = OTHER; note = 2'-O-methyladenosine-3'-phosphate
  modified_base 11: mod_base = OTHER; note = 2'-O-methyladenosine-3'-phosphate
  modified_base 12: mod_base = OTHER; note = 2'-O-methylguanosine-3'-phosphate
  modified_base 13: mod_base = OTHER; note = 2'-O-methyluridine-3'-phosphate
  modified_base 14: mod_base = OTHER; note = 2'-fluorouridine-3'-phosphate
  modified_base 15: mod_base = OTHER; note = 2'-O-methylguanosine-3'-phosphate
  modified_base 16: mod_base = OTHER; note = 2'-fluoroguanosine-3'-phosphate
  modified_base 17: mod_base = OTHER; note = 2'-O-methylcytidine-3'-phosphate
  modified_base 18: mod_base = OTHER; note = 2'-O-methylcytidine-3'-phosphate
  modified_base 19: mod_base = OTHER; note = 2'-O-methyladenosine-3'-phosphate
  modified_base 20: mod_base = OTHER; note = 2'-O-methylguanosine-3'-phosphate
  modified_base 21: mod_base = OTHER; note = 2'-O-methylcytidine-3'-phosphorothioate
  modified_base 22: mod_base = OTHER; note = 2'-O-methyladenosine-3'-phosphorothioate
  modified_base 23: mod_base = OTHER; note = 2'-O-methyluridine-3'-phosphate
aagcccaagaagttggccagcat

SEQ ID NO: 957 - RNA, 23 nt, synthetic construct
  source 1..23: mol_type = other RNA
  modified_base 1: mod_base = OTHER; note = 2'-O-methyladenosine-3'-phosphorothioate
  modified_base 2: mod_base = OTHER; note = 2'-fluorouridine -3'-phosphorothioate
  modified_base 3: mod_base = OTHER; note = 2'-O-methyladenosine-3'-phosphate
  modified_base 4: mod_base = OTHER; note = 2'-O-methylcytidine-3'-phosphate
  modified_base 5: mod_base = OTHER; note = 2'-O-methylguanosine-3'-phosphate
  modified_base 6: mod_base = OTHER; note = 2'-fluoroguanosine-3'-phosphate
  modified_base 7: mod_base = OTHER; note = 2'-O-methyladenosine-3'-phosphate
  modified_base 8: mod_base = OTHER; note = 2'-fluoroadenosine-3'-phosphate
  modified_base 9: mod_base = OTHER; note = 2'-fluoroguanosine-3'-phosphate
  modified_base 10: mod_base = OTHER; note = 2'-O-methylcytidine-3'-phosphate
  modified_base 11: mod_base = OTHER; note = 2'-O-methylcytidine-3'-phosphate
  modified_base 12: mod_base = OTHER; note = 2'-O-methylcytidine-3'-phosphate
  modified_base 13: mod_base = OTHER; note = 2'-O-methyladenosine-3'-phosphate
  modified_base 14: mod_base = OTHER; note = 2'-fluoroadenosine-3'-phosphate
  modified_base 15: mod_base = OTHER; note = 2'-O-methylguanosine-3'-phosphate
  modified_base 16: mod_base = OTHER; note = 2'-fluoroadenosine-3'-phosphate
  modified_base 17: mod_base = OTHER; note = 2'-O-methyladenosine-3'-phosphate
  modified_base 18: mod_base = OTHER; note = 2'-O-methylguanosine-3'-phosphate
  modified_base 19: mod_base = OTHER; note = 2'-O-methyluridine-3'-phosphate
  modified_base 20: mod_base = OTHER; note = 2'-O-methyluridine-3'-phosphate
  modified_base 21: mod_base = OTHER; note = 2'-O-methylguanosine-3'-phosphorothioate
  modified_base 22: mod_base = OTHER; note = 2'-O-methylguanosine-3'-phosphorothioate
  modified_base 23: mod_base = OTHER; note = 2'-O-methylcytidine-3'-phosphate
atacggaagcccaagaagttggc

SEQ ID NO: 958 - RNA, 23 nt, synthetic construct
  source 1..23: mol_type = other RNA
  modified_base 1: mod_base = OTHER; note = 2'-O-methyladenosine-3'-phosphorothioate
  modified_base 2: mod_base = OTHER; note = 2'-fluoroadenosine-3'-phosphorothioate
  modified_base 3: mod_base = OTHER; note = 2'-O-methyluridine-3'-phosphate
  modified_base 4: mod_base = OTHER; note = 2'-O-methyladenosine-3'-phosphate
  modified_base 5: mod_base = OTHER; note = 2'-O-methylcytidine-3'-phosphate
  modified_base 6: mod_base = OTHER; note = 2'-fluoroguanosine-3'-phosphate
  modified_base 7: mod_base = OTHER; note = 2'-O-methylguanosine-3'-phosphate
  modified_base 8: mod_base = OTHER; note = 2'-fluoroadenosine-3'-phosphate
  modified_base 9: mod_base = OTHER; note = 2'-fluoroadenosine-3'-phosphate
  modified_base 10: mod_base = OTHER; note = 2'-O-methylguanosine-3'-phosphate
  modified_base 11: mod_base = OTHER; note = 2'-O-methylcytidine-3'-phosphate
  modified_base 12: mod_base = OTHER; note = 2'-O-methylcytidine-3'-phosphate
  modified_base 13: mod_base = OTHER; note = 2'-O-methylcytidine-3'-phosphate
  modified_base 14: mod_base = OTHER; note = 2'-fluoroadenosine-3'-phosphate
  modified_base 15: mod_base = OTHER; note = 2'-O-methyladenosine-3'-phosphate
  modified_base 16: mod_base = OTHER; note = 2'-fluoroguanosine-3'-phosphate
  modified_base 17: mod_base = OTHER; note = 2'-O-methyladenosine-3'-phosphate
  modified_base 18: mod_base = OTHER; note = 2'-O-methyladenosine-3'-phosphate
  modified_base 19: mod_base = OTHER; note = 2'-O-methylguanosine-3'-phosphate
  modified_base 20: mod_base = OTHER; note = 2'-O-methyluridine-3'-phosphate
  modified_base 21: mod_base = OTHER; note = 2'-O-methyluridine-3'-phosphorothioate
  modified_base 22: mod_base = OTHER; note = 2'-O-methylguanosine-3'-phosphorothioate
  modified_base 23: mod_base = OTHER; note = 2'-O-methylguanosine-3'-phosphate
aatacggaagcccaagaagttgg

SEQ ID NO: 959 - RNA, 23 nt, synthetic construct
  source 1..23: mol_type = other RNA
  modified_base 1: mod_base = OTHER; note = 2'-O-methyladenosine-3'-phosphorothioate
  modified_base 2: mod_base = OTHER; note = 2'-fluorouridine -3'-phosphorothioate
  modified_base 3: mod_base = OTHER; note = 2'-O-methyladenosine-3'-phosphate
  modified_base 4: mod_base = OTHER; note = 2'-O-methyluridine-3'-phosphate
  modified_base 5: mod_base = OTHER; note = 2'-O-methyladenosine-3'-phosphate
  modified_base 6: mod_base = OTHER; note = 2'-fluorocytidine-3'-phosphate
  modified_base 7: mod_base = OTHER; note = 2'-O-methylguanosine-3'-phosphate
  modified_base 8: mod_base = OTHER; note = 2'-fluoroguanosine-3'-phosphate
  modified_base 9: mod_base = OTHER; note = 2'-fluoroadenosine-3'-phosphate
  modified_base 10: mod_base = OTHER; note = 2'-O-methyladenosine-3'-phosphate
  modified_base 11: mod_base = OTHER; note = 2'-O-methylguanosine-3'-phosphate
  modified_base 12: mod_base = OTHER; note = 2'-O-methylcytidine-3'-phosphate
  modified_base 13: mod_base = OTHER; note = 2'-O-methylcytidine-3'-phosphate
  modified_base 14: mod_base = OTHER; note = 2'-fluorocytidine-3'-phosphate
  modified_base 15: mod_base = OTHER; note = 2'-O-methyladenosine-3'-phosphate
  modified_base 16: mod_base = OTHER; note = 2'-fluoroadenosine-3'-phosphate
  modified_base 17: mod_base = OTHER; note = 2'-O-methylguanosine-3'-phosphate
  modified_base 18: mod_base = OTHER; note = 2'-O-methyladenosine-3'-phosphate
  modified_base 19: mod_base = OTHER; note = 2'-O-methyladenosine-3'-phosphate
  modified_base 20: mod_base = OTHER; note = 2'-O-methylguanosine-3'-phosphate
  modified_base 21: mod_base = OTHER; note = 2'-O-methyluridine-3'-phosphorothioate
  modified_base 22: mod_base = OTHER; note = 2'-O-methyluridine-3'-phosphorothioate
  modified_base 23: mod_base = OTHER; note = 2'-O-methylguanosine-3'-phosphate
atatacggaagcccaagaagttg

SEQ ID NO: 960 - RNA, 23 nt, synthetic construct
  source 1..23: mol_type = other RNA
  modified_base 1: mod_base = OTHER; note = 2'-O-methyladenosine-3'-phosphorothioate
  modified_base 2: mod_base = OTHER; note = 2'-fluoroadenosine-3'-phosphorothioate
  modified_base 3: mod_base = OTHER; note = 2'-O-methyluridine-3'-phosphate
  modified_base 4: mod_base = OTHER; note = 2'-O-methyladenosine-3'-phosphate
  modified_base 5: mod_base = OTHER; note = 2'-O-methyluridine-3'-phosphate
  modified_base 6: mod_base = OTHER; note = 2'-fluoroadenosine-3'-phosphate
  modified_base 7: mod_base = OTHER; note = 2'-O-methyluridine-3'-phosphate
  modified_base 8: mod_base = OTHER; note = 2'-fluoroadenosine-3'-phosphate
  modified_base 9: mod_base = OTHER; note = 2'-fluorocytidine-3'-phosphate
  modified_base 10: mod_base = OTHER; note = 2'-O-methylguanosine-3'-phosphate
  modified_base 11: mod_base = OTHER; note = 2'-O-methylguanosine-3'-phosphate
  modified_base 12: mod_base = OTHER; note = 2'-O-methyladenosine-3'-phosphate
  modified_base 13: mod_base = OTHER; note = 2'-O-methyladenosine-3'-phosphate
  modified_base 14: mod_base = OTHER; note = 2'-fluoroguanosine-3'-phosphate
  modified_base 15: mod_base = OTHER; note = 2'-O-methylcytidine-3'-phosphate
  modified_base 16: mod_base = OTHER; note = 2'-fluorocytidine-3'-phosphate
  modified_base 17: mod_base = OTHER; note = 2'-O-methylcytidine-3'-phosphate
  modified_base 18: mod_base = OTHER; note = 2'-O-methyladenosine-3'-phosphate
  modified_base 19: mod_base = OTHER; note = 2'-O-methyladenosine-3'-phosphate
  modified_base 20: mod_base = OTHER; note = 2'-O-methylguanosine-3'-phosphate
  modified_base 21: mod_base = OTHER; note = 2'-O-methyladenosine-3'-phosphorothioate
  modified_base 22: mod_base = OTHER; note = 2'-O-methyladenosine-3'-phosphorothioate
  modified_base 23: mod_base = OTHER; note = 2'-O-methylguanosine-3'-phosphate
aatatatacggaagcccaagaag

SEQ ID NO: 961 - RNA, 23 nt, synthetic construct
  source 1..23: mol_type = other RNA
  modified_base 1: mod_base = OTHER; note = 2'-O-methyladenosine-3'-phosphorothioate
  modified_base 2: mod_base = OTHER; note = 2'-fluorocytidine-3'-phosphorothioate
  modified_base 3: mod_base = OTHER; note = 2'-O-methylcytidine-3'-phosphate
  modified_base 4: mod_base = OTHER; note = 2'-O-methyladenosine-3'-phosphate
  modified_base 5: mod_base = OTHER; note = 2'-O-methyluridine-3'-phosphate
  modified_base 6: mod_base = OTHER; note = 2'-fluoroadenosine-3'-phosphate
  modified_base 7: mod_base = OTHER; note = 2'-O-methyluridine-3'-phosphate
  modified_base 8: mod_base = OTHER; note = 2'-fluoroadenosine-3'-phosphate
  modified_base 9: mod_base = OTHER; note = 2'-fluorouridine-3'-phosphate
  modified_base 10: mod_base = OTHER; note = 2'-O-methyladenosine-3'-phosphate
  modified_base 11: mod_base = OTHER; note = 2'-O-methylcytidine-3'-phosphate
  modified_base 12: mod_base = OTHER; note = 2'-O-methylguanosine-3'-phosphate
  modified_base 13: mod_base = OTHER; note = 2'-O-methylguanosine-3'-phosphate
  modified_base 14: mod_base = OTHER; note = 2'-fluoroadenosine-3'-phosphate
  modified_base 15: mod_base = OTHER; note = 2'-O-methyladenosine-3'-phosphate
  modified_base 16: mod_base = OTHER; note = 2'-fluoroguanosine-3'-phosphate
  modified_base 17: mod_base = OTHER; note = 2'-O-methylcytidine-3'-phosphate
  modified_base 18: mod_base = OTHER; note = 2'-O-methylcytidine-3'-phosphate
  modified_base 19: mod_base = OTHER; note = 2'-O-methylcytidine-3'-phosphate
  modified_base 20: mod_base = OTHER; note = 2'-O-methyladenosine-3'-phosphate
  modified_base 21: mod_base = OTHER; note = 2'-O-methyladenosine-3'-phosphorothioate
  modified_base 22: mod_base = OTHER; note = 2'-O-methylguanosine-3'-phosphorothioate
  modified_base 23: mod_base = OTHER; note = 2'-O-methyladenosine-3'-phosphate
accatatatacggaagcccaaga

SEQ ID NO: 962 - RNA, 23 nt, synthetic construct
  source 1..23: mol_type = other RNA
  modified_base 1: mod_base = OTHER; note = 2'-O-methyladenosine-3'-phosphorothioate
  modified_base 2: mod_base = OTHER; note = 2'-fluorocytidine-3'-phosphorothioate
  modified_base 3: mod_base = OTHER; note = 2'-O-methyluridine-3'-phosphate
  modified_base 4: mod_base = OTHER; note = 2'-O-methylcytidine-3'-phosphate
  modified_base 5: mod_base = OTHER; note = 2'-O-methyladenosine-3'-phosphate
  modified_base 6: mod_base = OTHER; note = 2'-fluorocytidine-3'-phosphate
  modified_base 7: mod_base = OTHER; note = 2'-O-methyluridine-3'-phosphate
  modified_base 8: mod_base = OTHER; note = 2'-fluoroguanosine-3'-phosphate
  modified_base 9: mod_base = OTHER; note = 2'-fluorouridine-3'-phosphate
  modified_base 10: mod_base = OTHER; note = 2'-O-methylguanosine-3'-phosphate
  modified_base 11: mod_base = OTHER; note = 2'-O-methylcytidine-3'-phosphate
  modified_base 12: mod_base = OTHER; note = 2'-O-methyladenosine-3'-phosphate
  modified_base 13: mod_base = OTHER; note = 2'-O-methyluridine-3'-phosphate
  modified_base 14: mod_base = OTHER; note = 2'-fluoroguanosine-3'-phosphate
  modified_base 15: mod_base = OTHER; note = 2'-O-methylcytidine-3'-phosphate
  modified_base 16: mod_base = OTHER; note = 2'-fluorocytidine-3'-phosphate
  modified_base 17: mod_base = OTHER; note = 2'-O-methyladenosine-3'-phosphate
  modified_base 18: mod_base = OTHER; note = 2'-O-methyluridine-3'-phosphate
  modified_base 19: mod_base = OTHER; note = 2'-O-methyladenosine-3'-phosphate
  modified_base 20: mod_base = OTHER; note = 2'-O-methyluridine-3'-phosphate
  modified_base 21: mod_base = OTHER; note = 2'-O-methyladenosine-3'-phosphorothioate
  modified_base 22: mod_base = OTHER; note = 2'-O-methyluridine-3'-phosphorothioate
  modified_base 23: mod_base = OTHER; note = 2'-O-methyladenosine-3'-phosphate
actcactgtgcatgccatatata

SEQ ID NO: 963 - RNA, 23 nt, synthetic construct
  source 1..23: mol_type = other RNA
  modified_base 1: mod_base = OTHER; note = 2'-O-methyladenosine-3'-phosphorothioate
  modified_base 2: mod_base = OTHER; note = 2'-fluorocytidine-3'-phosphorothioate
  modified_base 3: mod_base = OTHER; note = 2'-O-methylcytidine-3'-phosphate
  modified_base 4: mod_base = OTHER; note = 2'-O-methyladenosine-3'-phosphate
  modified_base 5: mod_base = OTHER; note = 2'-O-methyluridine-3'-phosphate
  modified_base 6: mod_base = OTHER; note = 2'-fluoroadenosine-3'-phosphate
  modified_base 7: mod_base = OTHER; note = 2'-O-methylguanosine-3'-phosphate
  modified_base 8: mod_base = OTHER; note = 2'-fluorocytidine-3'-phosphate
  modified_base 9: mod_base = OTHER; note = 2'-fluorouridine-3'-phosphate
  modified_base 10: mod_base = OTHER; note = 2'-O-methylcytidine-3'-phosphate
  modified_base 11: mod_base = OTHER; note = 2'-O-methyladenosine-3'-phosphate
  modified_base 12: mod_base = OTHER; note = 2'-O-methylcytidine-3'-phosphate
  modified_base 13: mod_base = OTHER; note = 2'-O-methyluridine-3'-phosphate
  modified_base 14: mod_base = OTHER; note = 2'-fluoroguanosine-3'-phosphate
  modified_base 15: mod_base = OTHER; note = 2'-O-methyluridine-3'-phosphate
  modified_base 16: mod_base = OTHER; note = 2'-fluoroguanosine-3'-phosphate
  modified_base 17: mod_base = OTHER; note = 2'-O-methylcytidine-3'-phosphate
  modified_base 18: mod_base = OTHER; note = 2'-O-methyladenosine-3'-phosphate
  modified_base 19: mod_base = OTHER; note = 2'-O-methyluridine-3'-phosphate
  modified_base 20: mod_base = OTHER; note = 2'-O-methylguanosine-3'-phosphate
  modified_base 21: mod_base = OTHER; note = 2'-O-methylcytidine-3'-phosphorothioate
  modified_base 22: mod_base = OTHER; note = 2'-O-methylcytidine-3'-phosphorothioate
  modified_base 23: mod_base = OTHER; note = 2'-O-methyladenosine-3'-phosphate
accatagctcactgtgcatgcca

SEQ ID NO: 964 - RNA, 23 nt, synthetic construct
  source 1..23: mol_type = other RNA
  modified_base 1: mod_base = OTHER; note = 2'-O-methyladenosine-3'-phosphorothioate
  modified_base 2: mod_base = OTHER; note = 2'-fluorouridine -3'-phosphorothioate
  modified_base 3: mod_base = OTHER; note = 2'-O-methylcytidine-3'-phosphate
  modified_base 4: mod_base = OTHER; note = 2'-O-methylcytidine-3'-phosphate
  modified_base 5: mod_base = OTHER; note = 2'-O-methyladenosine-3'-phosphate
  modified_base 6: mod_base = OTHER; note = 2'-fluoroadenosine-3'-phosphate
  modified_base 7: mod_base = OTHER; note = 2'-O-methylguanosine-3'-phosphate
  modified_base 8: mod_base = OTHER; note = 2'-fluoroguanosine-3'-phosphate
  modified_base 9: mod_base = OTHER; note = 2'-fluorocytidine-3'-phosphate
  modified_base 10: mod_base = OTHER; note = 2'-O-methyluridine-3'-phosphate
  modified_base 11: mod_base = OTHER; note = 2'-O-methylcytidine-3'-phosphate
  modified_base 12: mod_base = OTHER; note = 2'-O-methylcytidine-3'-phosphate
  modified_base 13: mod_base = OTHER; note = 2'-O-methylcytidine-3'-phosphate
  modified_base 14: mod_base = OTHER; note = 2'-fluoroadenosine-3'-phosphate
  modified_base 15: mod_base = OTHER; note = 2'-O-methylguanosine-3'-phosphate
  modified_base 16: mod_base = OTHER; note = 2'-fluoroadenosine-3'-phosphate
  modified_base 17: mod_base = OTHER; note = 2'-O-methyluridine-3'-phosphate
  modified_base 18: mod_base = OTHER; note = 2'-O-methyladenosine-3'-phosphate
  modified_base 19: mod_base = OTHER; note = 2'-O-methylguanosine-3'-phosphate
  modified_base 20: mod_base = OTHER; note = 2'-O-methyladenosine-3'-phosphate
  modified_base 21: mod_base = OTHER; note = 2'-O-methylguanosine-3'-phosphorothioate
  modified_base 22: mod_base = OTHER; note = 2'-O-methyladenosine-3'-phosphorothioate
  modified_base 23: mod_base = OTHER; note = 2'-O-methylguanosine-3'-phosphate
atccaaggctcccagatagagag

SEQ ID NO: 965 - RNA, 23 nt, synthetic construct
  source 1..23: mol_type = other RNA
  modified_base 1: mod_base = OTHER; note = 2'-O-methyladenosine-3'-phosphorothioate
  modified_base 2: mod_base = OTHER; note = 2'-fluoroadenosine-3'-phosphorothioate
  modified_base 3: mod_base = OTHER; note = 2'-O-methylguanosine-3'-phosphate
  modified_base 4: mod_base = OTHER; note = 2'-O-methylguanosine-3'-phosphate
  modified_base 5: mod_base = OTHER; note = 2'-O-methyladenosine-3'-phosphate
  modified_base 6: mod_base = OTHER; note = 2'-fluorouridine-3'-phosphate
  modified_base 7: mod_base = OTHER; note = 2'-O-methyluridine-3'-phosphate
  modified_base 8: mod_base = OTHER; note = 2'-fluoroguanosine-3'-phosphate
  modified_base 9: mod_base = OTHER; note = 2'-fluorocytidine-3'-phosphate
  modified_base 10: mod_base = OTHER; note = 2'-O-methylcytidine-3'-phosphate
  modified_base 11: mod_base = OTHER; note = 2'-O-methyluridine-3'-phosphate
  modified_base 12: mod_base = OTHER; note = 2'-O-methylguanosine-3'-phosphate
  modified_base 13: mod_base = OTHER; note = 2'-O-methyluridine-3'-phosphate
  modified_base 14: mod_base = OTHER; note = 2'-fluoroadenosine-3'-phosphate
  modified_base 15: mod_base = OTHER; note = 2'-O-methylguanosine-3'-phosphate
  modified_base 16: mod_base = OTHER; note = 2'-fluorocytidine-3'-phosphate
  modified_base 17: mod_base = OTHER; note = 2'-O-methylcytidine-3'-phosphate
  modified_base 18: mod_base = OTHER; note = 2'-O-methyluridine-3'-phosphate
  modified_base 19: mod_base = OTHER; note = 2'-O-methylguanosine-3'-phosphate
  modified_base 20: mod_base = OTHER; note = 2'-O-methyluridine-3'-phosphate
  modified_base 21: mod_base = OTHER; note = 2'-O-methylcytidine-3'-phosphorothioate
  modified_base 22: mod_base = OTHER; note = 2'-O-methyladenosine-3'-phosphorothioate
  modified_base 23: mod_base = OTHER; note = 2'-O-methylguanosine-3'-phosphate
aaggattgcctgtagcctgtcag

SEQ ID NO: 966 - RNA, 23 nt, synthetic construct
  source 1..23: mol_type = other RNA
  modified_base 1: mod_base = OTHER; note = 2'-O-methyladenosine-3'-phosphorothioate
  modified_base 2: mod_base = OTHER; note = 2'-fluorocytidine-3'-phosphorothioate
  modified_base 3: mod_base = OTHER; note = 2'-O-methyladenosine-3'-phosphate
  modified_base 4: mod_base = OTHER; note = 2'-O-methylguanosine-3'-phosphate
  modified_base 5: mod_base = OTHER; note = 2'-O-methylguanosine-3'-phosphate
  modified_base 6: mod_base = OTHER; note = 2'-fluoroadenosine-3'-phosphate
  modified_base 7: mod_base = OTHER; note = 2'-O-methyluridine-3'-phosphate
  modified_base 8: mod_base = OTHER; note = 2'-fluorouridine-3'-phosphate
  modified_base 9: mod_base = OTHER; note = 2'-fluoroguanosine-3'-phosphate
  modified_base 10: mod_base = OTHER; note = 2'-O-methylcytidine-3'-phosphate
  modified_base 11: mod_base = OTHER; note = 2'-O-methylcytidine-3'-phosphate
  modified_base 12: mod_base = OTHER; note = 2'-O-methyluridine-3'-phosphate
  modified_base 13: mod_base = OTHER; note = 2'-O-methylguanosine-3'-phosphate
  modified_base 14: mod_base = OTHER; note = 2'-fluorouridine-3'-phosphate
  modified_base 15: mod_base = OTHER; note = 2'-O-methyladenosine-3'-phosphate
  modified_base 16: mod_base = OTHER; note = 2'-fluoroguanosine-3'-phosphate
  modified_base 17: mod_base = OTHER; note = 2'-O-methylcytidine-3'-phosphate
  modified_base 18: mod_base = OTHER; note = 2'-O-methylcytidine-3'-phosphate
  modified_base 19: mod_base = OTHER; note = 2'-O-methyluridine-3'-phosphate
  modified_base 20: mod_base = OTHER; note = 2'-O-methylguanosine-3'-phosphate
  modified_base 21: mod_base = OTHER; note = 2'-O-methyluridine-3'-phosphorothioate
  modified_base 22: mod_base = OTHER; note = 2'-O-methylcytidine-3'-phosphorothioate
  modified_base 23: mod_base = OTHER; note = 2'-O-methyladenosine-3'-phosphate
acaggattgcctgtagcctgtca

SEQ ID NO: 967 - RNA, 23 nt, synthetic construct
  source 1..23: mol_type = other RNA
  modified_base 1: mod_base = OTHER; note = 2'-O-methyladenosine-3'-phosphorothioate
  modified_base 2: mod_base = OTHER; note = 2'-fluoroadenosine-3'-phosphorothioate
  modified_base 3: mod_base = OTHER; note = 2'-O-methyladenosine-3'-phosphate
  modified_base 4: mod_base = OTHER; note = 2'-O-methylcytidine-3'-phosphate
  modified_base 5: mod_base = OTHER; note = 2'-O-methyladenosine-3'-phosphate
  modified_base 6: mod_base = OTHER; note = 2'-fluorocytidine-3'-phosphate
  modified_base 7: mod_base = OTHER; note = 2'-O-methylcytidine-3'-phosphate
  modified_base 8: mod_base = OTHER; note = 2'-fluorocytidine-3'-phosphate
  modified_base 9: mod_base = OTHER; note = 2'-fluoroadenosine-3'-phosphate
  modified_base 10: mod_base = OTHER; note = 2'-O-methylguanosine-3'-phosphate
  modified_base 11: mod_base = OTHER; note = 2'-O-methylguanosine-3'-phosphate
  modified_base 12: mod_base = OTHER; note = 2'-O-methyladenosine-3'-phosphate
  modified_base 13: mod_base = OTHER; note = 2'-O-methyluridine-3'-phosphate
  modified_base 14: mod_base = OTHER; note = 2'-fluorouridine-3'-phosphate
  modified_base 15: mod_base = OTHER; note = 2'-O-methylguanosine-3'-phosphate
  modified_base 16: mod_base = OTHER; note = 2'-fluorocytidine-3'-phosphate
  modified_base 17: mod_base = OTHER; note = 2'-O-methylcytidine-3'-phosphate
  modified_base 18: mod_base = OTHER; note = 2'-O-methyluridine-3'-phosphate
  modified_base 19: mod_base = OTHER; note = 2'-O-methylguanosine-3'-phosphate
  modified_base 20: mod_base = OTHER; note = 2'-O-methyluridine-3'-phosphate
  modified_base 21: mod_base = OTHER; note = 2'-O-methyladenosine-3'-phosphorothioate
  modified_base 22: mod_base = OTHER; note = 2'-O-methylguanosine-3'-phosphorothioate
  modified_base 23: mod_base = OTHER; note = 2'-O-methylcytidine-3'-phosphate
aaacacccaggattgcctgtagc

SEQ ID NO: 968 - RNA, 23 nt, synthetic construct
  source 1..23: mol_type = other RNA
  modified_base 1: mod_base = OTHER; note = 2'-O-methyladenosine-3'-phosphorothioate
  modified_base 2: mod_base = OTHER; note = 2'-fluoroguanosine-3'-phosphorothioate
  modified_base 3: mod_base = OTHER; note = 2'-O-methyladenosine-3'-phosphate
  modified_base 4: mod_base = OTHER; note = 2'-O-methyladenosine-3'-phosphate
  modified_base 5: mod_base = OTHER; note = 2'-O-methylcytidine-3'-phosphate
  modified_base 6: mod_base = OTHER; note = 2'-fluoroadenosine-3'-phosphate
  modified_base 7: mod_base = OTHER; note = 2'-O-methylcytidine-3'-phosphate
  modified_base 8: mod_base = OTHER; note = 2'-fluorocytidine-3'-phosphate
  modified_base 9: mod_base = OTHER; note = 2'-fluorocytidine-3'-phosphate
  modified_base 10: mod_base = OTHER; note = 2'-O-methyladenosine-3'-phosphate
  modified_base 11: mod_base = OTHER; note = 2'-O-methylguanosine-3'-phosphate
  modified_base 12: mod_base = OTHER; note = 2'-O-methylguanosine-3'-phosphate
  modified_base 13: mod_base = OTHER; note = 2'-O-methyladenosine-3'-phosphate
  modified_base 14: mod_base = OTHER; note = 2'-fluorouridine-3'-phosphate
  modified_base 15: mod_base = OTHER; note = 2'-O-methyluridine-3'-phosphate
  modified_base 16: mod_base = OTHER; note = 2'-fluoroguanosine-3'-phosphate
  modified_base 17: mod_base = OTHER; note = 2'-O-methylcytidine-3'-phosphate
  modified_base 18: mod_base = OTHER; note = 2'-O-methylcytidine-3'-phosphate
  modified_base 19: mod_base = OTHER; note = 2'-O-methyluridine-3'-phosphate
  modified_base 20: mod_base = OTHER; note = 2'-O-methylguanosine-3'-phosphate
  modified_base 21: mod_base = OTHER; note = 2'-O-methyluridine-3'-phosphorothioate
  modified_base 22: mod_base = OTHER; note = 2'-O-methyladenosine-3'-phosphorothioate
  modified_base 23: mod_base = OTHER; note = 2'-O-methylguanosine-3'-phosphate
agaacacccaggattgcctgtag

SEQ ID NO: 969 - RNA, 23 nt, synthetic construct
  source 1..23: mol_type = other RNA
  modified_base 1: mod_base = OTHER; note = 2'-O-methyladenosine-3'-phosphorothioate
  modified_base 2: mod_base = OTHER; note = 2'-fluoroadenosine-3'-phosphorothioate
  modified_base 3: mod_base = OTHER; note = 2'-O-methyladenosine-3'-phosphate
  modified_base 4: mod_base = OTHER; note = 2'-O-methylguanosine-3'-phosphate
  modified_base 5: mod_base = OTHER; note = 2'-O-methylguanosine-3'-phosphate
  modified_base 6: mod_base = OTHER; note = 2'-fluoroadenosine-3'-phosphate
  modified_base 7: mod_base = OTHER; note = 2'-O-methyladenosine-3'-phosphate
  modified_base 8: mod_base = OTHER; note = 2'-fluorocytidine-3'-phosphate
  modified_base 9: mod_base = OTHER; note = 2'-fluoroadenosine-3'-phosphate
  modified_base 10: mod_base = OTHER; note = 2'-O-methylcytidine-3'-phosphate
  modified_base 11: mod_base = OTHER; note = 2'-O-methylcytidine-3'-phosphate
  modified_base 12: mod_base = OTHER; note = 2'-O-methylcytidine-3'-phosphate
  modified_base 13: mod_base = OTHER; note = 2'-O-methyladenosine-3'-phosphate
  modified_base 14: mod_base = OTHER; note = 2'-fluoroguanosine-3'-phosphate
  modified_base 15: mod_base = OTHER; note = 2'-O-methylguanosine-3'-phosphate
  modified_base 16: mod_base = OTHER; note = 2'-fluoroadenosine-3'-phosphate
  modified_base 17: mod_base = OTHER; note = 2'-O-methyluridine-3'-phosphate
  modified_base 18: mod_base = OTHER; note = 2'-O-methyluridine-3'-phosphate
  modified_base 19: mod_base = OTHER; note = 2'-O-methylguanosine-3'-phosphate
  modified_base 20: mod_base = OTHER; note = 2'-O-methylcytidine-3'-phosphate
  modified_base 21: mod_base = OTHER; note = 2'-O-methylcytidine-3'-phosphorothioate
  modified_base 22: mod_base = OTHER; note = 2'-O-methyluridine-3'-phosphorothioate
  modified_base 23: mod_base = OTHER; note = 2'-O-methylguanosine-3'-phosphate
aaaggaacacccaggattgcctg

SEQ ID NO: 970 - RNA, 23 nt, synthetic construct
  source 1..23: mol_type = other RNA
  modified_base 1: mod_base = OTHER; note = 2'-O-methyladenosine-3'-phosphorothioate
  modified_base 2: mod_base = OTHER; note = 2'-fluorocytidine-3'-phosphorothioate
  modified_base 3: mod_base = OTHER; note = 2'-O-methyladenosine-3'-phosphate
  modified_base 4: mod_base = OTHER; note = 2'-O-methyladenosine-3'-phosphate
  modified_base 5: mod_base = OTHER; note = 2'-O-methylguanosine-3'-phosphate
  modified_base 6: mod_base = OTHER; note = 2'-fluoroguanosine-3'-phosphate
  modified_base 7: mod_base = OTHER; note = 2'-O-methyladenosine-3'-phosphate
  modified_base 8: mod_base = OTHER; note = 2'-fluoroadenosine-3'-phosphate
  modified_base 9: mod_base = OTHER; note = 2'-fluorocytidine-3'-phosphate
  modified_base 10: mod_base = OTHER; note = 2'-O-methyladenosine-3'-phosphate
  modified_base 11: mod_base = OTHER; note = 2'-O-methylcytidine-3'-phosphate
  modified_base 12: mod_base = OTHER; note = 2'-O-methylcytidine-3'-phosphate
  modified_base 13: mod_base = OTHER; note = 2'-O-methylcytidine-3'-phosphate
  modified_base 14: mod_base = OTHER; note = 2'-fluoroadenosine-3'-phosphate
  modified_base 15: mod_base = OTHER; note = 2'-O-methylguanosine-3'-phosphate
  modified_base 16: mod_base = OTHER; note = 2'-fluoroguanosine-3'-phosphate
  modified_base 17: mod_base = OTHER; note = 2'-O-methyladenosine-3'-phosphate
  modified_base 18: mod_base = OTHER; note = 2'-O-methyluridine-3'-phosphate
  modified_base 19: mod_base = OTHER; note = 2'-O-methyluridine-3'-phosphate
  modified_base 20: mod_base = OTHER; note = 2'-O-methylguanosine-3'-phosphate
  modified_base 21: mod_base = OTHER; note = 2'-O-methylcytidine-3'-phosphorothioate
  modified_base 22: mod_base = OTHER; note = 2'-O-methylcytidine-3'-phosphorothioate
  modified_base 23: mod_base = OTHER; note = 2'-O-methyluridine-3'-phosphate
acaaggaacacccaggattgcct

SEQ ID NO: 971 - RNA, 23 nt, synthetic construct
  source 1..23: mol_type = other RNA
  modified_base 1: mod_base = OTHER; note = 2'-O-methyladenosine-3'-phosphorothioate
  modified_base 2: mod_base = OTHER; note = 2'-fluorouridine -3'-phosphorothioate
  modified_base 3: mod_base = OTHER; note = 2'-O-methylcytidine-3'-phosphate
  modified_base 4: mod_base = OTHER; note = 2'-O-methylcytidine-3'-phosphate
  modified_base 5: mod_base = OTHER; note = 2'-O-methyladenosine-3'-phosphate
  modified_base 6: mod_base = OTHER; note = 2'-fluoroadenosine-3'-phosphate
  modified_base 7: mod_base = OTHER; note = 2'-O-methylguanosine-3'-phosphate
  modified_base 8: mod_base = OTHER; note = 2'-fluoroguanosine-3'-phosphate
  modified_base 9: mod_base = OTHER; note = 2'-fluoroadenosine-3'-phosphate
  modified_base 10: mod_base = OTHER; note = 2'-O-methyladenosine-3'-phosphate
  modified_base 11: mod_base = OTHER; note = 2'-O-methylcytidine-3'-phosphate
  modified_base 12: mod_base = OTHER; note = 2'-O-methyladenosine-3'-phosphate
  modified_base 13: mod_base = OTHER; note = 2'-O-methylcytidine-3'-phosphate
  modified_base 14: mod_base = OTHER; note = 2'-fluorocytidine-3'-phosphate
  modified_base 15: mod_base = OTHER; note = 2'-O-methylcytidine-3'-phosphate
  modified_base 16: mod_base = OTHER; note = 2'-fluoroadenosine-3'-phosphate
  modified_base 17: mod_base = OTHER; note = 2'-O-methylguanosine-3'-phosphate
  modified_base 18: mod_base = OTHER; note = 2'-O-methylguanosine-3'-phosphate
  modified_base 19: mod_base = OTHER; note = 2'-O-methyladenosine-3'-phosphate
  modified_base 20: mod_base = OTHER; note = 2'-O-methyluridine-3'-phosphate
  modified_base 21: mod_base = OTHER; note = 2'-O-methyluridine-3'-phosphorothioate
  modified_base 22: mod_base = OTHER; note = 2'-O-methylguanosine-3'-phosphorothioate
  modified_base 23: mod_base = OTHER; note = 2'-O-methylcytidine-3'-phosphate
atccaaggaacacccaggattgc

SEQ ID NO: 972 - RNA, 23 nt, synthetic construct
  source 1..23: mol_type = other RNA
  modified_base 1: mod_base = OTHER; note = 2'-O-methyladenosine-3'-phosphorothioate
  modified_base 2: mod_base = OTHER; note = 2'-fluorocytidine-3'-phosphorothioate
  modified_base 3: mod_base = OTHER; note = 2'-O-methyluridine-3'-phosphate
  modified_base 4: mod_base = OTHER; note = 2'-O-methyluridine-3'-phosphate
  modified_base 5: mod_base = OTHER; note = 2'-O-methylcytidine-3'-phosphate
  modified_base 6: mod_base = OTHER; note = 2'-fluorocytidine-3'-phosphate
  modified_base 7: mod_base = OTHER; note = 2'-O-methyladenosine-3'-phosphate
  modified_base 8: mod_base = OTHER; note = 2'-fluoroadenosine-3'-phosphate
  modified_base 9: mod_base = OTHER; note = 2'-fluoroguanosine-3'-phosphate
  modified_base 10: mod_base = OTHER; note = 2'-O-methylguanosine-3'-phosphate
  modified_base 11: mod_base = OTHER; note = 2'-O-methyladenosine-3'-phosphate
  modified_base 12: mod_base = OTHER; note = 2'-O-methyladenosine-3'-phosphate
  modified_base 13: mod_base = OTHER; note = 2'-O-methylcytidine-3'-phosphate
  modified_base 14: mod_base = OTHER; note = 2'-fluoroadenosine-3'-phosphate
  modified_base 15: mod_base = OTHER; note = 2'-O-methylcytidine-3'-phosphate
  modified_base 16: mod_base = OTHER; note = 2'-fluorocytidine-3'-phosphate
  modified_base 17: mod_base = OTHER; note = 2'-O-methylcytidine-3'-phosphate
  modified_base 18: mod_base = OTHER; note = 2'-O-methyladenosine-3'-phosphate
  modified_base 19: mod_base = OTHER; note = 2'-O-methylguanosine-3'-phosphate
  modified_base 20: mod_base = OTHER; note = 2'-O-methylguanosine-3'-phosphate
  modified_base 21: mod_base = OTHER; note = 2'-O-methyladenosine-3'-phosphorothioate
  modified_base 22: mod_base = OTHER; note = 2'-O-methyluridine-3'-phosphorothioate
  modified_base 23: mod_base = OTHER; note = 2'-O-methyluridine-3'-phosphate
acttccaaggaacacccaggatt

SEQ ID NO: 973 - RNA, 23 nt, synthetic construct
  source 1..23: mol_type = other RNA
  modified_base 1: mod_base = OTHER; note = 2'-O-methyladenosine-3'-phosphorothioate
  modified_base 2: mod_base = OTHER; note = 2'-fluorocytidine-3'-phosphorothioate
  modified_base 3: mod_base = OTHER; note = 2'-O-methyladenosine-3'-phosphate
  modified_base 4: mod_base = OTHER; note = 2'-O-methylguanosine-3'-phosphate
  modified_base 5: mod_base = OTHER; note = 2'-O-methyluridine-3'-phosphate
  modified_base 6: mod_base = OTHER; note = 2'-fluorouridine-3'-phosphate
  modified_base 7: mod_base = OTHER; note = 2'-O-methylcytidine-3'-phosphate
  modified_base 8: mod_base = OTHER; note = 2'-fluorouridine-3'-phosphate
  modified_base 9: mod_base = OTHER; note = 2'-fluorouridine-3'-phosphate
  modified_base 10: mod_base = OTHER; note = 2'-O-methylguanosine-3'-phosphate
  modified_base 11: mod_base = OTHER; note = 2'-O-methyluridine-3'-phosphate
  modified_base 12: mod_base = OTHER; note = 2'-O-methylcytidine-3'-phosphate
  modified_base 13: mod_base = OTHER; note = 2'-O-methylcytidine-3'-phosphate
  modified_base 14: mod_base = OTHER; note = 2'-fluorouridine-3'-phosphate
  modified_base 15: mod_base = OTHER; note = 2'-O-methyluridine-3'-phosphate
  modified_base 16: mod_base = OTHER; note = 2'-fluorocytidine-3'-phosphate
  modified_base 17: mod_base = OTHER; note = 2'-O-methylcytidine-3'-phosphate
  modified_base 18: mod_base = OTHER; note = 2'-O-methyladenosine-3'-phosphate
  modified_base 19: mod_base = OTHER; note = 2'-O-methyladenosine-3'-phosphate
  modified_base 20: mod_base = OTHER; note = 2'-O-methylguanosine-3'-phosphate
  modified_base 21: mod_base = OTHER; note = 2'-O-methylguanosine-3'-phosphorothioate
  modified_base 22: mod_base = OTHER; note = 2'-O-methyladenosine-3'-phosphorothioate
  modified_base 23: mod_base = OTHER; note = 2'-O-methyladenosine-3'-phosphate
acagttcttgtccttccaaggaa

SEQ ID NO: 974 - RNA, 23 nt, synthetic construct
  source 1..23: mol_type = other RNA
  modified_base 1: mod_base = OTHER; note = 2'-O-methyladenosine-3'-phosphorothioate
  modified_base 2: mod_base = OTHER; note = 2'-fluoroadenosine-3'-phosphorothioate
  modified_base 3: mod_base = OTHER; note = 2'-O-methylcytidine-3'-phosphate
  modified_base 4: mod_base = OTHER; note = 2'-O-methyladenosine-3'-phosphate
  modified_base 5: mod_base = OTHER; note = 2'-O-methyladenosine-3'-phosphate
  modified_base 6: mod_base = OTHER; note = 2'-fluoroadenosine-3'-phosphate
  modified_base 7: mod_base = OTHER; note = 2'-O-methylcytidine-3'-phosphate
  modified_base 8: mod_base = OTHER; note = 2'-fluoroguanosine-3'-phosphate
  modified_base 9: mod_base = OTHER; note = 2'-fluoroguanosine-3'-phosphate
  modified_base 10: mod_base = OTHER; note = 2'-O-methylcytidine-3'-phosphate
  modified_base 11: mod_base = OTHER; note = 2'-O-methyluridine-3'-phosphate
  modified_base 12: mod_base = OTHER; note = 2'-O-methylguanosine-3'-phosphate
  modified_base 13: mod_base = OTHER; note = 2'-O-methylcytidine-3'-phosphate
  modified_base 14: mod_base = OTHER; note = 2'-fluorouridine-3'-phosphate
  modified_base 15: mod_base = OTHER; note = 2'-O-methyluridine-3'-phosphate
  modified_base 16: mod_base = OTHER; note = 2'-fluorocytidine-3'-phosphate
  modified_base 17: mod_base = OTHER; note = 2'-O-methyladenosine-3'-phosphate
  modified_base 18: mod_base = OTHER; note = 2'-O-methylguanosine-3'-phosphate
  modified_base 19: mod_base = OTHER; note = 2'-O-methylguanosine-3'-phosphate
  modified_base 20: mod_base = OTHER; note = 2'-O-methyluridine-3'-phosphate
  modified_base 21: mod_base = OTHER; note = 2'-O-methylguanosine-3'-phosphorothioate
  modified_base 22: mod_base = OTHER; note = 2'-O-methylcytidine-3'-phosphorothioate
  modified_base 23: mod_base = OTHER; note = 2'-O-methyladenosine-3'-phosphate
aacaaacggctgcttcaggtgca

SEQ ID NO: 975 - RNA, 23 nt, synthetic construct
  source 1..23: mol_type = other RNA
  modified_base 1: mod_base = OTHER; note = 2'-O-methyladenosine-3'-phosphorothioate
  modified_base 2: mod_base = OTHER; note = 2'-fluorocytidine-3'-phosphorothioate
  modified_base 3: mod_base = OTHER; note = 2'-O-methyladenosine-3'-phosphate
  modified_base 4: mod_base = OTHER; note = 2'-O-methylguanosine-3'-phosphate
  modified_base 5: mod_base = OTHER; note = 2'-O-methyluridine-3'-phosphate
  modified_base 6: mod_base = OTHER; note = 2'-fluorouridine-3'-phosphate
  modified_base 7: mod_base = OTHER; note = 2'-O-methylcytidine-3'-phosphate
  modified_base 8: mod_base = OTHER; note = 2'-fluorouridine-3'-phosphate
  modified_base 9: mod_base = OTHER; note = 2'-fluoroguanosine-3'-phosphate
  modified_base 10: mod_base = OTHER; note = 2'-O-methyluridine-3'-phosphate
  modified_base 11: mod_base = OTHER; note = 2'-O-methylguanosine-3'-phosphate
  modified_base 12: mod_base = OTHER; note = 2'-O-methyladenosine-3'-phosphate
  modified_base 13: mod_base = OTHER; note = 2'-O-methyladenosine-3'-phosphate
  modified_base 14: mod_base = OTHER; note = 2'-fluoroguanosine-3'-phosphate
  modified_base 15: mod_base = OTHER; note = 2'-O-methyluridine-3'-phosphate
  modified_base 16: mod_base = OTHER; note = 2'-fluorocytidine-3'-phosphate
  modified_base 17: mod_base = OTHER; note = 2'-O-methylcytidine-3'-phosphate
  modified_base 18: mod_base = OTHER; note = 2'-O-methyladenosine-3'-phosphate
  modified_base 19: mod_base = OTHER; note = 2'-O-methylguanosine-3'-phosphate
  modified_base 20: mod_base = OTHER; note = 2'-O-methyladenosine-3'-phosphate
  modified_base 21: mod_base = OTHER; note = 2'-O-methylguanosine-3'-phosphorothioate
  modified_base 22: mod_base = OTHER; note = 2'-O-methyladenosine-3'-phosphorothioate
  modified_base 23: mod_base = OTHER; note = 2'-O-methylguanosine-3'-phosphate
acagttctgtgaagtccagagag

SEQ ID NO: 976 - RNA, 23 nt, synthetic construct
  source 1..23: mol_type = other RNA
  modified_base 1: mod_base = OTHER; note = 2'-O-methyladenosine-3'-phosphorothioate
  modified_base 2: mod_base = OTHER; note = 2'-fluorocytidine-3'-phosphorothioate
  modified_base 3: mod_base = OTHER; note = 2'-O-methylcytidine-3'-phosphate
  modified_base 4: mod_base = OTHER; note = 2'-O-methyladenosine-3'-phosphate
  modified_base 5: mod_base = OTHER; note = 2'-O-methylguanosine-3'-phosphate
  modified_base 6: mod_base = OTHER; note = 2'-fluorouridine-3'-phosphate
  modified_base 7: mod_base = OTHER; note = 2'-O-methyluridine-3'-phosphate
  modified_base 8: mod_base = OTHER; note = 2'-fluorocytidine-3'-phosphate
  modified_base 9: mod_base = OTHER; note = 2'-fluorouridine-3'-phosphate
  modified_base 10: mod_base = OTHER; note = 2'-O-methylguanosine-3'-phosphate
  modified_base 11: mod_base = OTHER; note = 2'-O-methyluridine-3'-phosphate
  modified_base 12: mod_base = OTHER; note = 2'-O-methylguanosine-3'-phosphate
  modified_base 13: mod_base = OTHER; note = 2'-O-methyladenosine-3'-phosphate
  modified_base 14: mod_base = OTHER; note = 2'-fluoroadenosine-3'-phosphate
  modified_base 15: mod_base = OTHER; note = 2'-O-methylguanosine-3'-phosphate
  modified_base 16: mod_base = OTHER; note = 2'-fluorouridine-3'-phosphate
  modified_base 17: mod_base = OTHER; note = 2'-O-methylcytidine-3'-phosphate
  modified_base 18: mod_base = OTHER; note = 2'-O-methylcytidine-3'-phosphate
  modified_base 19: mod_base = OTHER; note = 2'-O-methyladenosine-3'-phosphate
  modified_base 20: mod_base = OTHER; note = 2'-O-methylguanosine-3'-phosphate
  modified_base 21: mod_base = OTHER; note = 2'-O-methyladenosine-3'-phosphorothioate
  modified_base 22: mod_base = OTHER; note = 2'-O-methylguanosine-3'-phosphorothioate
  modified_base 23: mod_base = OTHER; note = 2'-O-methyladenosine-3'-phosphate
accagttctgtgaagtccagaga

SEQ ID NO: 977 - RNA, 23 nt, synthetic construct
  source 1..23: mol_type = other RNA
  modified_base 1: mod_base = OTHER; note = 2'-O-methyladenosine-3'-phosphorothioate
  modified_base 2: mod_base = OTHER; note = 2'-fluorocytidine-3'-phosphorothioate
  modified_base 3: mod_base = OTHER; note = 2'-O-methyladenosine-3'-phosphate
  modified_base 4: mod_base = OTHER; note = 2'-O-methyluridine-3'-phosphate
  modified_base 5: mod_base = OTHER; note = 2'-O-methylcytidine-3'-phosphate
  modified_base 6: mod_base = OTHER; note = 2'-fluorocytidine-3'-phosphate
  modified_base 7: mod_base = OTHER; note = 2'-O-methyladenosine-3'-phosphate
  modified_base 8: mod_base = OTHER; note = 2'-fluoroguanosine-3'-phosphate
  modified_base 9: mod_base = OTHER; note = 2'-fluorouridine-3'-phosphate
  modified_base 10: mod_base = OTHER; note = 2'-O-methyluridine-3'-phosphate
  modified_base 11: mod_base = OTHER; note = 2'-O-methylcytidine-3'-phosphate
  modified_base 12: mod_base = OTHER; note = 2'-O-methyluridine-3'-phosphate
  modified_base 13: mod_base = OTHER; note = 2'-O-methylguanosine-3'-phosphate
  modified_base 14: mod_base = OTHER; note = 2'-fluorouridine-3'-phosphate
  modified_base 15: mod_base = OTHER; note = 2'-O-methylguanosine-3'-phosphate
  modified_base 16: mod_base = OTHER; note = 2'-fluoroadenosine-3'-phosphate
  modified_base 17: mod_base = OTHER; note = 2'-O-methyladenosine-3'-phosphate
  modified_base 18: mod_base = OTHER; note = 2'-O-methylguanosine-3'-phosphate
  modified_base 19: mod_base = OTHER; note = 2'-O-methyluridine-3'-phosphate
  modified_base 20: mod_base = OTHER; note = 2'-O-methylcytidine-3'-phosphate
  modified_base 21: mod_base = OTHER; note = 2'-O-methylcytidine-3'-phosphorothioate
  modified_base 22: mod_base = OTHER; note = 2'-O-methyladenosine-3'-phosphorothioate
  modified_base 23: mod_base = OTHER; note = 2'-O-methylguanosine-3'-phosphate
acatccagttctgtgaagtccag

SEQ ID NO: 978 - RNA, 23 nt, synthetic construct
  source 1..23: mol_type = other RNA
  modified_base 1: mod_base = OTHER; note = 2'-O-methyladenosine-3'-phosphorothioate
  modified_base 2: mod_base = OTHER; note = 2'-fluoroadenosine-3'-phosphorothioate
  modified_base 3: mod_base = OTHER; note = 2'-O-methyladenosine-3'-phosphate
  modified_base 4: mod_base = OTHER; note = 2'-O-methylcytidine-3'-phosphate
  modified_base 5: mod_base = OTHER; note = 2'-O-methyladenosine-3'-phosphate
  modified_base 6: mod_base = OTHER; note = 2'-fluorouridine-3'-phosphate
  modified_base 7: mod_base = OTHER; note = 2'-O-methylcytidine-3'-phosphate
  modified_base 8: mod_base = OTHER; note = 2'-fluorocytidine-3'-phosphate
  modified_base 9: mod_base = OTHER; note = 2'-fluoroadenosine-3'-phosphate
  modified_base 10: mod_base = OTHER; note = 2'-O-methylguanosine-3'-phosphate
  modified_base 11: mod_base = OTHER; note = 2'-O-methyluridine-3'-phosphate
  modified_base 12: mod_base = OTHER; note = 2'-O-methyluridine-3'-phosphate
  modified_base 13: mod_base = OTHER; note = 2'-O-methylcytidine-3'-phosphate
  modified_base 14: mod_base = OTHER; note = 2'-fluorouridine-3'-phosphate
  modified_base 15: mod_base = OTHER; note = 2'-O-methylguanosine-3'-phosphate
  modified_base 16: mod_base = OTHER; note = 2'-fluorouridine-3'-phosphate
  modified_base 17: mod_base = OTHER; note = 2'-O-methylguanosine-3'-phosphate
  modified_base 18: mod_base = OTHER; note = 2'-O-methyladenosine-3'-phosphate
  modified_base 19: mod_base = OTHER; note = 2'-O-methyladenosine-3'-phosphate
  modified_base 20: mod_base = OTHER; note = 2'-O-methylguanosine-3'-phosphate
  modified_base 21: mod_base = OTHER; note = 2'-O-methyluridine-3'-phosphorothioate
  modified_base 22: mod_base = OTHER; note = 2'-O-methylcytidine-3'-phosphorothioate
  modified_base 23: mod_base = OTHER; note = 2'-O-methylcytidine-3'-phosphate
aaacatccagttctgtgaagtcc

SEQ ID NO: 979 - RNA, 23 nt, synthetic construct
  source 1..23: mol_type = other RNA
  modified_base 1: mod_base = OTHER; note = 2'-O-methyladenosine-3'-phosphorothioate
  modified_base 2: mod_base = OTHER; note = 2'-fluorocytidine-3'-phosphorothioate
  modified_base 3: mod_base = OTHER; note = 2'-O-methyladenosine-3'-phosphate
  modified_base 4: mod_base = OTHER; note = 2'-O-methyladenosine-3'-phosphate
  modified_base 5: mod_base = OTHER; note = 2'-O-methylcytidine-3'-phosphate
  modified_base 6: mod_base = OTHER; note = 2'-fluoroadenosine-3'-phosphate
  modified_base 7: mod_base = OTHER; note = 2'-O-methyluridine-3'-phosphate
  modified_base 8: mod_base = OTHER; note = 2'-fluorocytidine-3'-phosphate
  modified_base 9: mod_base = OTHER; note = 2'-fluorocytidine-3'-phosphate
  modified_base 10: mod_base = OTHER; note = 2'-O-methyladenosine-3'-phosphate
  modified_base 11: mod_base = OTHER; note = 2'-O-methylguanosine-3'-phosphate
  modified_base 12: mod_base = OTHER; note = 2'-O-methyluridine-3'-phosphate
  modified_base 13: mod_base = OTHER; note = 2'-O-methyluridine-3'-phosphate
  modified_base 14: mod_base = OTHER; note = 2'-fluorocytidine-3'-phosphate
  modified_base 15: mod_base = OTHER; note = 2'-O-methyluridine-3'-phosphate
  modified_base 16: mod_base = OTHER; note = 2'-fluoroguanosine-3'-phosphate
  modified_base 17: mod_base = OTHER; note = 2'-O-methyluridine-3'-phosphate
  modified_base 18: mod_base = OTHER; note = 2'-O-methylguanosine-3'-phosphate
  modified_base 19: mod_base = OTHER; note = 2'-O-methyladenosine-3'-phosphate
  modified_base 20: mod_base = OTHER; note = 2'-O-methyladenosine-3'-phosphate
  modified_base 21: mod_base = OTHER; note = 2'-O-methylguanosine-3'-phosphorothioate
  modified_base 22: mod_base = OTHER; note = 2'-O-methyluridine-3'-phosphorothioate
  modified_base 23: mod_base = OTHER; note = 2'-O-methylcytidine-3'-phosphate
acaacatccagttctgtgaagtc

SEQ ID NO: 980 - RNA, 23 nt, synthetic construct
  source 1..23: mol_type = other RNA
  modified_base 1: mod_base = OTHER; note = 2'-O-methyladenosine-3'-phosphorothioate
  modified_base 2: mod_base = OTHER; note = 2'-fluorocytidine-3'-phosphorothioate
  modified_base 3: mod_base = OTHER; note = 2'-O-methyladenosine-3'-phosphate
  modified_base 4: mod_base = OTHER; note = 2'-O-methylguanosine-3'-phosphate
  modified_base 5: mod_base = OTHER; note = 2'-O-methylcytidine-3'-phosphate
  modified_base 6: mod_base = OTHER; note = 2'-fluoroadenosine-3'-phosphate
  modified_base 7: mod_base = OTHER; note = 2'-O-methyladenosine-3'-phosphate
  modified_base 8: mod_base = OTHER; note = 2'-fluorocytidine-3'-phosphate
  modified_base 9: mod_base = OTHER; note = 2'-fluoroadenosine-3'-phosphate
  modified_base 10: mod_base = OTHER; note = 2'-O-methyluridine-3'-phosphate
  modified_base 11: mod_base = OTHER; note = 2'-O-methylcytidine-3'-phosphate
  modified_base 12: mod_base = OTHER; note = 2'-O-methylcytidine-3'-phosphate
  modified_base 13: mod_base = OTHER; note = 2'-O-methyladenosine-3'-phosphate
  modified_base 14: mod_base = OTHER; note = 2'-fluoroguanosine-3'-phosphate
  modified_base 15: mod_base = OTHER; note = 2'-O-methyluridine-3'-phosphate
  modified_base 16: mod_base = OTHER; note = 2'-fluorouridine-3'-phosphate
  modified_base 17: mod_base = OTHER; note = 2'-O-methylcytidine-3'-phosphate
  modified_base 18: mod_base = OTHER; note = 2'-O-methyluridine-3'-phosphate
  modified_base 19: mod_base = OTHER; note = 2'-O-methylguanosine-3'-phosphate
  modified_base 20: mod_base = OTHER; note = 2'-O-methyluridine-3'-phosphate
  modified_base 21: mod_base = OTHER; note = 2'-O-methylguanosine-3'-phosphorothioate
  modified_base 22: mod_base = OTHER; note = 2'-O-methyladenosine-3'-phosphorothioate
  modified_base 23: mod_base = OTHER; note = 2'-O-methyladenosine-3'-phosphate
acagcaacatccagttctgtgaa

SEQ ID NO: 981 - RNA, 23 nt, synthetic construct
  source 1..23: mol_type = other RNA
  modified_base 1: mod_base = OTHER; note = 2'-O-methyladenosine-3'-phosphorothioate
  modified_base 2: mod_base = OTHER; note = 2'-fluoroguanosine-3'-phosphorothioate
  modified_base 3: mod_base = OTHER; note = 2'-O-methylcytidine-3'-phosphate
  modified_base 4: mod_base = OTHER; note = 2'-O-methyladenosine-3'-phosphate
  modified_base 5: mod_base = OTHER; note = 2'-O-methylguanosine-3'-phosphate
  modified_base 6: mod_base = OTHER; note = 2'-fluorocytidine-3'-phosphate
  modified_base 7: mod_base = OTHER; note = 2'-O-methyladenosine-3'-phosphate
  modified_base 8: mod_base = OTHER; note = 2'-fluoroadenosine-3'-phosphate
  modified_base 9: mod_base = OTHER; note = 2'-fluorocytidine-3'-phosphate
  modified_base 10: mod_base = OTHER; note = 2'-O-methyladenosine-3'-phosphate
  modified_base 11: mod_base = OTHER; note = 2'-O-methyluridine-3'-phosphate
  modified_base 12: mod_base = OTHER; note = 2'-O-methylcytidine-3'-phosphate
  modified_base 13: mod_base = OTHER; note = 2'-O-methylcytidine-3'-phosphate
  modified_base 14: mod_base = OTHER; note = 2'-fluoroadenosine-3'-phosphate
  modified_base 15: mod_base = OTHER; note = 2'-O-methylguanosine-3'-phosphate
  modified_base 16: mod_base = OTHER; note = 2'-fluorouridine-3'-phosphate
  modified_base 17: mod_base = OTHER; note = 2'-O-methyluridine-3'-phosphate
  modified_base 18: mod_base = OTHER; note = 2'-O-methylcytidine-3'-phosphate
  modified_base 19: mod_base = OTHER; note = 2'-O-methyluridine-3'-phosphate
  modified_base 20: mod_base = OTHER; note = 2'-O-methylguanosine-3'-phosphate
  modified_base 21: mod_base = OTHER; note = 2'-O-methyluridine-3'-phosphorothioate
  modified_base 22: mod_base = OTHER; note = 2'-O-methylguanosine-3'-phosphorothioate
  modified_base 23: mod_base = OTHER; note = 2'-O-methyladenosine-3'-phosphate
agcagcaacatccagttctgtga

SEQ ID NO: 982 - RNA, 23 nt, synthetic construct
  source 1..23: mol_type = other RNA
  modified_base 1: mod_base = OTHER; note = 2'-O-methyladenosine-3'-phosphorothioate
  modified_base 2: mod_base = OTHER; note = 2'-fluorocytidine-3'-phosphorothioate
  modified_base 3: mod_base = OTHER; note = 2'-O-methyladenosine-3'-phosphate
  modified_base 4: mod_base = OTHER; note = 2'-O-methyladenosine-3'-phosphate
  modified_base 5: mod_base = OTHER; note = 2'-O-methyluridine-3'-phosphate
  modified_base 6: mod_base = OTHER; note = 2'-fluorocytidine-3'-phosphate
  modified_base 7: mod_base = OTHER; note = 2'-O-methyluridine-3'-phosphate
  modified_base 8: mod_base = OTHER; note = 2'-fluorouridine-3'-phosphate
  modified_base 9: mod_base = OTHER; note = 2'-fluorocytidine-3'-phosphate
  modified_base 10: mod_base = OTHER; note = 2'-O-methyluridine-3'-phosphate
  modified_base 11: mod_base = OTHER; note = 2'-O-methylcytidine-3'-phosphate
  modified_base 12: mod_base = OTHER; note = 2'-O-methyladenosine-3'-phosphate
  modified_base 13: mod_base = OTHER; note = 2'-O-methylguanosine-3'-phosphate
  modified_base 14: mod_base = OTHER; note = 2'-fluorocytidine-3'-phosphate
  modified_base 15: mod_base = OTHER; note = 2'-O-methyladenosine-3'-phosphate
  modified_base 16: mod_base = OTHER; note = 2'-fluoroguanosine-3'-phosphate
  modified_base 17: mod_base = OTHER; note = 2'-O-methylcytidine-3'-phosphate
  modified_base 18: mod_base = OTHER; note = 2'-O-methyladenosine-3'-phosphate
  modified_base 19: mod_base = OTHER; note = 2'-O-methyladenosine-3'-phosphate
  modified_base 20: mod_base = OTHER; note = 2'-O-methylcytidine-3'-phosphate
  modified_base 21: mod_base = OTHER; note = 2'-O-methyladenosine-3'-phosphorothioate
  modified_base 22: mod_base = OTHER; note = 2'-O-methyluridine-3'-phosphorothioate
  modified_base 23: mod_base = OTHER; note = 2'-O-methylcytidine-3'-phosphate
acaatcttctcagcagcaacatc

SEQ ID NO: 983 - RNA, 23 nt, synthetic construct
  source 1..23: mol_type = other RNA
  modified_base 1: mod_base = OTHER; note = 2'-O-methyladenosine-3'-phosphorothioate
  modified_base 2: mod_base = OTHER; note = 2'-fluoroguanosine-3'-phosphorothioate
  modified_base 3: mod_base = OTHER; note = 2'-O-methyluridine-3'-phosphate
  modified_base 4: mod_base = OTHER; note = 2'-O-methylcytidine-3'-phosphate
  modified_base 5: mod_base = OTHER; note = 2'-O-methyladenosine-3'-phosphate
  modified_base 6: mod_base = OTHER; note = 2'-fluoroadenosine-3'-phosphate
  modified_base 7: mod_base = OTHER; note = 2'-O-methyluridine-3'-phosphate
  modified_base 8: mod_base = OTHER; note = 2'-fluorocytidine-3'-phosphate
  modified_base 9: mod_base = OTHER; note = 2'-fluorouridine-3'-phosphate
  modified_base 10: mod_base = OTHER; note = 2'-O-methyluridine-3'-phosphate
  modified_base 11: mod_base = OTHER; note = 2'-O-methylcytidine-3'-phosphate
  modified_base 12: mod_base = OTHER; note = 2'-O-methyluridine-3'-phosphate
  modified_base 13: mod_base = OTHER; note = 2'-O-methylcytidine-3'-phosphate
  modified_base 14: mod_base = OTHER; note = 2'-fluoroadenosine-3'-phosphate
  modified_base 15: mod_base = OTHER; note = 2'-O-methylguanosine-3'-phosphate
  modified_base 16: mod_base = OTHER; note = 2'-fluorocytidine-3'-phosphate
  modified_base 17: mod_base = OTHER; note = 2'-O-methyladenosine-3'-phosphate
  modified_base 18: mod_base = OTHER; note = 2'-O-methylguanosine-3'-phosphate
  modified_base 19: mod_base = OTHER; note = 2'-O-methylcytidine-3'-phosphate
  modified_base 20: mod_base = OTHER; note = 2'-O-methyladenosine-3'-phosphate
  modified_base 21: mod_base = OTHER; note = 2'-O-methyladenosine-3'-phosphorothioate
  modified_base 22: mod_base = OTHER; note = 2'-O-methylcytidine-3'-phosphorothioate
  modified_base 23: mod_base = OTHER; note = 2'-O-methyladenosine-3'-phosphate
agtcaatcttctcagcagcaaca

SEQ ID NO: 984 - RNA, 23 nt, synthetic construct
  source 1..23: mol_type = other RNA
  modified_base 1: mod_base = OTHER; note = 2'-O-methyladenosine-3'-phosphorothioate
  modified_base 2: mod_base = OTHER; note = 2'-fluorocytidine-3'-phosphorothioate
  modified_base 3: mod_base = OTHER; note = 2'-O-methyluridine-3'-phosphate
  modified_base 4: mod_base = OTHER; note = 2'-O-methylguanosine-3'-phosphate
  modified_base 5: mod_base = OTHER; note = 2'-O-methyluridine-3'-phosphate
  modified_base 6: mod_base = OTHER; note = 2'-fluorocytidine-3'-phosphate
  modified_base 7: mod_base = OTHER; note = 2'-O-methyladenosine-3'-phosphate
  modified_base 8: mod_base = OTHER; note = 2'-fluoroadenosine-3'-phosphate
  modified_base 9: mod_base = OTHER; note = 2'-fluorouridine-3'-phosphate
  modified_base 10: mod_base = OTHER; note = 2'-O-methylcytidine-3'-phosphate
  modified_base 11: mod_base = OTHER; note = 2'-O-methyluridine-3'-phosphate
  modified_base 12: mod_base = OTHER; note = 2'-O-methyluridine-3'-phosphate
  modified_base 13: mod_base = OTHER; note = 2'-O-methylcytidine-3'-phosphate
  modified_base 14: mod_base = OTHER; note = 2'-fluorouridine-3'-phosphate
  modified_base 15: mod_base = OTHER; note = 2'-O-methylcytidine-3'-phosphate
  modified_base 16: mod_base = OTHER; note = 2'-fluoroadenosine-3'-phosphate
  modified_base 17: mod_base = OTHER; note = 2'-O-methylguanosine-3'-phosphate
  modified_base 18: mod_base = OTHER; note = 2'-O-methylcytidine-3'-phosphate
  modified_base 19: mod_base = OTHER; note = 2'-O-methyladenosine-3'-phosphate
  modified_base 20: mod_base = OTHER; note = 2'-O-methylguanosine-3'-phosphate
  modified_base 21: mod_base = OTHER; note = 2'-O-methylcytidine-3'-phosphorothioate
  modified_base 22: mod_base = OTHER; note = 2'-O-methyladenosine-3'-phosphorothioate
  modified_base 23: mod_base = OTHER; note = 2'-O-methyladenosine-3'-phosphate
actgtcaatcttctcagcagcaa

SEQ ID NO: 985 - RNA, 23 nt, synthetic construct
  source 1..23: mol_type = other RNA
  modified_base 1: mod_base = OTHER; note = 2'-O-methyladenosine-3'-phosphorothioate
  modified_base 2: mod_base = OTHER; note = 2'-fluorocytidine-3'-phosphorothioate
  modified_base 3: mod_base = OTHER; note = 2'-O-methyladenosine-3'-phosphate
  modified_base 4: mod_base = OTHER; note = 2'-O-methylcytidine-3'-phosphate
  modified_base 5: mod_base = OTHER; note = 2'-O-methyladenosine-3'-phosphate
  modified_base 6: mod_base = OTHER; note = 2'-fluoroguanosine-3'-phosphate
  modified_base 7: mod_base = OTHER; note = 2'-O-methylcytidine-3'-phosphate
  modified_base 8: mod_base = OTHER; note = 2'-fluorocytidine-3'-phosphate
  modified_base 9: mod_base = OTHER; note = 2'-fluorouridine-3'-phosphate
  modified_base 10: mod_base = OTHER; note = 2'-O-methylguanosine-3'-phosphate
  modified_base 11: mod_base = OTHER; note = 2'-O-methylcytidine-3'-phosphate
  modified_base 12: mod_base = OTHER; note = 2'-O-methyladenosine-3'-phosphate
  modified_base 13: mod_base = OTHER; note = 2'-O-methyluridine-3'-phosphate
  modified_base 14: mod_base = OTHER; note = 2'-fluoroguanosine-3'-phosphate
  modified_base 15: mod_base = OTHER; note = 2'-O-methyladenosine-3'-phosphate
  modified_base 16: mod_base = OTHER; note = 2'-fluoroadenosine-3'-phosphate
  modified_base 17: mod_base = OTHER; note = 2'-O-methylcytidine-3'-phosphate
  modified_base 18: mod_base = OTHER; note = 2'-O-methylcytidine-3'-phosphate
  modified_base 19: mod_base = OTHER; note = 2'-O-methyluridine-3'-phosphate
  modified_base 20: mod_base = OTHER; note = 2'-O-methylguanosine-3'-phosphate
  modified_base 21: mod_base = OTHER; note = 2'-O-methyluridine-3'-phosphorothioate
  modified_base 22: mod_base = OTHER; note = 2'-O-methylcytidine-3'-phosphorothioate
  modified_base 23: mod_base = OTHER; note = 2'-O-methyladenosine-3'-phosphate
acacagcctgcatgaacctgtca

SEQ ID NO: 986 - RNA, 23 nt, synthetic construct
  source 1..23: mol_type = other RNA
  modified_base 1: mod_base = OTHER; note = 2'-O-methyladenosine-3'-phosphorothioate
  modified_base 2: mod_base = OTHER; note = 2'-fluorocytidine-3'-phosphorothioate
  modified_base 3: mod_base = OTHER; note = 2'-O-methyladenosine-3'-phosphate
  modified_base 4: mod_base = OTHER; note = 2'-O-methyluridine-3'-phosphate
  modified_base 5: mod_base = OTHER; note = 2'-O-methylcytidine-3'-phosphate
  modified_base 6: mod_base = OTHER; note = 2'-fluorocytidine-3'-phosphate
  modified_base 7: mod_base = OTHER; note = 2'-O-methyluridine-3'-phosphate
  modified_base 8: mod_base = OTHER; note = 2'-fluoroguanosine-3'-phosphate
  modified_base 9: mod_base = OTHER; note = 2'-fluorouridine-3'-phosphate
  modified_base 10: mod_base = OTHER; note = 2'-O-methylcytidine-3'-phosphate
  modified_base 11: mod_base = OTHER; note = 2'-O-methyladenosine-3'-phosphate
  modified_base 12: mod_base = OTHER; note = 2'-O-methylcytidine-3'-phosphate
  modified_base 13: mod_base = OTHER; note = 2'-O-methyladenosine-3'-phosphate
  modified_base 14: mod_base = OTHER; note = 2'-fluoroguanosine-3'-phosphate
  modified_base 15: mod_base = OTHER; note = 2'-O-methylcytidine-3'-phosphate
  modified_base 16: mod_base = OTHER; note = 2'-fluorocytidine-3'-phosphate
  modified_base 17: mod_base = OTHER; note = 2'-O-methyluridine-3'-phosphate
  modified_base 18: mod_base = OTHER; note = 2'-O-methylguanosine-3'-phosphate
  modified_base 19: mod_base = OTHER; note = 2'-O-methylcytidine-3'-phosphate
  modified_base 20: mod_base = OTHER; note = 2'-O-methyladenosine-3'-phosphate
  modified_base 21: mod_base = OTHER; note = 2'-O-methyluridine-3'-phosphorothioate
  modified_base 22: mod_base = OTHER; note = 2'-O-methylguanosine-3'-phosphorothioate
  modified_base 23: mod_base = OTHER; note = 2'-O-methyladenosine-3'-phosphate
acatcctgtcacagcctgcatga

SEQ ID NO: 987 - RNA, 23 nt, synthetic construct
  source 1..23: mol_type = other RNA
  modified_base 1: mod_base = OTHER; note = 2'-O-methyladenosine-3'-phosphorothioate
  modified_base 2: mod_base = OTHER; note = 2'-fluorouridine -3'-phosphorothioate
  modified_base 3: mod_base = OTHER; note = 2'-O-methylcytidine-3'-phosphate
  modified_base 4: mod_base = OTHER; note = 2'-O-methylcytidine-3'-phosphate
  modified_base 5: mod_base = OTHER; note = 2'-O-methyladenosine-3'-phosphate
  modified_base 6: mod_base = OTHER; note = 2'-fluorouridine-3'-phosphate
  modified_base 7: mod_base = OTHER; note = 2'-O-methylcytidine-3'-phosphate
  modified_base 8: mod_base = OTHER; note = 2'-fluorocytidine-3'-phosphate
  modified_base 9: mod_base = OTHER; note = 2'-fluorouridine-3'-phosphate
  modified_base 10: mod_base = OTHER; note = 2'-O-methylguanosine-3'-phosphate
  modified_base 11: mod_base = OTHER; note = 2'-O-methyluridine-3'-phosphate
  modified_base 12: mod_base = OTHER; note = 2'-O-methylcytidine-3'-phosphate
  modified_base 13: mod_base = OTHER; note = 2'-O-methyladenosine-3'-phosphate
  modified_base 14: mod_base = OTHER; note = 2'-fluorocytidine-3'-phosphate
  modified_base 15: mod_base = OTHER; note = 2'-O-methyladenosine-3'-phosphate
  modified_base 16: mod_base = OTHER; note = 2'-fluoroguanosine-3'-phosphate
  modified_base 17: mod_base = OTHER; note = 2'-O-methylcytidine-3'-phosphate
  modified_base 18: mod_base = OTHER; note = 2'-O-methylcytidine-3'-phosphate
  modified_base 19: mod_base = OTHER; note = 2'-O-methyluridine-3'-phosphate
  modified_base 20: mod_base = OTHER; note = 2'-O-methylguanosine-3'-phosphate
  modified_base 21: mod_base = OTHER; note = 2'-O-methylcytidine-3'-phosphorothioate
  modified_base 22: mod_base = OTHER; note = 2'-O-methyladenosine-3'-phosphorothioate
  modified_base 23: mod_base = OTHER; note = 2'-O-methyluridine-3'-phosphate
atccatcctgtcacagcctgcat

SEQ ID NO: 988 - RNA, 23 nt, synthetic construct
  source 1..23: mol_type = other RNA
  modified_base 1: mod_base = OTHER; note = 2'-O-methyladenosine-3'-phosphorothioate
  modified_base 2: mod_base = OTHER; note = 2'-fluorouridine -3'-phosphorothioate
  modified_base 3: mod_base = OTHER; note = 2'-O-methyluridine-3'-phosphate
  modified_base 4: mod_base = OTHER; note = 2'-O-methylguanosine-3'-phosphate
  modified_base 5: mod_base = OTHER; note = 2'-O-methyladenosine-3'-phosphate
  modified_base 6: mod_base = OTHER; note = 2'-fluoroadenosine-3'-phosphate
  modified_base 7: mod_base = OTHER; note = 2'-O-methyladenosine-3'-phosphate
  modified_base 8: mod_base = OTHER; note = 2'-fluoroguanosine-3'-phosphate
  modified_base 9: mod_base = OTHER; note = 2'-fluorocytidine-3'-phosphate
  modified_base 10: mod_base = OTHER; note = 2'-O-methylcytidine-3'-phosphate
  modified_base 11: mod_base = OTHER; note = 2'-O-methyladenosine-3'-phosphate
  modified_base 12: mod_base = OTHER; note = 2'-O-methylguanosine-3'-phosphate
  modified_base 13: mod_base = OTHER; note = 2'-O-methylguanosine-3'-phosphate
  modified_base 14: mod_base = OTHER; note = 2'-fluoroguanosine-3'-phosphate
  modified_base 15: mod_base = OTHER; note = 2'-O-methyluridine-3'-phosphate
  modified_base 16: mod_base = OTHER; note = 2'-fluoroguanosine-3'-phosphate
  modified_base 17: mod_base = OTHER; note = 2'-O-methylcytidine-3'-phosphate
  modified_base 18: mod_base = OTHER; note = 2'-O-methyluridine-3'-phosphate
  modified_base 19: mod_base = OTHER; note = 2'-O-methylguanosine-3'-phosphate
  modified_base 20: mod_base = OTHER; note = 2'-O-methyluridine-3'-phosphate
  modified_base 21: mod_base = OTHER; note = 2'-O-methylcytidine-3'-phosphorothioate
  modified_base 22: mod_base = OTHER; note = 2'-O-methylcytidine-3'-phosphorothioate
  modified_base 23: mod_base = OTHER; note = 2'-O-methyladenosine-3'-phosphate
attgaaagccagggtgctgtcca

SEQ ID NO: 989 - RNA, 23 nt, synthetic construct
  source 1..23: mol_type = other RNA
  modified_base 1: mod_base = OTHER; note = 2'-O-methyladenosine-3'-phosphorothioate
  modified_base 2: mod_base = OTHER; note = 2'-fluoroadenosine-3'-phosphorothioate
  modified_base 3: mod_base = OTHER; note = 2'-O-methylcytidine-3'-phosphate
  modified_base 4: mod_base = OTHER; note = 2'-O-methylguanosine-3'-phosphate
  modified_base 5: mod_base = OTHER; note = 2'-O-methyluridine-3'-phosphate
  modified_base 6: mod_base = OTHER; note = 2'-fluoroadenosine-3'-phosphate
  modified_base 7: mod_base = OTHER; note = 2'-O-methylguanosine-3'-phosphate
  modified_base 8: mod_base = OTHER; note = 2'-fluoroguanosine-3'-phosphate
  modified_base 9: mod_base = OTHER; note = 2'-fluorouridine-3'-phosphate
  modified_base 10: mod_base = OTHER; note = 2'-O-methylguanosine-3'-phosphate
  modified_base 11: mod_base = OTHER; note = 2'-O-methyluridine-3'-phosphate
  modified_base 12: mod_base = OTHER; note = 2'-O-methyluridine-3'-phosphate
  modified_base 13: mod_base = OTHER; note = 2'-O-methylguanosine-3'-phosphate
  modified_base 14: mod_base = OTHER; note = 2'-fluoroadenosine-3'-phosphate
  modified_base 15: mod_base = OTHER; note = 2'-O-methyladenosine-3'-phosphate
  modified_base 16: mod_base = OTHER; note = 2'-fluoroadenosine-3'-phosphate
  modified_base 17: mod_base = OTHER; note = 2'-O-methylguanosine-3'-phosphate
  modified_base 18: mod_base = OTHER; note = 2'-O-methylcytidine-3'-phosphate
  modified_base 19: mod_base = OTHER; note = 2'-O-methylcytidine-3'-phosphate
  modified_base 20: mod_base = OTHER; note = 2'-O-methyladenosine-3'-phosphate
  modified_base 21: mod_base = OTHER; note = 2'-O-methylguanosine-3'-phosphorothioate
  modified_base 22: mod_base = OTHER; note = 2'-O-methylguanosine-3'-phosphorothioate
  modified_base 23: mod_base = OTHER; note = 2'-O-methylguanosine-3'-phosphate
aacgtaggtgttgaaagccaggg

SEQ ID NO: 990 - RNA, 23 nt, synthetic construct
  source 1..23: mol_type = other RNA
  modified_base 1: mod_base = OTHER; note = 2'-O-methyladenosine-3'-phosphorothioate
  modified_base 2: mod_base = OTHER; note = 2'-fluorouridine -3'-phosphorothioate
  modified_base 3: mod_base = OTHER; note = 2'-O-methylguanosine-3'-phosphate
  modified_base 4: mod_base = OTHER; note = 2'-O-methylguanosine-3'-phosphate
  modified_base 5: mod_base = OTHER; note = 2'-O-methyladenosine-3'-phosphate
  modified_base 6: mod_base = OTHER; note = 2'-fluorocytidine-3'-phosphate
  modified_base 7: mod_base = OTHER; note = 2'-O-methylguanosine-3'-phosphate
  modified_base 8: mod_base = OTHER; note = 2'-fluorouridine-3'-phosphate
  modified_base 9: mod_base = OTHER; note = 2'-fluoroadenosine-3'-phosphate
  modified_base 10: mod_base = OTHER; note = 2'-O-methylguanosine-3'-phosphate
  modified_base 11: mod_base = OTHER; note = 2'-O-methylguanosine-3'-phosphate
  modified_base 12: mod_base = OTHER; note = 2'-O-methyluridine-3'-phosphate
  modified_base 13: mod_base = OTHER; note = 2'-O-methylguanosine-3'-phosphate
  modified_base 14: mod_base = OTHER; note = 2'-fluorouridine-3'-phosphate
  modified_base 15: mod_base = OTHER; note = 2'-O-methyluridine-3'-phosphate
  modified_base 16: mod_base = OTHER; note = 2'-fluoroguanosine-3'-phosphate
  modified_base 17: mod_base = OTHER; note = 2'-O-methyladenosine-3'-phosphate
  modified_base 18: mod_base = OTHER; note = 2'-O-methyladenosine-3'-phosphate
  modified_base 19: mod_base = OTHER; note = 2'-O-methyladenosine-3'-phosphate
  modified_base 20: mod_base = OTHER; note = 2'-O-methylguanosine-3'-phosphate
  modified_base 21: mod_base = OTHER; note = 2'-O-methylcytidine-3'-phosphorothioate
  modified_base 22: mod_base = OTHER; note = 2'-O-methylcytidine-3'-phosphorothioate
  modified_base 23: mod_base = OTHER; note = 2'-O-methyladenosine-3'-phosphate
atggacgtaggtgttgaaagcca

SEQ ID NO: 991 - RNA, 23 nt, synthetic construct
  source 1..23: mol_type = other RNA
  modified_base 1: mod_base = OTHER; note = 2'-O-methyladenosine-3'-phosphorothioate
  modified_base 2: mod_base = OTHER; note = 2'-fluorocytidine-3'-phosphorothioate
  modified_base 3: mod_base = OTHER; note = 2'-O-methyluridine-3'-phosphate
  modified_base 4: mod_base = OTHER; note = 2'-O-methyluridine-3'-phosphate
  modified_base 5: mod_base = OTHER; note = 2'-O-methylguanosine-3'-phosphate
  modified_base 6: mod_base = OTHER; note = 2'-fluoroguanosine-3'-phosphate
  modified_base 7: mod_base = OTHER; note = 2'-O-methyladenosine-3'-phosphate
  modified_base 8: mod_base = OTHER; note = 2'-fluoroadenosine-3'-phosphate
  modified_base 9: mod_base = OTHER; note = 2'-fluoroguanosine-3'-phosphate
  modified_base 10: mod_base = OTHER; note = 2'-O-methyluridine-3'-phosphate
  modified_base 11: mod_base = OTHER; note = 2'-O-methylguanosine-3'-phosphate
  modified_base 12: mod_base = OTHER; note = 2'-O-methylguanosine-3'-phosphate
  modified_base 13: mod_base = OTHER; note = 2'-O-methyladenosine-3'-phosphate
  modified_base 14: mod_base = OTHER; note = 2'-fluorocytidine-3'-phosphate
  modified_base 15: mod_base = OTHER; note = 2'-O-methylguanosine-3'-phosphate
  modified_base 16: mod_base = OTHER; note = 2'-fluorouridine-3'-phosphate
  modified_base 17: mod_base = OTHER; note = 2'-O-methyladenosine-3'-phosphate
  modified_base 18: mod_base = OTHER; note = 2'-O-methylguanosine-3'-phosphate
  modified_base 19: mod_base = OTHER; note = 2'-O-methylguanosine-3'-phosphate
  modified_base 20: mod_base = OTHER; note = 2'-O-methyluridine-3'-phosphate
  modified_base 21: mod_base = OTHER; note = 2'-O-methylguanosine-3'-phosphorothioate
  modified_base 22: mod_base = OTHER; note = 2'-O-methyluridine-3'-phosphorothioate
  modified_base 23: mod_base = OTHER; note = 2'-O-methyluridine-3'-phosphate
acttggaagtggacgtaggtgtt

SEQ ID NO: 992 - RNA, 23 nt, synthetic construct
  source 1..23: mol_type = other RNA
  modified_base 1: mod_base = OTHER; note = 2'-O-methyladenosine-3'-phosphorothioate
  modified_base 2: mod_base = OTHER; note = 2'-fluorocytidine-3'-phosphorothioate
  modified_base 3: mod_base = OTHER; note = 2'-O-methyladenosine-3'-phosphate
  modified_base 4: mod_base = OTHER; note = 2'-O-methyluridine-3'-phosphate
  modified_base 5: mod_base = OTHER; note = 2'-O-methylcytidine-3'-phosphate
  modified_base 6: mod_base = OTHER; note = 2'-fluorouridine-3'-phosphate
  modified_base 7: mod_base = OTHER; note = 2'-O-methyluridine-3'-phosphate
  modified_base 8: mod_base = OTHER; note = 2'-fluorocytidine-3'-phosphate
  modified_base 9: mod_base = OTHER; note = 2'-fluorocytidine-3'-phosphate
  modified_base 10: mod_base = OTHER; note = 2'-O-methylcytidine-3'-phosphate
  modified_base 11: mod_base = OTHER; note = 2'-O-methyluridine-3'-phosphate
  modified_base 12: mod_base = OTHER; note = 2'-O-methyluridine-3'-phosphate
  modified_base 13: mod_base = OTHER; note = 2'-O-methylguanosine-3'-phosphate
  modified_base 14: mod_base = OTHER; note = 2'-fluoroguanosine-3'-phosphate
  modified_base 15: mod_base = OTHER; note = 2'-O-methyladenosine-3'-phosphate
  modified_base 16: mod_base = OTHER; note = 2'-fluoroadenosine-3'-phosphate
  modified_base 17: mod_base = OTHER; note = 2'-O-methylguanosine-3'-phosphate
  modified_base 18: mod_base = OTHER; note = 2'-O-methyluridine-3'-phosphate
  modified_base 19: mod_base = OTHER; note = 2'-O-methylguanosine-3'-phosphate
  modified_base 20: mod_base = OTHER; note = 2'-O-methylguanosine-3'-phosphate
  modified_base 21: mod_base = OTHER; note = 2'-O-methyladenosine-3'-phosphorothioate
  modified_base 22: mod_base = OTHER; note = 2'-O-methylcytidine-3'-phosphorothioate
  modified_base 23: mod_base = OTHER; note = 2'-O-methylguanosine-3'-phosphate
acatcttcccttggaagtggacg

SEQ ID NO: 993 - RNA, 23 nt, synthetic construct
  source 1..23: mol_type = other RNA
  modified_base 1: mod_base = OTHER; note = 2'-O-methyladenosine-3'-phosphorothioate
  modified_base 2: mod_base = OTHER; note = 2'-fluorocytidine-3'-phosphorothioate
  modified_base 3: mod_base = OTHER; note = 2'-O-methyluridine-3'-phosphate
  modified_base 4: mod_base = OTHER; note = 2'-O-methyluridine-3'-phosphate
  modified_base 5: mod_base = OTHER; note = 2'-O-methylcytidine-3'-phosphate
  modified_base 6: mod_base = OTHER; note = 2'-fluoroadenosine-3'-phosphate
  modified_base 7: mod_base = OTHER; note = 2'-O-methyluridine-3'-phosphate
  modified_base 8: mod_base = OTHER; note = 2'-fluorocytidine-3'-phosphate
  modified_base 9: mod_base = OTHER; note = 2'-fluorouridine-3'-phosphate
  modified_base 10: mod_base = OTHER; note = 2'-O-methyluridine-3'-phosphate
  modified_base 11: mod_base = OTHER; note = 2'-O-methylcytidine-3'-phosphate
  modified_base 12: mod_base = OTHER; note = 2'-O-methylcytidine-3'-phosphate
  modified_base 13: mod_base = OTHER; note = 2'-O-methylcytidine-3'-phosphate
  modified_base 14: mod_base = OTHER; note = 2'-fluorouridine-3'-phosphate
  modified_base 15: mod_base = OTHER; note = 2'-O-methyluridine-3'-phosphate
  modified_base 16: mod_base = OTHER; note = 2'-fluoroguanosine-3'-phosphate
  modified_base 17: mod_base = OTHER; note = 2'-O-methylguanosine-3'-phosphate
  modified_base 18: mod_base = OTHER; note = 2'-O-methyladenosine-3'-phosphate
  modified_base 19: mod_base = OTHER; note = 2'-O-methyladenosine-3'-phosphate
  modified_base 20: mod_base = OTHER; note = 2'-O-methylguanosine-3'-phosphate
  modified_base 21: mod_base = OTHER; note = 2'-O-methyluridine-3'-phosphorothioate
  modified_base 22: mod_base = OTHER; note = 2'-O-methylguanosine-3'-phosphorothioate
  modified_base 23: mod_base = OTHER; note = 2'-O-methylguanosine-3'-phosphate
acttcatcttcccttggaagtgg

SEQ ID NO: 994 - RNA, 23 nt, synthetic construct
  source 1..23: mol_type = other RNA
  modified_base 1: mod_base = OTHER; note = 2'-O-methyladenosine-3'-phosphorothioate
  modified_base 2: mod_base = OTHER; note = 2'-fluorocytidine-3'-phosphorothioate
  modified_base 3: mod_base = OTHER; note = 2'-O-methylcytidine-3'-phosphate
  modified_base 4: mod_base = OTHER; note = 2'-O-methyluridine-3'-phosphate
  modified_base 5: mod_base = OTHER; note = 2'-O-methyluridine-3'-phosphate
  modified_base 6: mod_base = OTHER; note = 2'-fluorocytidine-3'-phosphate
  modified_base 7: mod_base = OTHER; note = 2'-O-methyladenosine-3'-phosphate
  modified_base 8: mod_base = OTHER; note = 2'-fluorouridine-3'-phosphate
  modified_base 9: mod_base = OTHER; note = 2'-fluorocytidine-3'-phosphate
  modified_base 10: mod_base = OTHER; note = 2'-O-methyluridine-3'-phosphate
  modified_base 11: mod_base = OTHER; note = 2'-O-methyluridine-3'-phosphate
  modified_base 12: mod_base = OTHER; note = 2'-O-methylcytidine-3'-phosphate
  modified_base 13: mod_base = OTHER; note = 2'-O-methylcytidine-3'-phosphate
  modified_base 14: mod_base = OTHER; note = 2'-fluorocytidine-3'-phosphate
  modified_base 15: mod_base = OTHER; note = 2'-O-methyluridine-3'-phosphate
  modified_base 16: mod_base = OTHER; note = 2'-fluorouridine-3'-phosphate
  modified_base 17: mod_base = OTHER; note = 2'-O-methylguanosine-3'-phosphate
  modified_base 18: mod_base = OTHER; note = 2'-O-methylguanosine-3'-phosphate
  modified_base 19: mod_base = OTHER; note = 2'-O-methyladenosine-3'-phosphate
  modified_base 20: mod_base = OTHER; note = 2'-O-methyladenosine-3'-phosphate
  modified_base 21: mod_base = OTHER; note = 2'-O-methylguanosine-3'-phosphorothioate
  modified_base 22: mod_base = OTHER; note = 2'-O-methyluridine-3'-phosphorothioate
  modified_base 23: mod_base = OTHER; note = 2'-O-methylguanosine-3'-phosphate
accttcatcttcccttggaagtg

SEQ ID NO: 995 - RNA, 23 nt, synthetic construct
  source 1..23: mol_type = other RNA
  modified_base 1: mod_base = OTHER; note = 2'-O-methyladenosine-3'-phosphorothioate
  modified_base 2: mod_base = OTHER; note = 2'-fluoroguanosine-3'-phosphorothioate
  modified_base 3: mod_base = OTHER; note = 2'-O-methylcytidine-3'-phosphate
  modified_base 4: mod_base = OTHER; note = 2'-O-methylcytidine-3'-phosphate
  modified_base 5: mod_base = OTHER; note = 2'-O-methylcytidine-3'-phosphate
  modified_base 6: mod_base = OTHER; note = 2'-fluorouridine-3'-phosphate
  modified_base 7: mod_base = OTHER; note = 2'-O-methyluridine-3'-phosphate
  modified_base 8: mod_base = OTHER; note = 2'-fluorocytidine-3'-phosphate
  modified_base 9: mod_base = OTHER; note = 2'-fluoroadenosine-3'-phosphate
  modified_base 10: mod_base = OTHER; note = 2'-O-methyluridine-3'-phosphate
  modified_base 11: mod_base = OTHER; note = 2'-O-methylcytidine-3'-phosphate
  modified_base 12: mod_base = OTHER; note = 2'-O-methyluridine-3'-phosphate
  modified_base 13: mod_base = OTHER; note = 2'-O-methyluridine-3'-phosphate
  modified_base 14: mod_base = OTHER; note = 2'-fluorocytidine-3'-phosphate
  modified_base 15: mod_base = OTHER; note = 2'-O-methylcytidine-3'-phosphate
  modified_base 16: mod_base = OTHER; note = 2'-fluorocytidine-3'-phosphate
  modified_base 17: mod_base = OTHER; note = 2'-O-methyluridine-3'-phosphate
  modified_base 18: mod_base = OTHER; note = 2'-O-methyluridine-3'-phosphate
  modified_base 19: mod_base = OTHER; note = 2'-O-methylguanosine-3'-phosphate
  modified_base 20: mod_base = OTHER; note = 2'-O-methylguanosine-3'-phosphate
  modified_base 21: mod_base = OTHER; note = 2'-O-methyladenosine-3'-phosphorothioate
  modified_base 22: mod_base = OTHER; note = 2'-O-methyladenosine-3'-phosphorothioate
  modified_base 23: mod_base = OTHER; note = 2'-O-methylguanosine-3'-phosphate
agcccttcatcttcccttggaag

SEQ ID NO: 996 - RNA, 23 nt, synthetic construct
  source 1..23: mol_type = other RNA
  modified_base 1: mod_base = OTHER; note = 2'-O-methyladenosine-3'-phosphorothioate
  modified_base 2: mod_base = OTHER; note = 2'-fluorocytidine-3'-phosphorothioate
  modified_base 3: mod_base = OTHER; note = 2'-O-methyladenosine-3'-phosphate
  modified_base 4: mod_base = OTHER; note = 2'-O-methylguanosine-3'-phosphate
  modified_base 5: mod_base = OTHER; note = 2'-O-methylguanosine-3'-phosphate
  modified_base 6: mod_base = OTHER; note = 2'-fluoroguanosine-3'-phosphate
  modified_base 7: mod_base = OTHER; note = 2'-O-methyladenosine-3'-phosphate
  modified_base 8: mod_base = OTHER; note = 2'-fluoroguanosine-3'-phosphate
  modified_base 9: mod_base = OTHER; note = 2'-fluoroadenosine-3'-phosphate
  modified_base 10: mod_base = OTHER; note = 2'-O-methyladenosine-3'-phosphate
  modified_base 11: mod_base = OTHER; note = 2'-O-methylguanosine-3'-phosphate
  modified_base 12: mod_base = OTHER; note = 2'-O-methylcytidine-3'-phosphate
  modified_base 13: mod_base = OTHER; note = 2'-O-methylcytidine-3'-phosphate
  modified_base 14: mod_base = OTHER; note = 2'-fluorocytidine-3'-phosphate
  modified_base 15: mod_base = OTHER; note = 2'-O-methyluridine-3'-phosphate
  modified_base 16: mod_base = OTHER; note = 2'-fluorouridine-3'-phosphate
  modified_base 17: mod_base = OTHER; note = 2'-O-methylcytidine-3'-phosphate
  modified_base 18: mod_base = OTHER; note = 2'-O-methyladenosine-3'-phosphate
  modified_base 19: mod_base = OTHER; note = 2'-O-methyluridine-3'-phosphate
  modified_base 20: mod_base = OTHER; note = 2'-O-methylcytidine-3'-phosphate
  modified_base 21: mod_base = OTHER; note = 2'-O-methyluridine-3'-phosphorothioate
  modified_base 22: mod_base = OTHER; note = 2'-O-methyluridine-3'-phosphorothioate
  modified_base 23: mod_base = OTHER; note = 2'-O-methylcytidine-3'-phosphate
acagggagaagcccttcatcttc

SEQ ID NO: 997 - RNA, 23 nt, synthetic construct
  source 1..23: mol_type = other RNA
  modified_base 1: mod_base = OTHER; note = 2'-O-methyladenosine-3'-phosphorothioate
  modified_base 2: mod_base = OTHER; note = 2'-fluoroadenosine-3'-phosphorothioate
  modified_base 3: mod_base = OTHER; note = 2'-O-methylcytidine-3'-phosphate
  modified_base 4: mod_base = OTHER; note = 2'-O-methyladenosine-3'-phosphate
  modified_base 5: mod_base = OTHER; note = 2'-O-methylcytidine-3'-phosphate
  modified_base 6: mod_base = OTHER; note = 2'-fluorouridine-3'-phosphate
  modified_base 7: mod_base = OTHER; note = 2'-O-methylguanosine-3'-phosphate
  modified_base 8: mod_base = OTHER; note = 2'-fluoroadenosine-3'-phosphate
  modified_base 9: mod_base = OTHER; note = 2'-fluoroguanosine-3'-phosphate
  modified_base 10: mod_base = OTHER; note = 2'-O-methylguanosine-3'-phosphate
  modified_base 11: mod_base = OTHER; note = 2'-O-methyluridine-3'-phosphate
  modified_base 12: mod_base = OTHER; note = 2'-O-methylguanosine-3'-phosphate
  modified_base 13: mod_base = OTHER; note = 2'-O-methylcytidine-3'-phosphate
  modified_base 14: mod_base = OTHER; note = 2'-fluorouridine-3'-phosphate
  modified_base 15: mod_base = OTHER; note = 2'-O-methylguanosine-3'-phosphate
  modified_base 16: mod_base = OTHER; note = 2'-fluorouridine-3'-phosphate
  modified_base 17: mod_base = OTHER; note = 2'-O-methyluridine-3'-phosphate
  modified_base 18: mod_base = OTHER; note = 2'-O-methylguanosine-3'-phosphate
  modified_base 19: mod_base = OTHER; note = 2'-O-methyluridine-3'-phosphate
  modified_base 20: mod_base = OTHER; note = 2'-O-methylcytidine-3'-phosphate
  modified_base 21: mod_base = OTHER; note = 2'-O-methylcytidine-3'-phosphorothioate
  modified_base 22: mod_base = OTHER; note = 2'-O-methyladenosine-3'-phosphorothioate
  modified_base 23: mod_base = OTHER; note = 2'-O-methylcytidine-3'-phosphate
aacactgaggtgctgttgtccac

SEQ ID NO: 998 - RNA, 23 nt, synthetic construct
  source 1..23: mol_type = other RNA
  modified_base 1: mod_base = OTHER; note = 2'-O-methyladenosine-3'-phosphorothioate
  modified_base 2: mod_base = OTHER; note = 2'-fluoroguanosine-3'-phosphorothioate
  modified_base 3: mod_base = OTHER; note = 2'-O-methyladenosine-3'-phosphate
  modified_base 4: mod_base = OTHER; note = 2'-O-methylcytidine-3'-phosphate
  modified_base 5: mod_base = OTHER; note = 2'-O-methyladenosine-3'-phosphate
  modified_base 6: mod_base = OTHER; note = 2'-fluorocytidine-3'-phosphate
  modified_base 7: mod_base = OTHER; note = 2'-O-methyluridine-3'-phosphate
  modified_base 8: mod_base = OTHER; note = 2'-fluoroguanosine-3'-phosphate
  modified_base 9: mod_base = OTHER; note = 2'-fluoroadenosine-3'-phosphate
  modified_base 10: mod_base = OTHER; note = 2'-O-methylguanosine-3'-phosphate
  modified_base 11: mod_base = OTHER; note = 2'-O-methylguanosine-3'-phosphate
  modified_base 12: mod_base = OTHER; note = 2'-O-methyluridine-3'-phosphate
  modified_base 13: mod_base = OTHER; note = 2'-O-methylguanosine-3'-phosphate
  modified_base 14: mod_base = OTHER; note = 2'-fluorocytidine-3'-phosphate
  modified_base 15: mod_base = OTHER; note = 2'-O-methyluridine-3'-phosphate
  modified_base 16: mod_base = OTHER; note = 2'-fluoroguanosine-3'-phosphate
  modified_base 17: mod_base = OTHER; note = 2'-O-methyluridine-3'-phosphate
  modified_base 18: mod_base = OTHER; note = 2'-O-methyluridine-3'-phosphate
  modified_base 19: mod_base = OTHER; note = 2'-O-methylguanosine-3'-phosphate
  modified_base 20: mod_base = OTHER; note = 2'-O-methyluridine-3'-phosphate
  modified_base 21: mod_base = OTHER; note = 2'-O-methylcytidine-3'-phosphorothioate
  modified_base 22: mod_base = OTHER; note = 2'-O-methylcytidine-3'-phosphorothioate
  modified_base 23: mod_base = OTHER; note = 2'-O-methyladenosine-3'-phosphate
agacactgaggtgctgttgtcca

SEQ ID NO: 999 - RNA, 23 nt, synthetic construct
  source 1..23: mol_type = other RNA
  modified_base 1: mod_base = OTHER; note = 2'-O-methyladenosine-3'-phosphorothioate
  modified_base 2: mod_base = OTHER; note = 2'-fluorocytidine-3'-phosphorothioate
  modified_base 3: mod_base = OTHER; note = 2'-O-methyladenosine-3'-phosphate
  modified_base 4: mod_base = OTHER; note = 2'-O-methylguanosine-3'-phosphate
  modified_base 5: mod_base = OTHER; note = 2'-O-methyladenosine-3'-phosphate
  modified_base 6: mod_base = OTHER; note = 2'-fluorocytidine-3'-phosphate
  modified_base 7: mod_base = OTHER; note = 2'-O-methyladenosine-3'-phosphate
  modified_base 8: mod_base = OTHER; note = 2'-fluorocytidine-3'-phosphate
  modified_base 9: mod_base = OTHER; note = 2'-fluorouridine-3'-phosphate
  modified_base 10: mod_base = OTHER; note = 2'-O-methylguanosine-3'-phosphate
  modified_base 11: mod_base = OTHER; note = 2'-O-methyladenosine-3'-phosphate
  modified_base 12: mod_base = OTHER; note = 2'-O-methylguanosine-3'-phosphate
  modified_base 13: mod_base = OTHER; note = 2'-O-methylguanosine-3'-phosphate
  modified_base 14: mod_base = OTHER; note = 2'-fluorouridine-3'-phosphate
  modified_base 15: mod_base = OTHER; note = 2'-O-methylguanosine-3'-phosphate
  modified_base 16: mod_base = OTHER; note = 2'-fluorocytidine-3'-phosphate
  modified_base 17: mod_base = OTHER; note = 2'-O-methyluridine-3'-phosphate
  modified_base 18: mod_base = OTHER; note = 2'-O-methylguanosine-3'-phosphate
  modified_base 19: mod_base = OTHER; note = 2'-O-methyluridine-3'-phosphate
  modified_base 20: mod_base = OTHER; note = 2'-O-methyluridine-3'-phosphate
  modified_base 21: mod_base = OTHER; note = 2'-O-methylguanosine-3'-phosphorothioate
  modified_base 22: mod_base = OTHER; note = 2'-O-methyluridine-3'-phosphorothioate
  modified_base 23: mod_base = OTHER; note = 2'-O-methylcytidine-3'-phosphate
acagacactgaggtgctgttgtc

SEQ ID NO: 1000 - RNA, 23 nt, synthetic construct
  source 1..23: mol_type = other RNA
  modified_base 1: mod_base = OTHER; note = 2'-O-methyladenosine-3'-phosphorothioate
  modified_base 2: mod_base = OTHER; note = 2'-fluoroadenosine-3'-phosphorothioate
  modified_base 3: mod_base = OTHER; note = 2'-O-methyluridine-3'-phosphate
  modified_base 4: mod_base = OTHER; note = 2'-O-methylguanosine-3'-phosphate
  modified_base 5: mod_base = OTHER; note = 2'-O-methylguanosine-3'-phosphate
  modified_base 6: mod_base = OTHER; note = 2'-fluoroguanosine-3'-phosphate
  modified_base 7: mod_base = OTHER; note = 2'-O-methyladenosine-3'-phosphate
  modified_base 8: mod_base = OTHER; note = 2'-fluoroadenosine-3'-phosphate
  modified_base 9: mod_base = OTHER; note = 2'-fluorocytidine-3'-phosphate
  modified_base 10: mod_base = OTHER; note = 2'-O-methyladenosine-3'-phosphate
  modified_base 11: mod_base = OTHER; note = 2'-O-methylguanosine-3'-phosphate
  modified_base 12: mod_base = OTHER; note = 2'-O-methyladenosine-3'-phosphate
  modified_base 13: mod_base = OTHER; note = 2'-O-methylcytidine-3'-phosphate
  modified_base 14: mod_base = OTHER; note = 2'-fluoroadenosine-3'-phosphate
  modified_base 15: mod_base = OTHER; note = 2'-O-methylcytidine-3'-phosphate
  modified_base 16: mod_base = OTHER; note = 2'-fluorouridine-3'-phosphate
  modified_base 17: mod_base = OTHER; note = 2'-O-methylguanosine-3'-phosphate
  modified_base 18: mod_base = OTHER; note = 2'-O-methyladenosine-3'-phosphate
  modified_base 19: mod_base = OTHER; note = 2'-O-methylguanosine-3'-phosphate
  modified_base 20: mod_base = OTHER; note = 2'-O-methylguanosine-3'-phosphate
  modified_base 21: mod_base = OTHER; note = 2'-O-methyluridine-3'-phosphorothioate
  modified_base 22: mod_base = OTHER; note = 2'-O-methylguanosine-3'-phosphorothioate
  modified_base 23: mod_base = OTHER; note = 2'-O-methylcytidine-3'-phosphate
aatgggaacagacactgaggtgc

SEQ ID NO: 1001 - RNA, 23 nt, synthetic construct
  source 1..23: mol_type = other RNA
  modified_base 1: mod_base = OTHER; note = 2'-O-methyladenosine-3'-phosphorothioate
  modified_base 2: mod_base = OTHER; note = 2'-fluoroguanosine-3'-phosphorothioate
  modified_base 3: mod_base = OTHER; note = 2'-O-methyladenosine-3'-phosphate
  modified_base 4: mod_base = OTHER; note = 2'-O-methylguanosine-3'-phosphate
  modified_base 5: mod_base = OTHER; note = 2'-O-methylcytidine-3'-phosphate
  modified_base 6: mod_base = OTHER; note = 2'-fluoroadenosine-3'-phosphate
  modified_base 7: mod_base = OTHER; note = 2'-O-methyluridine-3'-phosphate
  modified_base 8: mod_base = OTHER; note = 2'-fluoroguanosine-3'-phosphate
  modified_base 9: mod_base = OTHER; note = 2'-fluoroguanosine-3'-phosphate
  modified_base 10: mod_base = OTHER; note = 2'-O-methylguanosine-3'-phosphate
  modified_base 11: mod_base = OTHER; note = 2'-O-methyladenosine-3'-phosphate
  modified_base 12: mod_base = OTHER; note = 2'-O-methyladenosine-3'-phosphate
  modified_base 13: mod_base = OTHER; note = 2'-O-methylcytidine-3'-phosphate
  modified_base 14: mod_base = OTHER; note = 2'-fluoroadenosine-3'-phosphate
  modified_base 15: mod_base = OTHER; note = 2'-O-methylguanosine-3'-phosphate
  modified_base 16: mod_base = OTHER; note = 2'-fluoroadenosine-3'-phosphate
  modified_base 17: mod_base = OTHER; note = 2'-O-methylcytidine-3'-phosphate
  modified_base 18: mod_base = OTHER; note = 2'-O-methyladenosine-3'-phosphate
  modified_base 19: mod_base = OTHER; note = 2'-O-methylcytidine-3'-phosphate
  modified_base 20: mod_base = OTHER; note = 2'-O-methyluridine-3'-phosphate
  modified_base 21: mod_base = OTHER; note = 2'-O-methylguanosine-3'-phosphorothioate
  modified_base 22: mod_base = OTHER; note = 2'-O-methyladenosine-3'-phosphorothioate
  modified_base 23: mod_base = OTHER; note = 2'-O-methylguanosine-3'-phosphate
agagcatgggaacagacactgag

SEQ ID NO: 1002 - RNA, 23 nt, synthetic construct
  source 1..23: mol_type = other RNA
  modified_base 1: mod_base = OTHER; note = 2'-O-methyladenosine-3'-phosphorothioate
  modified_base 2: mod_base = OTHER; note = 2'-fluorocytidine-3'-phosphorothioate
  modified_base 3: mod_base = OTHER; note = 2'-O-methyladenosine-3'-phosphate
  modified_base 4: mod_base = OTHER; note = 2'-O-methylguanosine-3'-phosphate
  modified_base 5: mod_base = OTHER; note = 2'-O-methyladenosine-3'-phosphate
  modified_base 6: mod_base = OTHER; note = 2'-fluoroguanosine-3'-phosphate
  modified_base 7: mod_base = OTHER; note = 2'-O-methyladenosine-3'-phosphate
  modified_base 8: mod_base = OTHER; note = 2'-fluoroguanosine-3'-phosphate
  modified_base 9: mod_base = OTHER; note = 2'-fluorocytidine-3'-phosphate
  modified_base 10: mod_base = OTHER; note = 2'-O-methyladenosine-3'-phosphate
  modified_base 11: mod_base = OTHER; note = 2'-O-methyluridine-3'-phosphate
  modified_base 12: mod_base = OTHER; note = 2'-O-methylguanosine-3'-phosphate
  modified_base 13: mod_base = OTHER; note = 2'-O-methylguanosine-3'-phosphate
  modified_base 14: mod_base = OTHER; note = 2'-fluoroguanosine-3'-phosphate
  modified_base 15: mod_base = OTHER; note = 2'-O-methyladenosine-3'-phosphate
  modified_base 16: mod_base = OTHER; note = 2'-fluoroadenosine-3'-phosphate
  modified_base 17: mod_base = OTHER; note = 2'-O-methylcytidine-3'-phosphate
  modified_base 18: mod_base = OTHER; note = 2'-O-methyladenosine-3'-phosphate
  modified_base 19: mod_base = OTHER; note = 2'-O-methylguanosine-3'-phosphate
  modified_base 20: mod_base = OTHER; note = 2'-O-methyladenosine-3'-phosphate
  modified_base 21: mod_base = OTHER; note = 2'-O-methylcytidine-3'-phosphorothioate
  modified_base 22: mod_base = OTHER; note = 2'-O-methyladenosine-3'-phosphorothioate
  modified_base 23: mod_base = OTHER; note = 2'-O-methylcytidine-3'-phosphate
acagagagcatgggaacagacac

SEQ ID NO: 1003 - RNA, 23 nt, synthetic construct
  source 1..23: mol_type = other RNA
  modified_base 1: mod_base = OTHER; note = 2'-O-methyladenosine-3'-phosphorothioate
  modified_base 2: mod_base = OTHER; note = 2'-fluorocytidine-3'-phosphorothioate
  modified_base 3: mod_base = OTHER; note = 2'-O-methylcytidine-3'-phosphate
  modified_base 4: mod_base = OTHER; note = 2'-O-methyladenosine-3'-phosphate
  modified_base 5: mod_base = OTHER; note = 2'-O-methylguanosine-3'-phosphate
  modified_base 6: mod_base = OTHER; note = 2'-fluoroadenosine-3'-phosphate
  modified_base 7: mod_base = OTHER; note = 2'-O-methylguanosine-3'-phosphate
  modified_base 8: mod_base = OTHER; note = 2'-fluoroadenosine-3'-phosphate
  modified_base 9: mod_base = OTHER; note = 2'-fluoroguanosine-3'-phosphate
  modified_base 10: mod_base = OTHER; note = 2'-O-methylcytidine-3'-phosphate
  modified_base 11: mod_base = OTHER; note = 2'-O-methyladenosine-3'-phosphate
  modified_base 12: mod_base = OTHER; note = 2'-O-methyluridine-3'-phosphate
  modified_base 13: mod_base = OTHER; note = 2'-O-methylguanosine-3'-phosphate
  modified_base 14: mod_base = OTHER; note = 2'-fluoroguanosine-3'-phosphate
  modified_base 15: mod_base = OTHER; note = 2'-O-methylguanosine-3'-phosphate
  modified_base 16: mod_base = OTHER; note = 2'-fluoroadenosine-3'-phosphate
  modified_base 17: mod_base = OTHER; note = 2'-O-methyladenosine-3'-phosphate
  modified_base 18: mod_base = OTHER; note = 2'-O-methylcytidine-3'-phosphate
  modified_base 19: mod_base = OTHER; note = 2'-O-methyladenosine-3'-phosphate
  modified_base 20: mod_base = OTHER; note = 2'-O-methylguanosine-3'-phosphate
  modified_base 21: mod_base = OTHER; note = 2'-O-methyladenosine-3'-phosphorothioate
  modified_base 22: mod_base = OTHER; note = 2'-O-methylcytidine-3'-phosphorothioate
  modified_base 23: mod_base = OTHER; note = 2'-O-methyladenosine-3'-phosphate
accagagagcatgggaacagaca

SEQ ID NO: 1004 - RNA, 23 nt, synthetic construct
  source 1..23: mol_type = other RNA
  modified_base 1: mod_base = OTHER; note = 2'-O-methyladenosine-3'-phosphorothioate
  modified_base 2: mod_base = OTHER; note = 2'-fluoroguanosine-3'-phosphorothioate
  modified_base 3: mod_base = OTHER; note = 2'-O-methyladenosine-3'-phosphate
  modified_base 4: mod_base = OTHER; note = 2'-O-methylguanosine-3'-phosphate
  modified_base 5: mod_base = OTHER; note = 2'-O-methyladenosine-3'-phosphate
  modified_base 6: mod_base = OTHER; note = 2'-fluoroadenosine-3'-phosphate
  modified_base 7: mod_base = OTHER; note = 2'-O-methylguanosine-3'-phosphate
  modified_base 8: mod_base = OTHER; note = 2'-fluorouridine-3'-phosphate
  modified_base 9: mod_base = OTHER; note = 2'-fluorouridine-3'-phosphate
  modified_base 10: mod_base = OTHER; note = 2'-O-methylguanosine-3'-phosphate
  modified_base 11: mod_base = OTHER; note = 2'-O-methyluridine-3'-phosphate
  modified_base 12: mod_base = OTHER; note = 2'-O-methylcytidine-3'-phosphate
  modified_base 13: mod_base = OTHER; note = 2'-O-methylcytidine-3'-phosphate
  modified_base 14: mod_base = OTHER; note = 2'-fluorouridine-3'-phosphate
  modified_base 15: mod_base = OTHER; note = 2'-O-methylguanosine-3'-phosphate
  modified_base 16: mod_base = OTHER; note = 2'-fluoroguanosine-3'-phosphate
  modified_base 17: mod_base = OTHER; note = 2'-O-methyladenosine-3'-phosphate
  modified_base 18: mod_base = OTHER; note = 2'-O-methyluridine-3'-phosphate
  modified_base 19: mod_base = OTHER; note = 2'-O-methylguanosine-3'-phosphate
  modified_base 20: mod_base = OTHER; note = 2'-O-methyluridine-3'-phosphate
  modified_base 21: mod_base = OTHER; note = 2'-O-methylcytidine-3'-phosphorothioate
  modified_base 22: mod_base = OTHER; note = 2'-O-methyladenosine-3'-phosphorothioate
  modified_base 23: mod_base = OTHER; note = 2'-O-methylcytidine-3'-phosphate
agagaagttgtcctggatgtcac

SEQ ID NO: 1005 - RNA, 23 nt, synthetic construct
  source 1..23: mol_type = other RNA
  modified_base 1: mod_base = OTHER; note = 2'-O-methyladenosine-3'-phosphorothioate
  modified_base 2: mod_base = OTHER; note = 2'-fluorocytidine-3'-phosphorothioate
  modified_base 3: mod_base = OTHER; note = 2'-O-methylguanosine-3'-phosphate
  modified_base 4: mod_base = OTHER; note = 2'-O-methyladenosine-3'-phosphate
  modified_base 5: mod_base = OTHER; note = 2'-O-methylguanosine-3'-phosphate
  modified_base 6: mod_base = OTHER; note = 2'-fluoroadenosine-3'-phosphate
  modified_base 7: mod_base = OTHER; note = 2'-O-methyladenosine-3'-phosphate
  modified_base 8: mod_base = OTHER; note = 2'-fluoroguanosine-3'-phosphate
  modified_base 9: mod_base = OTHER; note = 2'-fluorouridine-3'-phosphate
  modified_base 10: mod_base = OTHER; note = 2'-O-methyluridine-3'-phosphate
  modified_base 11: mod_base = OTHER; note = 2'-O-methylguanosine-3'-phosphate
  modified_base 12: mod_base = OTHER; note = 2'-O-methyluridine-3'-phosphate
  modified_base 13: mod_base = OTHER; note = 2'-O-methylcytidine-3'-phosphate
  modified_base 14: mod_base = OTHER; note = 2'-fluorocytidine-3'-phosphate
  modified_base 15: mod_base = OTHER; note = 2'-O-methyluridine-3'-phosphate
  modified_base 16: mod_base = OTHER; note = 2'-fluoroguanosine-3'-phosphate
  modified_base 17: mod_base = OTHER; note = 2'-O-methylguanosine-3'-phosphate
  modified_base 18: mod_base = OTHER; note = 2'-O-methyladenosine-3'-phosphate
  modified_base 19: mod_base = OTHER; note = 2'-O-methyluridine-3'-phosphate
  modified_base 20: mod_base = OTHER; note = 2'-O-methylguanosine-3'-phosphate
  modified_base 21: mod_base = OTHER; note = 2'-O-methyluridine-3'-phosphorothioate
  modified_base 22: mod_base = OTHER; note = 2'-O-methylcytidine-3'-phosphorothioate
  modified_base 23: mod_base = OTHER; note = 2'-O-methyladenosine-3'-phosphate
acgagaagttgtcctggatgtca

SEQ ID NO: 1006 - RNA, 23 nt, synthetic construct
  source 1..23: mol_type = other RNA
  modified_base 1: mod_base = OTHER; note = 2'-O-methyladenosine-3'-phosphorothioate
  modified_base 2: mod_base = OTHER; note = 2'-fluorocytidine-3'-phosphorothioate
  modified_base 3: mod_base = OTHER; note = 2'-O-methylcytidine-3'-phosphate
  modified_base 4: mod_base = OTHER; note = 2'-O-methylguanosine-3'-phosphate
  modified_base 5: mod_base = OTHER; note = 2'-O-methyladenosine-3'-phosphate
  modified_base 6: mod_base = OTHER; note = 2'-fluoroguanosine-3'-phosphate
  modified_base 7: mod_base = OTHER; note = 2'-O-methyladenosine-3'-phosphate
  modified_base 8: mod_base = OTHER; note = 2'-fluoroadenosine-3'-phosphate
  modified_base 9: mod_base = OTHER; note = 2'-fluoroguanosine-3'-phosphate
  modified_base 10: mod_base = OTHER; note = 2'-O-methyluridine-3'-phosphate
  modified_base 11: mod_base = OTHER; note = 2'-O-methyluridine-3'-phosphate
  modified_base 12: mod_base = OTHER; note = 2'-O-methylguanosine-3'-phosphate
  modified_base 13: mod_base = OTHER; note = 2'-O-methyluridine-3'-phosphate
  modified_base 14: mod_base = OTHER; note = 2'-fluorocytidine-3'-phosphate
  modified_base 15: mod_base = OTHER; note = 2'-O-methylcytidine-3'-phosphate
  modified_base 16: mod_base = OTHER; note = 2'-fluorouridine-3'-phosphate
  modified_base 17: mod_base = OTHER; note = 2'-O-methylguanosine-3'-phosphate
  modified_base 18: mod_base = OTHER; note = 2'-O-methylguanosine-3'-phosphate
  modified_base 19: mod_base = OTHER; note = 2'-O-methyladenosine-3'-phosphate
  modified_base 20: mod_base = OTHER; note = 2'-O-methyluridine-3'-phosphate
  modified_base 21: mod_base = OTHER; note = 2'-O-methylguanosine-3'-phosphorothioate
  modified_base 22: mod_base = OTHER; note = 2'-O-methyluridine-3'-phosphorothioate
  modified_base 23: mod_base = OTHER; note = 2'-O-methylcytidine-3'-phosphate
accgagaagttgtcctggatgtc

SEQ ID NO: 1007 - RNA, 23 nt, synthetic construct
  source 1..23: mol_type = other RNA
  modified_base 1: mod_base = OTHER; note = 2'-O-methyladenosine-3'-phosphorothioate
  modified_base 2: mod_base = OTHER; note = 2'-fluoroadenosine-3'-phosphorothioate
  modified_base 3: mod_base = OTHER; note = 2'-O-methylcytidine-3'-phosphate
  modified_base 4: mod_base = OTHER; note = 2'-O-methylcytidine-3'-phosphate
  modified_base 5: mod_base = OTHER; note = 2'-O-methylguanosine-3'-phosphate
  modified_base 6: mod_base = OTHER; note = 2'-fluoroadenosine-3'-phosphate
  modified_base 7: mod_base = OTHER; note = 2'-O-methylguanosine-3'-phosphate
  modified_base 8: mod_base = OTHER; note = 2'-fluoroadenosine-3'-phosphate
  modified_base 9: mod_base = OTHER; note = 2'-fluoroadenosine-3'-phosphate
  modified_base 10: mod_base = OTHER; note = 2'-O-methylguanosine-3'-phosphate
  modified_base 11: mod_base = OTHER; note = 2'-O-methyluridine-3'-phosphate
  modified_base 12: mod_base = OTHER; note = 2'-O-methyluridine-3'-phosphate
  modified_base 13: mod_base = OTHER; note = 2'-O-methylguanosine-3'-phosphate
  modified_base 14: mod_base = OTHER; note = 2'-fluorouridine-3'-phosphate
  modified_base 15: mod_base = OTHER; note = 2'-O-methylcytidine-3'-phosphate
  modified_base 16: mod_base = OTHER; note = 2'-fluorocytidine-3'-phosphate
  modified_base 17: mod_base = OTHER; note = 2'-O-methyluridine-3'-phosphate
  modified_base 18: mod_base = OTHER; note = 2'-O-methylguanosine-3'-phosphate
  modified_base 19: mod_base = OTHER; note = 2'-O-methylguanosine-3'-phosphate
  modified_base 20: mod_base = OTHER; note = 2'-O-methyladenosine-3'-phosphate
  modified_base 21: mod_base = OTHER; note = 2'-O-methyluridine-3'-phosphorothioate
  modified_base 22: mod_base = OTHER; note = 2'-O-methylguanosine-3'-phosphorothioate
  modified_base 23: mod_base = OTHER; note = 2'-O-methyluridine-3'-phosphate
aaccgagaagttgtcctggatgt

SEQ ID NO: 1008 - RNA, 23 nt, synthetic construct
  source 1..23: mol_type = other RNA
  modified_base 1: mod_base = OTHER; note = 2'-O-methyladenosine-3'-phosphorothioate
  modified_base 2: mod_base = OTHER; note = 2'-fluorocytidine-3'-phosphorothioate
  modified_base 3: mod_base = OTHER; note = 2'-O-methyladenosine-3'-phosphate
  modified_base 4: mod_base = OTHER; note = 2'-O-methylcytidine-3'-phosphate
  modified_base 5: mod_base = OTHER; note = 2'-O-methylcytidine-3'-phosphate
  modified_base 6: mod_base = OTHER; note = 2'-fluoroguanosine-3'-phosphate
  modified_base 7: mod_base = OTHER; note = 2'-O-methyladenosine-3'-phosphate
  modified_base 8: mod_base = OTHER; note = 2'-fluoroguanosine-3'-phosphate
  modified_base 9: mod_base = OTHER; note = 2'-fluoroadenosine-3'-phosphate
  modified_base 10: mod_base = OTHER; note = 2'-O-methyladenosine-3'-phosphate
  modified_base 11: mod_base = OTHER; note = 2'-O-methylguanosine-3'-phosphate
  modified_base 12: mod_base = OTHER; note = 2'-O-methyluridine-3'-phosphate
  modified_base 13: mod_base = OTHER; note = 2'-O-methyluridine-3'-phosphate
  modified_base 14: mod_base = OTHER; note = 2'-fluoroguanosine-3'-phosphate
  modified_base 15: mod_base = OTHER; note = 2'-O-methyluridine-3'-phosphate
  modified_base 16: mod_base = OTHER; note = 2'-fluorocytidine-3'-phosphate
  modified_base 17: mod_base = OTHER; note = 2'-O-methylcytidine-3'-phosphate
  modified_base 18: mod_base = OTHER; note = 2'-O-methyluridine-3'-phosphate
  modified_base 19: mod_base = OTHER; note = 2'-O-methylguanosine-3'-phosphate
  modified_base 20: mod_base = OTHER; note = 2'-O-methylguanosine-3'-phosphate
  modified_base 21: mod_base = OTHER; note = 2'-O-methyladenosine-3'-phosphorothioate
  modified_base 22: mod_base = OTHER; note = 2'-O-methyluridine-3'-phosphorothioate
  modified_base 23: mod_base = OTHER; note = 2'-O-methylguanosine-3'-phosphate
acaccgagaagttgtcctggatg

SEQ ID NO: 1009 - RNA, 23 nt, synthetic construct
  source 1..23: mol_type = other RNA
  modified_base 1: mod_base = OTHER; note = 2'-O-methyladenosine-3'-phosphorothioate
  modified_base 2: mod_base = OTHER; note = 2'-fluorouridine -3'-phosphorothioate
  modified_base 3: mod_base = OTHER; note = 2'-O-methylcytidine-3'-phosphate
  modified_base 4: mod_base = OTHER; note = 2'-O-methyladenosine-3'-phosphate
  modified_base 5: mod_base = OTHER; note = 2'-O-methylcytidine-3'-phosphate
  modified_base 6: mod_base = OTHER; note = 2'-fluorocytidine-3'-phosphate
  modified_base 7: mod_base = OTHER; note = 2'-O-methylguanosine-3'-phosphate
  modified_base 8: mod_base = OTHER; note = 2'-fluoroadenosine-3'-phosphate
  modified_base 9: mod_base = OTHER; note = 2'-fluoroguanosine-3'-phosphate
  modified_base 10: mod_base = OTHER; note = 2'-O-methyladenosine-3'-phosphate
  modified_base 11: mod_base = OTHER; note = 2'-O-methyladenosine-3'-phosphate
  modified_base 12: mod_base = OTHER; note = 2'-O-methylguanosine-3'-phosphate
  modified_base 13: mod_base = OTHER; note = 2'-O-methyluridine-3'-phosphate
  modified_base 14: mod_base = OTHER; note = 2'-fluorouridine-3'-phosphate
  modified_base 15: mod_base = OTHER; note = 2'-O-methylguanosine-3'-phosphate
  modified_base 16: mod_base = OTHER; note = 2'-fluorouridine-3'-phosphate
  modified_base 17: mod_base = OTHER; note = 2'-O-methylcytidine-3'-phosphate
  modified_base 18: mod_base = OTHER; note = 2'-O-methylcytidine-3'-phosphate
  modified_base 19: mod_base = OTHER; note = 2'-O-methyluridine-3'-phosphate
  modified_base 20: mod_base = OTHER; note = 2'-O-methylguanosine-3'-phosphate
  modified_base 21: mod_base = OTHER; note = 2'-O-methylguanosine-3'-phosphorothioate
  modified_base 22: mod_base = OTHER; note = 2'-O-methyladenosine-3'-phosphorothioate
  modified_base 23: mod_base = OTHER; note = 2'-O-methyluridine-3'-phosphate
atcaccgagaagttgtcctggat

SEQ ID NO: 1010 - RNA, 23 nt, synthetic construct
  source 1..23: mol_type = other RNA
  modified_base 1: mod_base = OTHER; note = 2'-O-methyladenosine-3'-phosphorothioate
  modified_base 2: mod_base = OTHER; note = 2'-fluoroguanosine-3'-phosphorothioate
  modified_base 3: mod_base = OTHER; note = 2'-O-methyluridine-3'-phosphate
  modified_base 4: mod_base = OTHER; note = 2'-O-methylcytidine-3'-phosphate
  modified_base 5: mod_base = OTHER; note = 2'-O-methyladenosine-3'-phosphate
  modified_base 6: mod_base = OTHER; note = 2'-fluorocytidine-3'-phosphate
  modified_base 7: mod_base = OTHER; note = 2'-O-methylcytidine-3'-phosphate
  modified_base 8: mod_base = OTHER; note = 2'-fluoroguanosine-3'-phosphate
  modified_base 9: mod_base = OTHER; note = 2'-fluoroadenosine-3'-phosphate
  modified_base 10: mod_base = OTHER; note = 2'-O-methylguanosine-3'-phosphate
  modified_base 11: mod_base = OTHER; note = 2'-O-methyladenosine-3'-phosphate
  modified_base 12: mod_base = OTHER; note = 2'-O-methyladenosine-3'-phosphate
  modified_base 13: mod_base = OTHER; note = 2'-O-methylguanosine-3'-phosphate
  modified_base 14: mod_base = OTHER; note = 2'-fluorouridine-3'-phosphate
  modified_base 15: mod_base = OTHER; note = 2'-O-methyluridine-3'-phosphate
  modified_base 16: mod_base = OTHER; note = 2'-fluoroguanosine-3'-phosphate
  modified_base 17: mod_base = OTHER; note = 2'-O-methyluridine-3'-phosphate
  modified_base 18: mod_base = OTHER; note = 2'-O-methylcytidine-3'-phosphate
  modified_base 19: mod_base = OTHER; note = 2'-O-methylcytidine-3'-phosphate
  modified_base 20: mod_base = OTHER; note = 2'-O-methyluridine-3'-phosphate
  modified_base 21: mod_base = OTHER; note = 2'-O-methylguanosine-3'-phosphorothioate
  modified_base 22: mod_base = OTHER; note = 2'-O-methylguanosine-3'-phosphorothioate
  modified_base 23: mod_base = OTHER; note = 2'-O-methyladenosine-3'-phosphate
agtcaccgagaagttgtcctgga

SEQ ID NO: 1011 - RNA, 23 nt, synthetic construct
  source 1..23: mol_type = other RNA
  modified_base 1: mod_base = OTHER; note = 2'-O-methyladenosine-3'-phosphorothioate
  modified_base 2: mod_base = OTHER; note = 2'-fluorocytidine-3'-phosphorothioate
  modified_base 3: mod_base = OTHER; note = 2'-O-methyladenosine-3'-phosphate
  modified_base 4: mod_base = OTHER; note = 2'-O-methylcytidine-3'-phosphate
  modified_base 5: mod_base = OTHER; note = 2'-O-methyluridine-3'-phosphate
  modified_base 6: mod_base = OTHER; note = 2'-fluorouridine-3'-phosphate
  modified_base 7: mod_base = OTHER; note = 2'-O-methylguanosine-3'-phosphate
  modified_base 8: mod_base = OTHER; note = 2'-fluoroadenosine-3'-phosphate
  modified_base 9: mod_base = OTHER; note = 2'-fluoroguanosine-3'-phosphate
  modified_base 10: mod_base = OTHER; note = 2'-O-methyluridine-3'-phosphate
  modified_base 11: mod_base = OTHER; note = 2'-O-methylcytidine-3'-phosphate
  modified_base 12: mod_base = OTHER; note = 2'-O-methyladenosine-3'-phosphate
  modified_base 13: mod_base = OTHER; note = 2'-O-methylcytidine-3'-phosphate
  modified_base 14: mod_base = OTHER; note = 2'-fluorocytidine-3'-phosphate
  modified_base 15: mod_base = OTHER; note = 2'-O-methylguanosine-3'-phosphate
  modified_base 16: mod_base = OTHER; note = 2'-fluoroadenosine-3'-phosphate
  modified_base 17: mod_base = OTHER; note = 2'-O-methylguanosine-3'-phosphate
  modified_base 18: mod_base = OTHER; note = 2'-O-methyladenosine-3'-phosphate
  modified_base 19: mod_base = OTHER; note = 2'-O-methyladenosine-3'-phosphate
  modified_base 20: mod_base = OTHER; note = 2'-O-methylguanosine-3'-phosphate
  modified_base 21: mod_base = OTHER; note = 2'-O-methyluridine-3'-phosphorothioate
  modified_base 22: mod_base = OTHER; note = 2'-O-methyluridine-3'-phosphorothioate
  modified_base 23: mod_base = OTHER; note = 2'-O-methylguanosine-3'-phosphate
acacttgagtcaccgagaagttg

SEQ ID NO: 1012 - RNA, 23 nt, synthetic construct
  source 1..23: mol_type = other RNA
  modified_base 1: mod_base = OTHER; note = 2'-O-methyladenosine-3'-phosphorothioate
  modified_base 2: mod_base = OTHER; note = 2'-fluoroguanosine-3'-phosphorothioate
  modified_base 3: mod_base = OTHER; note = 2'-O-methylcytidine-3'-phosphate
  modified_base 4: mod_base = OTHER; note = 2'-O-methyladenosine-3'-phosphate
  modified_base 5: mod_base = OTHER; note = 2'-O-methylcytidine-3'-phosphate
  modified_base 6: mod_base = OTHER; note = 2'-fluorouridine-3'-phosphate
  modified_base 7: mod_base = OTHER; note = 2'-O-methyluridine-3'-phosphate
  modified_base 8: mod_base = OTHER; note = 2'-fluoroguanosine-3'-phosphate
  modified_base 9: mod_base = OTHER; note = 2'-fluoroadenosine-3'-phosphate
  modified_base 10: mod_base = OTHER; note = 2'-O-methylguanosine-3'-phosphate
  modified_base 11: mod_base = OTHER; note = 2'-O-methyluridine-3'-phosphate
  modified_base 12: mod_base = OTHER; note = 2'-O-methylcytidine-3'-phosphate
  modified_base 13: mod_base = OTHER; note = 2'-O-methyladenosine-3'-phosphate
  modified_base 14: mod_base = OTHER; note = 2'-fluorocytidine-3'-phosphate
  modified_base 15: mod_base = OTHER; note = 2'-O-methylcytidine-3'-phosphate
  modified_base 16: mod_base = OTHER; note = 2'-fluoroguanosine-3'-phosphate
  modified_base 17: mod_base = OTHER; note = 2'-O-methyladenosine-3'-phosphate
  modified_base 18: mod_base = OTHER; note = 2'-O-methylguanosine-3'-phosphate
  modified_base 19: mod_base = OTHER; note = 2'-O-methyladenosine-3'-phosphate
  modified_base 20: mod_base = OTHER; note = 2'-O-methyladenosine-3'-phosphate
  modified_base 21: mod_base = OTHER; note = 2'-O-methylguanosine-3'-phosphorothioate
  modified_base 22: mod_base = OTHER; note = 2'-O-methyluridine-3'-phosphorothioate
  modified_base 23: mod_base = OTHER; note = 2'-O-methyluridine-3'-phosphate
agcacttgagtcaccgagaagtt

SEQ ID NO: 1013 - RNA, 23 nt, synthetic construct
  source 1..23: mol_type = other RNA
  modified_base 1: mod_base = OTHER; note = 2'-O-methyladenosine-3'-phosphorothioate
  modified_base 2: mod_base = OTHER; note = 2'-fluorocytidine-3'-phosphorothioate
  modified_base 3: mod_base = OTHER; note = 2'-O-methyladenosine-3'-phosphate
  modified_base 4: mod_base = OTHER; note = 2'-O-methylguanosine-3'-phosphate
  modified_base 5: mod_base = OTHER; note = 2'-O-methyluridine-3'-phosphate
  modified_base 6: mod_base = OTHER; note = 2'-fluoroguanosine-3'-phosphate
  modified_base 7: mod_base = OTHER; note = 2'-O-methyladenosine-3'-phosphate
  modified_base 8: mod_base = OTHER; note = 2'-fluoroadenosine-3'-phosphate
  modified_base 9: mod_base = OTHER; note = 2'-fluoroguanosine-3'-phosphate
  modified_base 10: mod_base = OTHER; note = 2'-O-methylguanosine-3'-phosphate
  modified_base 11: mod_base = OTHER; note = 2'-O-methylguanosine-3'-phosphate
  modified_base 12: mod_base = OTHER; note = 2'-O-methylcytidine-3'-phosphate
  modified_base 13: mod_base = OTHER; note = 2'-O-methyladenosine-3'-phosphate
  modified_base 14: mod_base = OTHER; note = 2'-fluorocytidine-3'-phosphate
  modified_base 15: mod_base = OTHER; note = 2'-O-methyluridine-3'-phosphate
  modified_base 16: mod_base = OTHER; note = 2'-fluorouridine-3'-phosphate
  modified_base 17: mod_base = OTHER; note = 2'-O-methylguanosine-3'-phosphate
  modified_base 18: mod_base = OTHER; note = 2'-O-methyladenosine-3'-phosphate
  modified_base 19: mod_base = OTHER; note = 2'-O-methylguanosine-3'-phosphate
  modified_base 20: mod_base = OTHER; note = 2'-O-methyluridine-3'-phosphate
  modified_base 21: mod_base = OTHER; note = 2'-O-methylcytidine-3'-phosphorothioate
  modified_base 22: mod_base = OTHER; note = 2'-O-methyladenosine-3'-phosphorothioate
  modified_base 23: mod_base = OTHER; note = 2'-O-methylcytidine-3'-phosphate
acagtgaagggcacttgagtcac

SEQ ID NO: 1014 - RNA, 23 nt, synthetic construct
  source 1..23: mol_type = other RNA
  modified_base 1: mod_base = OTHER; note = 2'-O-methyladenosine-3'-phosphorothioate
  modified_base 2: mod_base = OTHER; note = 2'-fluorocytidine-3'-phosphorothioate
  modified_base 3: mod_base = OTHER; note = 2'-O-methyluridine-3'-phosphate
  modified_base 4: mod_base = OTHER; note = 2'-O-methylcytidine-3'-phosphate
  modified_base 5: mod_base = OTHER; note = 2'-O-methyladenosine-3'-phosphate
  modified_base 6: mod_base = OTHER; note = 2'-fluoroguanosine-3'-phosphate
  modified_base 7: mod_base = OTHER; note = 2'-O-methyluridine-3'-phosphate
  modified_base 8: mod_base = OTHER; note = 2'-fluoroguanosine-3'-phosphate
  modified_base 9: mod_base = OTHER; note = 2'-fluoroadenosine-3'-phosphate
  modified_base 10: mod_base = OTHER; note = 2'-O-methyladenosine-3'-phosphate
  modified_base 11: mod_base = OTHER; note = 2'-O-methylguanosine-3'-phosphate
  modified_base 12: mod_base = OTHER; note = 2'-O-methylguanosine-3'-phosphate
  modified_base 13: mod_base = OTHER; note = 2'-O-methylguanosine-3'-phosphate
  modified_base 14: mod_base = OTHER; note = 2'-fluorocytidine-3'-phosphate
  modified_base 15: mod_base = OTHER; note = 2'-O-methyladenosine-3'-phosphate
  modified_base 16: mod_base = OTHER; note = 2'-fluorocytidine-3'-phosphate
  modified_base 17: mod_base = OTHER; note = 2'-O-methyluridine-3'-phosphate
  modified_base 18: mod_base = OTHER; note = 2'-O-methyluridine-3'-phosphate
  modified_base 19: mod_base = OTHER; note = 2'-O-methylguanosine-3'-phosphate
  modified_base 20: mod_base = OTHER; note = 2'-O-methyladenosine-3'-phosphate
  modified_base 21: mod_base = OTHER; note = 2'-O-methylguanosine-3'-phosphorothioate
  modified_base 22: mod_base = OTHER; note = 2'-O-methyluridine-3'-phosphorothioate
  modified_base 23: mod_base = OTHER; note = 2'-O-methylcytidine-3'-phosphate
actcagtgaagggcacttgagtc

SEQ ID NO: 1015 - RNA, 23 nt, synthetic construct
  source 1..23: mol_type = other RNA
  modified_base 1: mod_base = OTHER; note = 2'-O-methyladenosine-3'-phosphorothioate
  modified_base 2: mod_base = OTHER; note = 2'-fluorocytidine-3'-phosphorothioate
  modified_base 3: mod_base = OTHER; note = 2'-O-methyladenosine-3'-phosphate
  modified_base 4: mod_base = OTHER; note = 2'-O-methyluridine-3'-phosphate
  modified_base 5: mod_base = OTHER; note = 2'-O-methyladenosine-3'-phosphate
  modified_base 6: mod_base = OTHER; note = 2'-fluoroguanosine-3'-phosphate
  modified_base 7: mod_base = OTHER; note = 2'-O-methyluridine-3'-phosphate
  modified_base 8: mod_base = OTHER; note = 2'-fluoroguanosine-3'-phosphate
  modified_base 9: mod_base = OTHER; note = 2'-fluoroadenosine-3'-phosphate
  modified_base 10: mod_base = OTHER; note = 2'-O-methylguanosine-3'-phosphate
  modified_base 11: mod_base = OTHER; note = 2'-O-methylguanosine-3'-phosphate
  modified_base 12: mod_base = OTHER; note = 2'-O-methylcytidine-3'-phosphate
  modified_base 13: mod_base = OTHER; note = 2'-O-methyluridine-3'-phosphate
  modified_base 14: mod_base = OTHER; note = 2'-fluoroguanosine-3'-phosphate
  modified_base 15: mod_base = OTHER; note = 2'-O-methylguanosine-3'-phosphate
  modified_base 16: mod_base = OTHER; note = 2'-fluoroadenosine-3'-phosphate
  modified_base 17: mod_base = OTHER; note = 2'-O-methyluridine-3'-phosphate
  modified_base 18: mod_base = OTHER; note = 2'-O-methylcytidine-3'-phosphate
  modified_base 19: mod_base = OTHER; note = 2'-O-methyladenosine-3'-phosphate
  modified_base 20: mod_base = OTHER; note = 2'-O-methylguanosine-3'-phosphate
  modified_base 21: mod_base = OTHER; note = 2'-O-methylcytidine-3'-phosphorothioate
  modified_base 22: mod_base = OTHER; note = 2'-O-methyladenosine-3'-phosphorothioate
  modified_base 23: mod_base = OTHER; note = 2'-O-methylguanosine-3'-phosphate
acatagtgaggctggatcagcag

SEQ ID NO: 1016 - RNA, 23 nt, synthetic construct
  source 1..23: mol_type = other RNA
  modified_base 1: mod_base = OTHER; note = 2'-O-methyladenosine-3'-phosphorothioate
  modified_base 2: mod_base = OTHER; note = 2'-fluorouridine -3'-phosphorothioate
  modified_base 3: mod_base = OTHER; note = 2'-O-methylguanosine-3'-phosphate
  modified_base 4: mod_base = OTHER; note = 2'-O-methylguanosine-3'-phosphate
  modified_base 5: mod_base = OTHER; note = 2'-O-methyladenosine-3'-phosphate
  modified_base 6: mod_base = OTHER; note = 2'-fluoroadenosine-3'-phosphate
  modified_base 7: mod_base = OTHER; note = 2'-O-methyladenosine-3'-phosphate
  modified_base 8: mod_base = OTHER; note = 2'-fluoroguanosine-3'-phosphate
  modified_base 9: mod_base = OTHER; note = 2'-fluorouridine-3'-phosphate
  modified_base 10: mod_base = OTHER; note = 2'-O-methylguanosine-3'-phosphate
  modified_base 11: mod_base = OTHER; note = 2'-O-methyladenosine-3'-phosphate
  modified_base 12: mod_base = OTHER; note = 2'-O-methylguanosine-3'-phosphate
  modified_base 13: mod_base = OTHER; note = 2'-O-methyladenosine-3'-phosphate
  modified_base 14: mod_base = OTHER; note = 2'-fluorocytidine-3'-phosphate
  modified_base 15: mod_base = OTHER; note = 2'-O-methylcytidine-3'-phosphate
  modified_base 16: mod_base = OTHER; note = 2'-fluorocytidine-3'-phosphate
  modified_base 17: mod_base = OTHER; note = 2'-O-methyluridine-3'-phosphate
  modified_base 18: mod_base = OTHER; note = 2'-O-methylcytidine-3'-phosphate
  modified_base 19: mod_base = OTHER; note = 2'-O-methylcytidine-3'-phosphate
  modified_base 20: mod_base = OTHER; note = 2'-O-methyladenosine-3'-phosphate
  modified_base 21: mod_base = OTHER; note = 2'-O-methylcytidine-3'-phosphorothioate
  modified_base 22: mod_base = OTHER; note = 2'-O-methylcytidine-3'-phosphorothioate
  modified_base 23: mod_base = OTHER; note = 2'-O-methyluridine-3'-phosphate
atggaaagtgagaccctccacct

SEQ ID NO: 1017 - RNA, 23 nt, synthetic construct
  source 1..23: mol_type = other RNA
  modified_base 1: mod_base = OTHER; note = 2'-O-methyladenosine-3'-phosphorothioate
  modified_base 2: mod_base = OTHER; note = 2'-fluoroguanosine-3'-phosphorothioate
  modified_base 3: mod_base = OTHER; note = 2'-O-methyladenosine-3'-phosphate
  modified_base 4: mod_base = OTHER; note = 2'-O-methylguanosine-3'-phosphate
  modified_base 5: mod_base = OTHER; note = 2'-O-methyluridine-3'-phosphate
  modified_base 6: mod_base = OTHER; note = 2'-fluorouridine-3'-phosphate
  modified_base 7: mod_base = OTHER; note = 2'-O-methyluridine-3'-phosphate
  modified_base 8: mod_base = OTHER; note = 2'-fluorouridine-3'-phosphate
  modified_base 9: mod_base = OTHER; note = 2'-fluoroguanosine-3'-phosphate
  modified_base 10: mod_base = OTHER; note = 2'-O-methylcytidine-3'-phosphate
  modified_base 11: mod_base = OTHER; note = 2'-O-methyluridine-3'-phosphate
  modified_base 12: mod_base = OTHER; note = 2'-O-methylguanosine-3'-phosphate
  modified_base 13: mod_base = OTHER; note = 2'-O-methylguanosine-3'-phosphate
  modified_base 14: mod_base = OTHER; note = 2'-fluoroadenosine-3'-phosphate
  modified_base 15: mod_base = OTHER; note = 2'-O-methyladenosine-3'-phosphate
  modified_base 16: mod_base = OTHER; note = 2'-fluoroadenosine-3'-phosphate
  modified_base 17: mod_base = OTHER; note = 2'-O-methylguanosine-3'-phosphate
  modified_base 18: mod_base = OTHER; note = 2'-O-methyluridine-3'-phosphate
  modified_base 19: mod_base = OTHER; note = 2'-O-methylguanosine-3'-phosphate
  modified_base 20: mod_base = OTHER; note = 2'-O-methyladenosine-3'-phosphate
  modified_base 21: mod_base = OTHER; note = 2'-O-methylguanosine-3'-phosphorothioate
  modified_base 22: mod_base = OTHER; note = 2'-O-methyladenosine-3'-phosphorothioate
  modified_base 23: mod_base = OTHER; note = 2'-O-methylcytidine-3'-phosphate
agagttttgctggaaagtgagac

SEQ ID NO: 1018 - RNA, 23 nt, synthetic construct
  source 1..23: mol_type = other RNA
  modified_base 1: mod_base = OTHER; note = 2'-O-methyladenosine-3'-phosphorothioate
  modified_base 2: mod_base = OTHER; note = 2'-fluorocytidine-3'-phosphorothioate
  modified_base 3: mod_base = OTHER; note = 2'-O-methyladenosine-3'-phosphate
  modified_base 4: mod_base = OTHER; note = 2'-O-methylguanosine-3'-phosphate
  modified_base 5: mod_base = OTHER; note = 2'-O-methyluridine-3'-phosphate
  modified_base 6: mod_base = OTHER; note = 2'-fluorouridine-3'-phosphate
  modified_base 7: mod_base = OTHER; note = 2'-O-methylguanosine-3'-phosphate
  modified_base 8: mod_base = OTHER; note = 2'-fluoroadenosine-3'-phosphate
  modified_base 9: mod_base = OTHER; note = 2'-fluoroguanosine-3'-phosphate
  modified_base 10: mod_base = OTHER; note = 2'-O-methylguanosine-3'-phosphate
  modified_base 11: mod_base = OTHER; note = 2'-O-methylguanosine-3'-phosphate
  modified_base 12: mod_base = OTHER; note = 2'-O-methyladenosine-3'-phosphate
  modified_base 13: mod_base = OTHER; note = 2'-O-methylguanosine-3'-phosphate
  modified_base 14: mod_base = OTHER; note = 2'-fluorouridine-3'-phosphate
  modified_base 15: mod_base = OTHER; note = 2'-O-methyluridine-3'-phosphate
  modified_base 16: mod_base = OTHER; note = 2'-fluorouridine-3'-phosphate
  modified_base 17: mod_base = OTHER; note = 2'-O-methyluridine-3'-phosphate
  modified_base 18: mod_base = OTHER; note = 2'-O-methylguanosine-3'-phosphate
  modified_base 19: mod_base = OTHER; note = 2'-O-methylcytidine-3'-phosphate
  modified_base 20: mod_base = OTHER; note = 2'-O-methyluridine-3'-phosphate
  modified_base 21: mod_base = OTHER; note = 2'-O-methylguanosine-3'-phosphorothioate
  modified_base 22: mod_base = OTHER; note = 2'-O-methylguanosine-3'-phosphorothioate
  modified_base 23: mod_base = OTHER; note = 2'-O-methyladenosine-3'-phosphate
acagttgagggagttttgctgga

SEQ ID NO: 1019 - RNA, 23 nt, synthetic construct
  source 1..23: mol_type = other RNA
  modified_base 1: mod_base = OTHER; note = 2'-O-methyladenosine-3'-phosphorothioate
  modified_base 2: mod_base = OTHER; note = 2'-fluorocytidine-3'-phosphorothioate
  modified_base 3: mod_base = OTHER; note = 2'-O-methylcytidine-3'-phosphate
  modified_base 4: mod_base = OTHER; note = 2'-O-methyladenosine-3'-phosphate
  modified_base 5: mod_base = OTHER; note = 2'-O-methylguanosine-3'-phosphate
  modified_base 6: mod_base = OTHER; note = 2'-fluorouridine-3'-phosphate
  modified_base 7: mod_base = OTHER; note = 2'-O-methyluridine-3'-phosphate
  modified_base 8: mod_base = OTHER; note = 2'-fluoroguanosine-3'-phosphate
  modified_base 9: mod_base = OTHER; note = 2'-fluoroadenosine-3'-phosphate
  modified_base 10: mod_base = OTHER; note = 2'-O-methylguanosine-3'-phosphate
  modified_base 11: mod_base = OTHER; note = 2'-O-methylguanosine-3'-phosphate
  modified_base 12: mod_base = OTHER; note = 2'-O-methylguanosine-3'-phosphate
  modified_base 13: mod_base = OTHER; note = 2'-O-methyladenosine-3'-phosphate
  modified_base 14: mod_base = OTHER; note = 2'-fluoroguanosine-3'-phosphate
  modified_base 15: mod_base = OTHER; note = 2'-O-methyluridine-3'-phosphate
  modified_base 16: mod_base = OTHER; note = 2'-fluorouridine-3'-phosphate
  modified_base 17: mod_base = OTHER; note = 2'-O-methyluridine-3'-phosphate
  modified_base 18: mod_base = OTHER; note = 2'-O-methyluridine-3'-phosphate
  modified_base 19: mod_base = OTHER; note = 2'-O-methylguanosine-3'-phosphate
  modified_base 20: mod_base = OTHER; note = 2'-O-methylcytidine-3'-phosphate
  modified_base 21: mod_base = OTHER; note = 2'-O-methyluridine-3'-phosphorothioate
  modified_base 22: mod_base = OTHER; note = 2'-O-methylguanosine-3'-phosphorothioate
  modified_base 23: mod_base = OTHER; note = 2'-O-methylguanosine-3'-phosphate
accagttgagggagttttgctgg

SEQ ID NO: 1020 - RNA, 23 nt, synthetic construct
  source 1..23: mol_type = other RNA
  modified_base 1: mod_base = OTHER; note = 2'-O-methyladenosine-3'-phosphorothioate
  modified_base 2: mod_base = OTHER; note = 2'-fluorocytidine-3'-phosphorothioate
  modified_base 3: mod_base = OTHER; note = 2'-O-methyladenosine-3'-phosphate
  modified_base 4: mod_base = OTHER; note = 2'-O-methyluridine-3'-phosphate
  modified_base 5: mod_base = OTHER; note = 2'-O-methylcytidine-3'-phosphate
  modified_base 6: mod_base = OTHER; note = 2'-fluorocytidine-3'-phosphate
  modified_base 7: mod_base = OTHER; note = 2'-O-methyladenosine-3'-phosphate
  modified_base 8: mod_base = OTHER; note = 2'-fluoroguanosine-3'-phosphate
  modified_base 9: mod_base = OTHER; note = 2'-fluorouridine-3'-phosphate
  modified_base 10: mod_base = OTHER; note = 2'-O-methyluridine-3'-phosphate
  modified_base 11: mod_base = OTHER; note = 2'-O-methylguanosine-3'-phosphate
  modified_base 12: mod_base = OTHER; note = 2'-O-methyladenosine-3'-phosphate
  modified_base 13: mod_base = OTHER; note = 2'-O-methylguanosine-3'-phosphate
  modified_base 14: mod_base = OTHER; note = 2'-fluoroguanosine-3'-phosphate
  modified_base 15: mod_base = OTHER; note = 2'-O-methylguanosine-3'-phosphate
  modified_base 16: mod_base = OTHER; note = 2'-fluoroadenosine-3'-phosphate
  modified_base 17: mod_base = OTHER; note = 2'-O-methylguanosine-3'-phosphate
  modified_base 18: mod_base = OTHER; note = 2'-O-methyluridine-3'-phosphate
  modified_base 19: mod_base = OTHER; note = 2'-O-methyluridine-3'-phosphate
  modified_base 20: mod_base = OTHER; note = 2'-O-methyluridine-3'-phosphate
  modified_base 21: mod_base = OTHER; note = 2'-O-methyluridine-3'-phosphorothioate
  modified_base 22: mod_base = OTHER; note = 2'-O-methylguanosine-3'-phosphorothioate
  modified_base 23: mod_base = OTHER; note = 2'-O-methylcytidine-3'-phosphate
acatccagttgagggagttttgc

SEQ ID NO: 1021 - RNA, 23 nt, synthetic construct
  source 1..23: mol_type = other RNA
  modified_base 1: mod_base = OTHER; note = 2'-O-methyladenosine-3'-phosphorothioate
  modified_base 2: mod_base = OTHER; note = 2'-fluorocytidine-3'-phosphorothioate
  modified_base 3: mod_base = OTHER; note = 2'-O-methyluridine-3'-phosphate
  modified_base 4: mod_base = OTHER; note = 2'-O-methyluridine-3'-phosphate
  modified_base 5: mod_base = OTHER; note = 2'-O-methylcytidine-3'-phosphate
  modified_base 6: mod_base = OTHER; note = 2'-fluoroadenosine-3'-phosphate
  modified_base 7: mod_base = OTHER; note = 2'-O-methyluridine-3'-phosphate
  modified_base 8: mod_base = OTHER; note = 2'-fluorocytidine-3'-phosphate
  modified_base 9: mod_base = OTHER; note = 2'-fluorocytidine-3'-phosphate
  modified_base 10: mod_base = OTHER; note = 2'-O-methyladenosine-3'-phosphate
  modified_base 11: mod_base = OTHER; note = 2'-O-methylguanosine-3'-phosphate
  modified_base 12: mod_base = OTHER; note = 2'-O-methyluridine-3'-phosphate
  modified_base 13: mod_base = OTHER; note = 2'-O-methyluridine-3'-phosphate
  modified_base 14: mod_base = OTHER; note = 2'-fluoroguanosine-3'-phosphate
  modified_base 15: mod_base = OTHER; note = 2'-O-methyladenosine-3'-phosphate
  modified_base 16: mod_base = OTHER; note = 2'-fluoroguanosine-3'-phosphate
  modified_base 17: mod_base = OTHER; note = 2'-O-methylguanosine-3'-phosphate
  modified_base 18: mod_base = OTHER; note = 2'-O-methylguanosine-3'-phosphate
  modified_base 19: mod_base = OTHER; note = 2'-O-methyladenosine-3'-phosphate
  modified_base 20: mod_base = OTHER; note = 2'-O-methylguanosine-3'-phosphate
  modified_base 21: mod_base = OTHER; note = 2'-O-methyluridine-3'-phosphorothioate
  modified_base 22: mod_base = OTHER; note = 2'-O-methyluridine-3'-phosphorothioate
  modified_base 23: mod_base = OTHER; note = 2'-O-methyluridine-3'-phosphate
acttcatccagttgagggagttt

SEQ ID NO: 1022 - RNA, 23 nt, synthetic construct
  source 1..23: mol_type = other RNA
  modified_base 1: mod_base = OTHER; note = 2'-O-methyladenosine-3'-phosphorothioate
  modified_base 2: mod_base = OTHER; note = 2'-fluoroguanosine-3'-phosphorothioate
  modified_base 3: mod_base = OTHER; note = 2'-O-methyladenosine-3'-phosphate
  modified_base 4: mod_base = OTHER; note = 2'-O-methylguanosine-3'-phosphate
  modified_base 5: mod_base = OTHER; note = 2'-O-methyladenosine-3'-phosphate
  modified_base 6: mod_base = OTHER; note = 2'-fluorouridine-3'-phosphate
  modified_base 7: mod_base = OTHER; note = 2'-O-methyladenosine-3'-phosphate
  modified_base 8: mod_base = OTHER; note = 2'-fluoroguanosine-3'-phosphate
  modified_base 9: mod_base = OTHER; note = 2'-fluorouridine-3'-phosphate
  modified_base 10: mod_base = OTHER; note = 2'-O-methyluridine-3'-phosphate
  modified_base 11: mod_base = OTHER; note = 2'-O-methyluridine-3'-phosphate
  modified_base 12: mod_base = OTHER; note = 2'-O-methylcytidine-3'-phosphate
  modified_base 13: mod_base = OTHER; note = 2'-O-methyluridine-3'-phosphate
  modified_base 14: mod_base = OTHER; note = 2'-fluorouridine-3'-phosphate
  modified_base 15: mod_base = OTHER; note = 2'-O-methylcytidine-3'-phosphate
  modified_base 16: mod_base = OTHER; note = 2'-fluoroadenosine-3'-phosphate
  modified_base 17: mod_base = OTHER; note = 2'-O-methyluridine-3'-phosphate
  modified_base 18: mod_base = OTHER; note = 2'-O-methylcytidine-3'-phosphate
  modified_base 19: mod_base = OTHER; note = 2'-O-methylcytidine-3'-phosphate
  modified_base 20: mod_base = OTHER; note = 2'-O-methyladenosine-3'-phosphate
  modified_base 21: mod_base = OTHER; note = 2'-O-methylguanosine-3'-phosphorothioate
  modified_base 22: mod_base = OTHER; note = 2'-O-methyluridine-3'-phosphorothioate
  modified_base 23: mod_base = OTHER; note = 2'-O-methyluridine-3'-phosphate
agagatagtttcttcatccagtt

SEQ ID NO: 1023 - RNA, 23 nt, synthetic construct
  source 1..23: mol_type = other RNA
  modified_base 1: mod_base = OTHER; note = 2'-O-methyladenosine-3'-phosphorothioate
  modified_base 2: mod_base = OTHER; note = 2'-fluoroadenosine-3'-phosphorothioate
  modified_base 3: mod_base = OTHER; note = 2'-O-methyladenosine-3'-phosphate
  modified_base 4: mod_base = OTHER; note = 2'-O-methylguanosine-3'-phosphate
  modified_base 5: mod_base = OTHER; note = 2'-O-methyladenosine-3'-phosphate
  modified_base 6: mod_base = OTHER; note = 2'-fluorouridine-3'-phosphate
  modified_base 7: mod_base = OTHER; note = 2'-O-methylcytidine-3'-phosphate
  modified_base 8: mod_base = OTHER; note = 2'-fluorocytidine-3'-phosphate
  modified_base 9: mod_base = OTHER; note = 2'-fluorouridine-3'-phosphate
  modified_base 10: mod_base = OTHER; note = 2'-O-methyluridine-3'-phosphate
  modified_base 11: mod_base = OTHER; note = 2'-O-methylguanosine-3'-phosphate
  modified_base 12: mod_base = OTHER; note = 2'-O-methylcytidine-3'-phosphate
  modified_base 13: mod_base = OTHER; note = 2'-O-methyladenosine-3'-phosphate
  modified_base 14: mod_base = OTHER; note = 2'-fluoroguanosine-3'-phosphate
  modified_base 15: mod_base = OTHER; note = 2'-O-methylcytidine-3'-phosphate
  modified_base 16: mod_base = OTHER; note = 2'-fluoroadenosine-3'-phosphate
  modified_base 17: mod_base = OTHER; note = 2'-O-methylcytidine-3'-phosphate
  modified_base 18: mod_base = OTHER; note = 2'-O-methylcytidine-3'-phosphate
  modified_base 19: mod_base = OTHER; note = 2'-O-methyladenosine-3'-phosphate
  modified_base 20: mod_base = OTHER; note = 2'-O-methylguanosine-3'-phosphate
  modified_base 21: mod_base = OTHER; note = 2'-O-methyluridine-3'-phosphorothioate
  modified_base 22: mod_base = OTHER; note = 2'-O-methyluridine-3'-phosphorothioate
  modified_base 23: mod_base = OTHER; note = 2'-O-methylguanosine-3'-phosphate
aaagatccttgcagcaccagttg

SEQ ID NO: 1024 - RNA, 23 nt, synthetic construct
  source 1..23: mol_type = other RNA
  modified_base 1: mod_base = OTHER; note = 2'-O-methyladenosine-3'-phosphorothioate
  modified_base 2: mod_base = OTHER; note = 2'-fluorocytidine-3'-phosphorothioate
  modified_base 3: mod_base = OTHER; note = 2'-O-methyladenosine-3'-phosphate
  modified_base 4: mod_base = OTHER; note = 2'-O-methyluridine-3'-phosphate
  modified_base 5: mod_base = OTHER; note = 2'-O-methyladenosine-3'-phosphate
  modified_base 6: mod_base = OTHER; note = 2'-fluoroadenosine-3'-phosphate
  modified_base 7: mod_base = OTHER; note = 2'-O-methylguanosine-3'-phosphate
  modified_base 8: mod_base = OTHER; note = 2'-fluoroadenosine-3'-phosphate
  modified_base 9: mod_base = OTHER; note = 2'-fluorouridine-3'-phosphate
  modified_base 10: mod_base = OTHER; note = 2'-O-methylcytidine-3'-phosphate
  modified_base 11: mod_base = OTHER; note = 2'-O-methylcytidine-3'-phosphate
  modified_base 12: mod_base = OTHER; note = 2'-O-methyluridine-3'-phosphate
  modified_base 13: mod_base = OTHER; note = 2'-O-methyluridine-3'-phosphate
  modified_base 14: mod_base = OTHER; note = 2'-fluoroguanosine-3'-phosphate
  modified_base 15: mod_base = OTHER; note = 2'-O-methylcytidine-3'-phosphate
  modified_base 16: mod_base = OTHER; note = 2'-fluoroadenosine-3'-phosphate
  modified_base 17: mod_base = OTHER; note = 2'-O-methylguanosine-3'-phosphate
  modified_base 18: mod_base = OTHER; note = 2'-O-methylcytidine-3'-phosphate
  modified_base 19: mod_base = OTHER; note = 2'-O-methyladenosine-3'-phosphate
  modified_base 20: mod_base = OTHER; note = 2'-O-methylcytidine-3'-phosphate
  modified_base 21: mod_base = OTHER; note = 2'-O-methylcytidine-3'-phosphorothioate
  modified_base 22: mod_base = OTHER; note = 2'-O-methyladenosine-3'-phosphorothioate
  modified_base 23: mod_base = OTHER; note = 2'-O-methylguanosine-3'-phosphate
acataagatccttgcagcaccag

SEQ ID NO: 1025 - RNA, 23 nt, synthetic construct
  source 1..23: mol_type = other RNA
  modified_base 1: mod_base = OTHER; note = 2'-O-methyladenosine-3'-phosphorothioate
  modified_base 2: mod_base = OTHER; note = 2'-fluorouridine -3'-phosphorothioate
  modified_base 3: mod_base = OTHER; note = 2'-O-methylcytidine-3'-phosphate
  modified_base 4: mod_base = OTHER; note = 2'-O-methyladenosine-3'-phosphate
  modified_base 5: mod_base = OTHER; note = 2'-O-methyluridine-3'-phosphate
  modified_base 6: mod_base = OTHER; note = 2'-fluoroadenosine-3'-phosphate
  modified_base 7: mod_base = OTHER; note = 2'-O-methyladenosine-3'-phosphate
  modified_base 8: mod_base = OTHER; note = 2'-fluoroguanosine-3'-phosphate
  modified_base 9: mod_base = OTHER; note = 2'-fluoroadenosine-3'-phosphate
  modified_base 10: mod_base = OTHER; note = 2'-O-methyluridine-3'-phosphate
  modified_base 11: mod_base = OTHER; note = 2'-O-methylcytidine-3'-phosphate
  modified_base 12: mod_base = OTHER; note = 2'-O-methylcytidine-3'-phosphate
  modified_base 13: mod_base = OTHER; note = 2'-O-methyluridine-3'-phosphate
  modified_base 14: mod_base = OTHER; note = 2'-fluorouridine-3'-phosphate
  modified_base 15: mod_base = OTHER; note = 2'-O-methylguanosine-3'-phosphate
  modified_base 16: mod_base = OTHER; note = 2'-fluorocytidine-3'-phosphate
  modified_base 17: mod_base = OTHER; note = 2'-O-methyladenosine-3'-phosphate
  modified_base 18: mod_base = OTHER; note = 2'-O-methylguanosine-3'-phosphate
  modified_base 19: mod_base = OTHER; note = 2'-O-methylcytidine-3'-phosphate
  modified_base 20: mod_base = OTHER; note = 2'-O-methyladenosine-3'-phosphate
  modified_base 21: mod_base = OTHER; note = 2'-O-methylcytidine-3'-phosphorothioate
  modified_base 22: mod_base = OTHER; note = 2'-O-methylcytidine-3'-phosphorothioate
  modified_base 23: mod_base = OTHER; note = 2'-O-methyladenosine-3'-phosphate
atcataagatccttgcagcacca

SEQ ID NO: 1026 - RNA, 23 nt, synthetic construct
  source 1..23: mol_type = other RNA
  modified_base 1: mod_base = OTHER; note = 2'-O-methyladenosine-3'-phosphorothioate
  modified_base 2: mod_base = OTHER; note = 2'-fluoroguanosine-3'-phosphorothioate
  modified_base 3: mod_base = OTHER; note = 2'-O-methyluridine-3'-phosphate
  modified_base 4: mod_base = OTHER; note = 2'-O-methylcytidine-3'-phosphate
  modified_base 5: mod_base = OTHER; note = 2'-O-methyladenosine-3'-phosphate
  modified_base 6: mod_base = OTHER; note = 2'-fluorouridine-3'-phosphate
  modified_base 7: mod_base = OTHER; note = 2'-O-methyladenosine-3'-phosphate
  modified_base 8: mod_base = OTHER; note = 2'-fluoroadenosine-3'-phosphate
  modified_base 9: mod_base = OTHER; note = 2'-fluoroguanosine-3'-phosphate
  modified_base 10: mod_base = OTHER; note = 2'-O-methyladenosine-3'-phosphate
  modified_base 11: mod_base = OTHER; note = 2'-O-methyluridine-3'-phosphate
  modified_base 12: mod_base = OTHER; note = 2'-O-methylcytidine-3'-phosphate
  modified_base 13: mod_base = OTHER; note = 2'-O-methylcytidine-3'-phosphate
  modified_base 14: mod_base = OTHER; note = 2'-fluorouridine-3'-phosphate
  modified_base 15: mod_base = OTHER; note = 2'-O-methyluridine-3'-phosphate
  modified_base 16: mod_base = OTHER; note = 2'-fluoroguanosine-3'-phosphate
  modified_base 17: mod_base = OTHER; note = 2'-O-methylcytidine-3'-phosphate
  modified_base 18: mod_base = OTHER; note = 2'-O-methyladenosine-3'-phosphate
  modified_base 19: mod_base = OTHER; note = 2'-O-methylguanosine-3'-phosphate
  modified_base 20: mod_base = OTHER; note = 2'-O-methylcytidine-3'-phosphate
  modified_base 21: mod_base = OTHER; note = 2'-O-methyladenosine-3'-phosphorothioate
  modified_base 22: mod_base = OTHER; note = 2'-O-methylcytidine-3'-phosphorothioate
  modified_base 23: mod_base = OTHER; note = 2'-O-methylcytidine-3'-phosphate
agtcataagatccttgcagcacc

SEQ ID NO: 1027 - RNA, 23 nt, synthetic construct
  source 1..23: mol_type = other RNA
  modified_base 1: mod_base = OTHER; note = 2'-O-methyladenosine-3'-phosphorothioate
  modified_base 2: mod_base = OTHER; note = 2'-fluorocytidine-3'-phosphorothioate
  modified_base 3: mod_base = OTHER; note = 2'-O-methyladenosine-3'-phosphate
  modified_base 4: mod_base = OTHER; note = 2'-O-methylguanosine-3'-phosphate
  modified_base 5: mod_base = OTHER; note = 2'-O-methylguanosine-3'-phosphate
  modified_base 6: mod_base = OTHER; note = 2'-fluorouridine-3'-phosphate
  modified_base 7: mod_base = OTHER; note = 2'-O-methylcytidine-3'-phosphate
  modified_base 8: mod_base = OTHER; note = 2'-fluorocytidine-3'-phosphate
  modified_base 9: mod_base = OTHER; note = 2'-fluorouridine-3'-phosphate
  modified_base 10: mod_base = OTHER; note = 2'-O-methylguanosine-3'-phosphate
  modified_base 11: mod_base = OTHER; note = 2'-O-methylcytidine-3'-phosphate
  modified_base 12: mod_base = OTHER; note = 2'-O-methyladenosine-3'-phosphate
  modified_base 13: mod_base = OTHER; note = 2'-O-methylguanosine-3'-phosphate
  modified_base 14: mod_base = OTHER; note = 2'-fluoroguanosine-3'-phosphate
  modified_base 15: mod_base = OTHER; note = 2'-O-methyluridine-3'-phosphate
  modified_base 16: mod_base = OTHER; note = 2'-fluorocytidine-3'-phosphate
  modified_base 17: mod_base = OTHER; note = 2'-O-methyladenosine-3'-phosphate
  modified_base 18: mod_base = OTHER; note = 2'-O-methyluridine-3'-phosphate
  modified_base 19: mod_base = OTHER; note = 2'-O-methyladenosine-3'-phosphate
  modified_base 20: mod_base = OTHER; note = 2'-O-methyladenosine-3'-phosphate
  modified_base 21: mod_base = OTHER; note = 2'-O-methylguanosine-3'-phosphorothioate
  modified_base 22: mod_base = OTHER; note = 2'-O-methyladenosine-3'-phosphorothioate
  modified_base 23: mod_base = OTHER; note = 2'-O-methyluridine-3'-phosphate
acaggtcctgcaggtcataagat

SEQ ID NO: 1028 - RNA, 23 nt, synthetic construct
  source 1..23: mol_type = other RNA
  modified_base 1: mod_base = OTHER; note = 2'-O-methyladenosine-3'-phosphorothioate
  modified_base 2: mod_base = OTHER; note = 2'-fluoroadenosine-3'-phosphorothioate
  modified_base 3: mod_base = OTHER; note = 2'-O-methyluridine-3'-phosphate
  modified_base 4: mod_base = OTHER; note = 2'-O-methyluridine-3'-phosphate
  modified_base 5: mod_base = OTHER; note = 2'-O-methyluridine-3'-phosphate
  modified_base 6: mod_base = OTHER; note = 2'-fluorouridine-3'-phosphate
  modified_base 7: mod_base = OTHER; note = 2'-O-methyluridine-3'-phosphate
  modified_base 8: mod_base = OTHER; note = 2'-fluoroguanosine-3'-phosphate
  modified_base 9: mod_base = OTHER; note = 2'-fluorocytidine-3'-phosphate
  modified_base 10: mod_base = OTHER; note = 2'-O-methyladenosine-3'-phosphate
  modified_base 11: mod_base = OTHER; note = 2'-O-methylguanosine-3'-phosphate
  modified_base 12: mod_base = OTHER; note = 2'-O-methylguanosine-3'-phosphate
  modified_base 13: mod_base = OTHER; note = 2'-O-methyluridine-3'-phosphate
  modified_base 14: mod_base = OTHER; note = 2'-fluorouridine-3'-phosphate
  modified_base 15: mod_base = OTHER; note = 2'-O-methylcytidine-3'-phosphate
  modified_base 16: mod_base = OTHER; note = 2'-fluoroadenosine-3'-phosphate
  modified_base 17: mod_base = OTHER; note = 2'-O-methylguanosine-3'-phosphate
  modified_base 18: mod_base = OTHER; note = 2'-O-methylcytidine-3'-phosphate
  modified_base 19: mod_base = OTHER; note = 2'-O-methyluridine-3'-phosphate
  modified_base 20: mod_base = OTHER; note = 2'-O-methylcytidine-3'-phosphate
  modified_base 21: mod_base = OTHER; note = 2'-O-methylguanosine-3'-phosphorothioate
  modified_base 22: mod_base = OTHER; note = 2'-O-methylguanosine-3'-phosphorothioate
  modified_base 23: mod_base = OTHER; note = 2'-O-methyluridine-3'-phosphate
aatttttgcaggttcagctcggt

SEQ ID NO: 1029 - RNA, 23 nt, synthetic construct
  source 1..23: mol_type = other RNA
  modified_base 1: mod_base = OTHER; note = 2'-O-methyladenosine-3'-phosphorothioate
  modified_base 2: mod_base = OTHER; note = 2'-fluoroadenosine-3'-phosphorothioate
  modified_base 3: mod_base = OTHER; note = 2'-O-methyladenosine-3'-phosphate
  modified_base 4: mod_base = OTHER; note = 2'-O-methyluridine-3'-phosphate
  modified_base 5: mod_base = OTHER; note = 2'-O-methyluridine-3'-phosphate
  modified_base 6: mod_base = OTHER; note = 2'-fluorouridine-3'-phosphate
  modified_base 7: mod_base = OTHER; note = 2'-O-methyluridine-3'-phosphate
  modified_base 8: mod_base = OTHER; note = 2'-fluorouridine-3'-phosphate
  modified_base 9: mod_base = OTHER; note = 2'-fluoroguanosine-3'-phosphate
  modified_base 10: mod_base = OTHER; note = 2'-O-methylcytidine-3'-phosphate
  modified_base 11: mod_base = OTHER; note = 2'-O-methyladenosine-3'-phosphate
  modified_base 12: mod_base = OTHER; note = 2'-O-methylguanosine-3'-phosphate
  modified_base 13: mod_base = OTHER; note = 2'-O-methylguanosine-3'-phosphate
  modified_base 14: mod_base = OTHER; note = 2'-fluorouridine-3'-phosphate
  modified_base 15: mod_base = OTHER; note = 2'-O-methyluridine-3'-phosphate
  modified_base 16: mod_base = OTHER; note = 2'-fluorocytidine-3'-phosphate
  modified_base 17: mod_base = OTHER; note = 2'-O-methyladenosine-3'-phosphate
  modified_base 18: mod_base = OTHER; note = 2'-O-methylguanosine-3'-phosphate
  modified_base 19: mod_base = OTHER; note = 2'-O-methylcytidine-3'-phosphate
  modified_base 20: mod_base = OTHER; note = 2'-O-methyluridine-3'-phosphate
  modified_base 21: mod_base = OTHER; note = 2'-O-methylcytidine-3'-phosphorothioate
  modified_base 22: mod_base = OTHER; note = 2'-O-methylguanosine-3'-phosphorothioate
  modified_base 23: mod_base = OTHER; note = 2'-O-methylguanosine-3'-phosphate
aaatttttgcaggttcagctcgg

SEQ ID NO: 1030 - RNA, 23 nt, synthetic construct
  source 1..23: mol_type = other RNA
  modified_base 1: mod_base = OTHER; note = 2'-O-methyladenosine-3'-phosphorothioate
  modified_base 2: mod_base = OTHER; note = 2'-fluorocytidine-3'-phosphorothioate
  modified_base 3: mod_base = OTHER; note = 2'-O-methyladenosine-3'-phosphate
  modified_base 4: mod_base = OTHER; note = 2'-O-methyladenosine-3'-phosphate
  modified_base 5: mod_base = OTHER; note = 2'-O-methyluridine-3'-phosphate
  modified_base 6: mod_base = OTHER; note = 2'-fluorouridine-3'-phosphate
  modified_base 7: mod_base = OTHER; note = 2'-O-methyluridine-3'-phosphate
  modified_base 8: mod_base = OTHER; note = 2'-fluorouridine-3'-phosphate
  modified_base 9: mod_base = OTHER; note = 2'-fluorouridine-3'-phosphate
  modified_base 10: mod_base = OTHER; note = 2'-O-methylguanosine-3'-phosphate
  modified_base 11: mod_base = OTHER; note = 2'-O-methylcytidine-3'-phosphate
  modified_base 12: mod_base = OTHER; note = 2'-O-methyladenosine-3'-phosphate
  modified_base 13: mod_base = OTHER; note = 2'-O-methylguanosine-3'-phosphate
  modified_base 14: mod_base = OTHER; note = 2'-fluoroguanosine-3'-phosphate
  modified_base 15: mod_base = OTHER; note = 2'-O-methyluridine-3'-phosphate
  modified_base 16: mod_base = OTHER; note = 2'-fluorouridine-3'-phosphate
  modified_base 17: mod_base = OTHER; note = 2'-O-methylcytidine-3'-phosphate
  modified_base 18: mod_base = OTHER; note = 2'-O-methyladenosine-3'-phosphate
  modified_base 19: mod_base = OTHER; note = 2'-O-methylguanosine-3'-phosphate
  modified_base 20: mod_base = OTHER; note = 2'-O-methylcytidine-3'-phosphate
  modified_base 21: mod_base = OTHER; note = 2'-O-methyluridine-3'-phosphorothioate
  modified_base 22: mod_base = OTHER; note = 2'-O-methylcytidine-3'-phosphorothioate
  modified_base 23: mod_base = OTHER; note = 2'-O-methylguanosine-3'-phosphate
acaatttttgcaggttcagctcg

SEQ ID NO: 1031 - RNA, 23 nt, synthetic construct
  source 1..23: mol_type = other RNA
  modified_base 1: mod_base = OTHER; note = 2'-O-methyladenosine-3'-phosphorothioate
  modified_base 2: mod_base = OTHER; note = 2'-fluorouridine -3'-phosphorothioate
  modified_base 3: mod_base = OTHER; note = 2'-O-methylcytidine-3'-phosphate
  modified_base 4: mod_base = OTHER; note = 2'-O-methyladenosine-3'-phosphate
  modified_base 5: mod_base = OTHER; note = 2'-O-methyladenosine-3'-phosphate
  modified_base 6: mod_base = OTHER; note = 2'-fluorouridine-3'-phosphate
  modified_base 7: mod_base = OTHER; note = 2'-O-methyluridine-3'-phosphate
  modified_base 8: mod_base = OTHER; note = 2'-fluorouridine-3'-phosphate
  modified_base 9: mod_base = OTHER; note = 2'-fluorouridine-3'-phosphate
  modified_base 10: mod_base = OTHER; note = 2'-O-methyluridine-3'-phosphate
  modified_base 11: mod_base = OTHER; note = 2'-O-methylguanosine-3'-phosphate
  modified_base 12: mod_base = OTHER; note = 2'-O-methylcytidine-3'-phosphate
  modified_base 13: mod_base = OTHER; note = 2'-O-methyladenosine-3'-phosphate
  modified_base 14: mod_base = OTHER; note = 2'-fluoroguanosine-3'-phosphate
  modified_base 15: mod_base = OTHER; note = 2'-O-methylguanosine-3'-phosphate
  modified_base 16: mod_base = OTHER; note = 2'-fluorouridine-3'-phosphate
  modified_base 17: mod_base = OTHER; note = 2'-O-methyluridine-3'-phosphate
  modified_base 18: mod_base = OTHER; note = 2'-O-methylcytidine-3'-phosphate
  modified_base 19: mod_base = OTHER; note = 2'-O-methyladenosine-3'-phosphate
  modified_base 20: mod_base = OTHER; note = 2'-O-methylguanosine-3'-phosphate
  modified_base 21: mod_base = OTHER; note = 2'-O-methylcytidine-3'-phosphorothioate
  modified_base 22: mod_base = OTHER; note = 2'-O-methyluridine-3'-phosphorothioate
  modified_base 23: mod_base = OTHER; note = 2'-O-methylcytidine-3'-phosphate
atcaatttttgcaggttcagctc

SEQ ID NO: 1032 - RNA, 23 nt, synthetic construct
  source 1..23: mol_type = other RNA
  modified_base 1: mod_base = OTHER; note = 2'-O-methyladenosine-3'-phosphorothioate
  modified_base 2: mod_base = OTHER; note = 2'-fluorocytidine-3'-phosphorothioate
  modified_base 3: mod_base = OTHER; note = 2'-O-methyluridine-3'-phosphate
  modified_base 4: mod_base = OTHER; note = 2'-O-methylcytidine-3'-phosphate
  modified_base 5: mod_base = OTHER; note = 2'-O-methyladenosine-3'-phosphate
  modified_base 6: mod_base = OTHER; note = 2'-fluoroadenosine-3'-phosphate
  modified_base 7: mod_base = OTHER; note = 2'-O-methyluridine-3'-phosphate
  modified_base 8: mod_base = OTHER; note = 2'-fluorouridine-3'-phosphate
  modified_base 9: mod_base = OTHER; note = 2'-fluorouridine-3'-phosphate
  modified_base 10: mod_base = OTHER; note = 2'-O-methyluridine-3'-phosphate
  modified_base 11: mod_base = OTHER; note = 2'-O-methyluridine-3'-phosphate
  modified_base 12: mod_base = OTHER; note = 2'-O-methylguanosine-3'-phosphate
  modified_base 13: mod_base = OTHER; note = 2'-O-methylcytidine-3'-phosphate
  modified_base 14: mod_base = OTHER; note = 2'-fluoroadenosine-3'-phosphate
  modified_base 15: mod_base = OTHER; note = 2'-O-methylguanosine-3'-phosphate
  modified_base 16: mod_base = OTHER; note = 2'-fluoroguanosine-3'-phosphate
  modified_base 17: mod_base = OTHER; note = 2'-O-methyluridine-3'-phosphate
  modified_base 18: mod_base = OTHER; note = 2'-O-methyluridine-3'-phosphate
  modified_base 19: mod_base = OTHER; note = 2'-O-methylcytidine-3'-phosphate
  modified_base 20: mod_base = OTHER; note = 2'-O-methyladenosine-3'-phosphate
  modified_base 21: mod_base = OTHER; note = 2'-O-methylguanosine-3'-phosphorothioate
  modified_base 22: mod_base = OTHER; note = 2'-O-methylcytidine-3'-phosphorothioate
  modified_base 23: mod_base = OTHER; note = 2'-O-methyluridine-3'-phosphate
actcaatttttgcaggttcagct

SEQ ID NO: 1033 - RNA, 23 nt, synthetic construct
  source 1..23: mol_type = other RNA
  modified_base 1: mod_base = OTHER; note = 2'-O-methyladenosine-3'-phosphorothioate
  modified_base 2: mod_base = OTHER; note = 2'-fluoroguanosine-3'-phosphorothioate
  modified_base 3: mod_base = OTHER; note = 2'-O-methylcytidine-3'-phosphate
  modified_base 4: mod_base = OTHER; note = 2'-O-methyluridine-3'-phosphate
  modified_base 5: mod_base = OTHER; note = 2'-O-methylcytidine-3'-phosphate
  modified_base 6: mod_base = OTHER; note = 2'-fluoroadenosine-3'-phosphate
  modified_base 7: mod_base = OTHER; note = 2'-O-methyladenosine-3'-phosphate
  modified_base 8: mod_base = OTHER; note = 2'-fluorouridine-3'-phosphate
  modified_base 9: mod_base = OTHER; note = 2'-fluorouridine-3'-phosphate
  modified_base 10: mod_base = OTHER; note = 2'-O-methyluridine-3'-phosphate
  modified_base 11: mod_base = OTHER; note = 2'-O-methyluridine-3'-phosphate
  modified_base 12: mod_base = OTHER; note = 2'-O-methyluridine-3'-phosphate
  modified_base 13: mod_base = OTHER; note = 2'-O-methylguanosine-3'-phosphate
  modified_base 14: mod_base = OTHER; note = 2'-fluorocytidine-3'-phosphate
  modified_base 15: mod_base = OTHER; note = 2'-O-methyladenosine-3'-phosphate
  modified_base 16: mod_base = OTHER; note = 2'-fluoroguanosine-3'-phosphate
  modified_base 17: mod_base = OTHER; note = 2'-O-methylguanosine-3'-phosphate
  modified_base 18: mod_base = OTHER; note = 2'-O-methyluridine-3'-phosphate
  modified_base 19: mod_base = OTHER; note = 2'-O-methyluridine-3'-phosphate
  modified_base 20: mod_base = OTHER; note = 2'-O-methylcytidine-3'-phosphate
  modified_base 21: mod_base = OTHER; note = 2'-O-methyladenosine-3'-phosphorothioate
  modified_base 22: mod_base = OTHER; note = 2'-O-methylguanosine-3'-phosphorothioate
  modified_base 23: mod_base = OTHER; note = 2'-O-methylcytidine-3'-phosphate
agctcaatttttgcaggttcagc

SEQ ID NO: 1034 - RNA, 23 nt, synthetic construct
  source 1..23: mol_type = other RNA
  modified_base 1: mod_base = OTHER; note = 2'-O-methyladenosine-3'-phosphorothioate
  modified_base 2: mod_base = OTHER; note = 2'-fluoroguanosine-3'-phosphorothioate
  modified_base 3: mod_base = OTHER; note = 2'-O-methyluridine-3'-phosphate
  modified_base 4: mod_base = OTHER; note = 2'-O-methylcytidine-3'-phosphate
  modified_base 5: mod_base = OTHER; note = 2'-O-methyladenosine-3'-phosphate
  modified_base 6: mod_base = OTHER; note = 2'-fluorouridine-3'-phosphate
  modified_base 7: mod_base = OTHER; note = 2'-O-methyluridine-3'-phosphate
  modified_base 8: mod_base = OTHER; note = 2'-fluoroguanosine-3'-phosphate
  modified_base 9: mod_base = OTHER; note = 2'-fluorocytidine-3'-phosphate
  modified_base 10: mod_base = OTHER; note = 2'-O-methyluridine-3'-phosphate
  modified_base 11: mod_base = OTHER; note = 2'-O-methylcytidine-3'-phosphate
  modified_base 12: mod_base = OTHER; note = 2'-O-methyladenosine-3'-phosphate
  modified_base 13: mod_base = OTHER; note = 2'-O-methyladenosine-3'-phosphate
  modified_base 14: mod_base = OTHER; note = 2'-fluorouridine-3'-phosphate
  modified_base 15: mod_base = OTHER; note = 2'-O-methyluridine-3'-phosphate
  modified_base 16: mod_base = OTHER; note = 2'-fluorouridine-3'-phosphate
  modified_base 17: mod_base = OTHER; note = 2'-O-methyluridine-3'-phosphate
  modified_base 18: mod_base = OTHER; note = 2'-O-methyluridine-3'-phosphate
  modified_base 19: mod_base = OTHER; note = 2'-O-methylguanosine-3'-phosphate
  modified_base 20: mod_base = OTHER; note = 2'-O-methylcytidine-3'-phosphate
  modified_base 21: mod_base = OTHER; note = 2'-O-methyladenosine-3'-phosphorothioate
  modified_base 22: mod_base = OTHER; note = 2'-O-methylguanosine-3'-phosphorothioate
  modified_base 23: mod_base = OTHER; note = 2'-O-methylguanosine-3'-phosphate
agtcattgctcaatttttgcagg

SEQ ID NO: 1035 - RNA, 23 nt, synthetic construct
  source 1..23: mol_type = other RNA
  modified_base 1: mod_base = OTHER; note = 2'-O-methyladenosine-3'-phosphorothioate
  modified_base 2: mod_base = OTHER; note = 2'-fluorocytidine-3'-phosphorothioate
  modified_base 3: mod_base = OTHER; note = 2'-O-methylguanosine-3'-phosphate
  modified_base 4: mod_base = OTHER; note = 2'-O-methylguanosine-3'-phosphate
  modified_base 5: mod_base = OTHER; note = 2'-O-methyluridine-3'-phosphate
  modified_base 6: mod_base = OTHER; note = 2'-fluorocytidine-3'-phosphate
  modified_base 7: mod_base = OTHER; note = 2'-O-methyladenosine-3'-phosphate
  modified_base 8: mod_base = OTHER; note = 2'-fluorouridine-3'-phosphate
  modified_base 9: mod_base = OTHER; note = 2'-fluorouridine-3'-phosphate
  modified_base 10: mod_base = OTHER; note = 2'-O-methylguanosine-3'-phosphate
  modified_base 11: mod_base = OTHER; note = 2'-O-methylcytidine-3'-phosphate
  modified_base 12: mod_base = OTHER; note = 2'-O-methyluridine-3'-phosphate
  modified_base 13: mod_base = OTHER; note = 2'-O-methylcytidine-3'-phosphate
  modified_base 14: mod_base = OTHER; note = 2'-fluoroadenosine-3'-phosphate
  modified_base 15: mod_base = OTHER; note = 2'-O-methyladenosine-3'-phosphate
  modified_base 16: mod_base = OTHER; note = 2'-fluorouridine-3'-phosphate
  modified_base 17: mod_base = OTHER; note = 2'-O-methyluridine-3'-phosphate
  modified_base 18: mod_base = OTHER; note = 2'-O-methyluridine-3'-phosphate
  modified_base 19: mod_base = OTHER; note = 2'-O-methyluridine-3'-phosphate
  modified_base 20: mod_base = OTHER; note = 2'-O-methyluridine-3'-phosphate
  modified_base 21: mod_base = OTHER; note = 2'-O-methylguanosine-3'-phosphorothioate
  modified_base 22: mod_base = OTHER; note = 2'-O-methylcytidine-3'-phosphorothioate
  modified_base 23: mod_base = OTHER; note = 2'-O-methyladenosine-3'-phosphate
acggtcattgctcaatttttgca

SEQ ID NO: 1036 - RNA, 23 nt, synthetic construct
  source 1..23: mol_type = other RNA
  modified_base 1: mod_base = OTHER; note = 2'-O-methyladenosine-3'-phosphorothioate
  modified_base 2: mod_base = OTHER; note = 2'-fluorocytidine-3'-phosphorothioate
  modified_base 3: mod_base = OTHER; note = 2'-O-methyluridine-3'-phosphate
  modified_base 4: mod_base = OTHER; note = 2'-O-methylguanosine-3'-phosphate
  modified_base 5: mod_base = OTHER; note = 2'-O-methyladenosine-3'-phosphate
  modified_base 6: mod_base = OTHER; note = 2'-fluorouridine-3'-phosphate
  modified_base 7: mod_base = OTHER; note = 2'-O-methylguanosine-3'-phosphate
  modified_base 8: mod_base = OTHER; note = 2'-fluorocytidine-3'-phosphate
  modified_base 9: mod_base = OTHER; note = 2'-fluoroguanosine-3'-phosphate
  modified_base 10: mod_base = OTHER; note = 2'-O-methylguanosine-3'-phosphate
  modified_base 11: mod_base = OTHER; note = 2'-O-methyluridine-3'-phosphate
  modified_base 12: mod_base = OTHER; note = 2'-O-methylcytidine-3'-phosphate
  modified_base 13: mod_base = OTHER; note = 2'-O-methyladenosine-3'-phosphate
  modified_base 14: mod_base = OTHER; note = 2'-fluorouridine-3'-phosphate
  modified_base 15: mod_base = OTHER; note = 2'-O-methyluridine-3'-phosphate
  modified_base 16: mod_base = OTHER; note = 2'-fluoroguanosine-3'-phosphate
  modified_base 17: mod_base = OTHER; note = 2'-O-methylcytidine-3'-phosphate
  modified_base 18: mod_base = OTHER; note = 2'-O-methyluridine-3'-phosphate
  modified_base 19: mod_base = OTHER; note = 2'-O-methylcytidine-3'-phosphate
  modified_base 20: mod_base = OTHER; note = 2'-O-methyladenosine-3'-phosphate
  modified_base 21: mod_base = OTHER; note = 2'-O-methyladenosine-3'-phosphorothioate
  modified_base 22: mod_base = OTHER; note = 2'-O-methyluridine-3'-phosphorothioate
  modified_base 23: mod_base = OTHER; note = 2'-O-methyluridine-3'-phosphate
actgatgcggtcattgctcaatt

SEQ ID NO: 1037 - RNA, 23 nt, synthetic construct
  source 1..23: mol_type = other RNA
  modified_base 1: mod_base = OTHER; note = 2'-O-methyladenosine-3'-phosphorothioate
  modified_base 2: mod_base = OTHER; note = 2'-fluorocytidine-3'-phosphorothioate
  modified_base 3: mod_base = OTHER; note = 2'-O-methylcytidine-3'-phosphate
  modified_base 4: mod_base = OTHER; note = 2'-O-methyluridine-3'-phosphate
  modified_base 5: mod_base = OTHER; note = 2'-O-methylguanosine-3'-phosphate
  modified_base 6: mod_base = OTHER; note = 2'-fluoroadenosine-3'-phosphate
  modified_base 7: mod_base = OTHER; note = 2'-O-methyluridine-3'-phosphate
  modified_base 8: mod_base = OTHER; note = 2'-fluoroguanosine-3'-phosphate
  modified_base 9: mod_base = OTHER; note = 2'-fluorocytidine-3'-phosphate
  modified_base 10: mod_base = OTHER; note = 2'-O-methylguanosine-3'-phosphate
  modified_base 11: mod_base = OTHER; note = 2'-O-methylguanosine-3'-phosphate
  modified_base 12: mod_base = OTHER; note = 2'-O-methyluridine-3'-phosphate
  modified_base 13: mod_base = OTHER; note = 2'-O-methylcytidine-3'-phosphate
  modified_base 14: mod_base = OTHER; note = 2'-fluoroadenosine-3'-phosphate
  modified_base 15: mod_base = OTHER; note = 2'-O-methyluridine-3'-phosphate
  modified_base 16: mod_base = OTHER; note = 2'-fluorouridine-3'-phosphate
  modified_base 17: mod_base = OTHER; note = 2'-O-methylguanosine-3'-phosphate
  modified_base 18: mod_base = OTHER; note = 2'-O-methylcytidine-3'-phosphate
  modified_base 19: mod_base = OTHER; note = 2'-O-methyluridine-3'-phosphate
  modified_base 20: mod_base = OTHER; note = 2'-O-methylcytidine-3'-phosphate
  modified_base 21: mod_base = OTHER; note = 2'-O-methyladenosine-3'-phosphorothioate
  modified_base 22: mod_base = OTHER; note = 2'-O-methyladenosine-3'-phosphorothioate
  modified_base 23: mod_base = OTHER; note = 2'-O-methyluridine-3'-phosphate
acctgatgcggtcattgctcaat

SEQ ID NO: 1038 - RNA, 23 nt, synthetic construct
  source 1..23: mol_type = other RNA
  modified_base 1: mod_base = OTHER; note = 2'-O-methyladenosine-3'-phosphorothioate
  modified_base 2: mod_base = OTHER; note = 2'-fluoroadenosine-3'-phosphorothioate
  modified_base 3: mod_base = OTHER; note = 2'-O-methylcytidine-3'-phosphate
  modified_base 4: mod_base = OTHER; note = 2'-O-methylcytidine-3'-phosphate
  modified_base 5: mod_base = OTHER; note = 2'-O-methylcytidine-3'-phosphate
  modified_base 6: mod_base = OTHER; note = 2'-fluorouridine-3'-phosphate
  modified_base 7: mod_base = OTHER; note = 2'-O-methylguanosine-3'-phosphate
  modified_base 8: mod_base = OTHER; note = 2'-fluoroadenosine-3'-phosphate
  modified_base 9: mod_base = OTHER; note = 2'-fluorouridine-3'-phosphate
  modified_base 10: mod_base = OTHER; note = 2'-O-methylguanosine-3'-phosphate
  modified_base 11: mod_base = OTHER; note = 2'-O-methylcytidine-3'-phosphate
  modified_base 12: mod_base = OTHER; note = 2'-O-methylguanosine-3'-phosphate
  modified_base 13: mod_base = OTHER; note = 2'-O-methylguanosine-3'-phosphate
  modified_base 14: mod_base = OTHER; note = 2'-fluorouridine-3'-phosphate
  modified_base 15: mod_base = OTHER; note = 2'-O-methylcytidine-3'-phosphate
  modified_base 16: mod_base = OTHER; note = 2'-fluoroadenosine-3'-phosphate
  modified_base 17: mod_base = OTHER; note = 2'-O-methyluridine-3'-phosphate
  modified_base 18: mod_base = OTHER; note = 2'-O-methyluridine-3'-phosphate
  modified_base 19: mod_base = OTHER; note = 2'-O-methylguanosine-3'-phosphate
  modified_base 20: mod_base = OTHER; note = 2'-O-methylcytidine-3'-phosphate
  modified_base 21: mod_base = OTHER; note = 2'-O-methyluridine-3'-phosphorothioate
  modified_base 22: mod_base = OTHER; note = 2'-O-methylcytidine-3'-phosphorothioate
  modified_base 23: mod_base = OTHER; note = 2'-O-methyladenosine-3'-phosphate
aaccctgatgcggtcattgctca

SEQ ID NO: 1039 - RNA, 23 nt, synthetic construct
  source 1..23: mol_type = other RNA
  modified_base 1: mod_base = OTHER; note = 2'-O-methyladenosine-3'-phosphorothioate
  modified_base 2: mod_base = OTHER; note = 2'-fluoroadenosine-3'-phosphorothioate
  modified_base 3: mod_base = OTHER; note = 2'-O-methyladenosine-3'-phosphate
  modified_base 4: mod_base = OTHER; note = 2'-O-methyladenosine-3'-phosphate
  modified_base 5: mod_base = OTHER; note = 2'-O-methyladenosine-3'-phosphate
  modified_base 6: mod_base = OTHER; note = 2'-fluorouridine-3'-phosphate
  modified_base 7: mod_base = OTHER; note = 2'-O-methylguanosine-3'-phosphate
  modified_base 8: mod_base = OTHER; note = 2'-fluorocytidine-3'-phosphate
  modified_base 9: mod_base = OTHER; note = 2'-fluorouridine-3'-phosphate
  modified_base 10: mod_base = OTHER; note = 2'-O-methylguanosine-3'-phosphate
  modified_base 11: mod_base = OTHER; note = 2'-O-methyluridine-3'-phosphate
  modified_base 12: mod_base = OTHER; note = 2'-O-methyluridine-3'-phosphate
  modified_base 13: mod_base = OTHER; note = 2'-O-methylcytidine-3'-phosphate
  modified_base 14: mod_base = OTHER; note = 2'-fluoroadenosine-3'-phosphate
  modified_base 15: mod_base = OTHER; note = 2'-O-methylguanosine-3'-phosphate
  modified_base 16: mod_base = OTHER; note = 2'-fluorocytidine-3'-phosphate
  modified_base 17: mod_base = OTHER; note = 2'-O-methyladenosine-3'-phosphate
  modified_base 18: mod_base = OTHER; note = 2'-O-methylcytidine-3'-phosphate
  modified_base 19: mod_base = OTHER; note = 2'-O-methylcytidine-3'-phosphate
  modified_base 20: mod_base = OTHER; note = 2'-O-methyluridine-3'-phosphate
  modified_base 21: mod_base = OTHER; note = 2'-O-methylcytidine-3'-phosphorothioate
  modified_base 22: mod_base = OTHER; note = 2'-O-methylcytidine-3'-phosphorothioate
  modified_base 23: mod_base = OTHER; note = 2'-O-methylcytidine-3'-phosphate
aaaaatgctgttcagcacctccc

SEQ ID NO: 1040 - RNA, 23 nt, synthetic construct
  source 1..23: mol_type = other RNA
  modified_base 1: mod_base = OTHER; note = 2'-O-methyladenosine-3'-phosphorothioate
  modified_base 2: mod_base = OTHER; note = 2'-fluorocytidine-3'-phosphorothioate
  modified_base 3: mod_base = OTHER; note = 2'-O-methyluridine-3'-phosphate
  modified_base 4: mod_base = OTHER; note = 2'-O-methylcytidine-3'-phosphate
  modified_base 5: mod_base = OTHER; note = 2'-O-methyladenosine-3'-phosphate
  modified_base 6: mod_base = OTHER; note = 2'-fluorouridine-3'-phosphate
  modified_base 7: mod_base = OTHER; note = 2'-O-methylcytidine-3'-phosphate
  modified_base 8: mod_base = OTHER; note = 2'-fluorocytidine-3'-phosphate
  modified_base 9: mod_base = OTHER; note = 2'-fluoroguanosine-3'-phosphate
  modified_base 10: mod_base = OTHER; note = 2'-O-methylcytidine-3'-phosphate
  modified_base 11: mod_base = OTHER; note = 2'-O-methyluridine-3'-phosphate
  modified_base 12: mod_base = OTHER; note = 2'-O-methyluridine-3'-phosphate
  modified_base 13: mod_base = OTHER; note = 2'-O-methylcytidine-3'-phosphate
  modified_base 14: mod_base = OTHER; note = 2'-fluoroadenosine-3'-phosphate
  modified_base 15: mod_base = OTHER; note = 2'-O-methyladenosine-3'-phosphate
  modified_base 16: mod_base = OTHER; note = 2'-fluoroguanosine-3'-phosphate
  modified_base 17: mod_base = OTHER; note = 2'-O-methylcytidine-3'-phosphate
  modified_base 18: mod_base = OTHER; note = 2'-O-methyluridine-3'-phosphate
  modified_base 19: mod_base = OTHER; note = 2'-O-methylcytidine-3'-phosphate
  modified_base 20: mod_base = OTHER; note = 2'-O-methyladenosine-3'-phosphate
  modified_base 21: mod_base = OTHER; note = 2'-O-methyladenosine-3'-phosphorothioate
  modified_base 22: mod_base = OTHER; note = 2'-O-methyladenosine-3'-phosphorothioate
  modified_base 23: mod_base = OTHER; note = 2'-O-methyladenosine-3'-phosphate
actcatccgcttcaagctcaaaa

SEQ ID NO: 1041 - RNA, 23 nt, synthetic construct
  source 1..23: mol_type = other RNA
  modified_base 1: mod_base = OTHER; note = 2'-O-methyladenosine-3'-phosphorothioate
  modified_base 2: mod_base = OTHER; note = 2'-fluorouridine -3'-phosphorothioate
  modified_base 3: mod_base = OTHER; note = 2'-O-methylguanosine-3'-phosphate
  modified_base 4: mod_base = OTHER; note = 2'-O-methyluridine-3'-phosphate
  modified_base 5: mod_base = OTHER; note = 2'-O-methyluridine-3'-phosphate
  modified_base 6: mod_base = OTHER; note = 2'-fluoroadenosine-3'-phosphate
  modified_base 7: mod_base = OTHER; note = 2'-O-methyladenosine-3'-phosphate
  modified_base 8: mod_base = OTHER; note = 2'-fluoroguanosine-3'-phosphate
  modified_base 9: mod_base = OTHER; note = 2'-fluorocytidine-3'-phosphate
  modified_base 10: mod_base = OTHER; note = 2'-O-methyluridine-3'-phosphate
  modified_base 11: mod_base = OTHER; note = 2'-O-methylguanosine-3'-phosphate
  modified_base 12: mod_base = OTHER; note = 2'-O-methyluridine-3'-phosphate
  modified_base 13: mod_base = OTHER; note = 2'-O-methyluridine-3'-phosphate
  modified_base 14: mod_base = OTHER; note = 2'-fluoroguanosine-3'-phosphate
  modified_base 15: mod_base = OTHER; note = 2'-O-methylguanosine-3'-phosphate
  modified_base 16: mod_base = OTHER; note = 2'-fluoroguanosine-3'-phosphate
  modified_base 17: mod_base = OTHER; note = 2'-O-methyluridine-3'-phosphate
  modified_base 18: mod_base = OTHER; note = 2'-O-methyladenosine-3'-phosphate
  modified_base 19: mod_base = OTHER; note = 2'-O-methylguanosine-3'-phosphate
  modified_base 20: mod_base = OTHER; note = 2'-O-methyladenosine-3'-phosphate
  modified_base 21: mod_base = OTHER; note = 2'-O-methylcytidine-3'-phosphorothioate
  modified_base 22: mod_base = OTHER; note = 2'-O-methyluridine-3'-phosphorothioate
  modified_base 23: mod_base = OTHER; note = 2'-O-methylcytidine-3'-phosphate
atgttaagctgttgggtagactc

SEQ ID NO: 1042 - RNA, 23 nt, synthetic construct
  source 1..23: mol_type = other RNA
  modified_base 1: mod_base = OTHER; note = 2'-O-methyladenosine-3'-phosphorothioate
  modified_base 2: mod_base = OTHER; note = 2'-fluorouridine -3'-phosphorothioate
  modified_base 3: mod_base = OTHER; note = 2'-O-methyluridine-3'-phosphate
  modified_base 4: mod_base = OTHER; note = 2'-O-methylguanosine-3'-phosphate
  modified_base 5: mod_base = OTHER; note = 2'-O-methyluridine-3'-phosphate
  modified_base 6: mod_base = OTHER; note = 2'-fluorouridine-3'-phosphate
  modified_base 7: mod_base = OTHER; note = 2'-O-methyladenosine-3'-phosphate
  modified_base 8: mod_base = OTHER; note = 2'-fluoroadenosine-3'-phosphate
  modified_base 9: mod_base = OTHER; note = 2'-fluoroguanosine-3'-phosphate
  modified_base 10: mod_base = OTHER; note = 2'-O-methylcytidine-3'-phosphate
  modified_base 11: mod_base = OTHER; note = 2'-O-methyluridine-3'-phosphate
  modified_base 12: mod_base = OTHER; note = 2'-O-methylguanosine-3'-phosphate
  modified_base 13: mod_base = OTHER; note = 2'-O-methyluridine-3'-phosphate
  modified_base 14: mod_base = OTHER; note = 2'-fluorouridine-3'-phosphate
  modified_base 15: mod_base = OTHER; note = 2'-O-methylguanosine-3'-phosphate
  modified_base 16: mod_base = OTHER; note = 2'-fluoroguanosine-3'-phosphate
  modified_base 17: mod_base = OTHER; note = 2'-O-methylguanosine-3'-phosphate
  modified_base 18: mod_base = OTHER; note = 2'-O-methyluridine-3'-phosphate
  modified_base 19: mod_base = OTHER; note = 2'-O-methyladenosine-3'-phosphate
  modified_base 20: mod_base = OTHER; note = 2'-O-methylguanosine-3'-phosphate
  modified_base 21: mod_base = OTHER; note = 2'-O-methyladenosine-3'-phosphorothioate
  modified_base 22: mod_base = OTHER; note = 2'-O-methylcytidine-3'-phosphorothioate
  modified_base 23: mod_base = OTHER; note = 2'-O-methyluridine-3'-phosphate
attgttaagctgttgggtagact

SEQ ID NO: 1043 - RNA, 23 nt, synthetic construct
  source 1..23: mol_type = other RNA
  modified_base 1: mod_base = OTHER; note = 2'-O-methyladenosine-3'-phosphorothioate
  modified_base 2: mod_base = OTHER; note = 2'-fluorocytidine-3'-phosphorothioate
  modified_base 3: mod_base = OTHER; note = 2'-O-methyluridine-3'-phosphate
  modified_base 4: mod_base = OTHER; note = 2'-O-methyluridine-3'-phosphate
  modified_base 5: mod_base = OTHER; note = 2'-O-methylguanosine-3'-phosphate
  modified_base 6: mod_base = OTHER; note = 2'-fluorouridine-3'-phosphate
  modified_base 7: mod_base = OTHER; note = 2'-O-methyluridine-3'-phosphate
  modified_base 8: mod_base = OTHER; note = 2'-fluoroadenosine-3'-phosphate
  modified_base 9: mod_base = OTHER; note = 2'-fluoroadenosine-3'-phosphate
  modified_base 10: mod_base = OTHER; note = 2'-O-methylguanosine-3'-phosphate
  modified_base 11: mod_base = OTHER; note = 2'-O-methylcytidine-3'-phosphate
  modified_base 12: mod_base = OTHER; note = 2'-O-methyluridine-3'-phosphate
  modified_base 13: mod_base = OTHER; note = 2'-O-methylguanosine-3'-phosphate
  modified_base 14: mod_base = OTHER; note = 2'-fluorouridine-3'-phosphate
  modified_base 15: mod_base = OTHER; note = 2'-O-methyluridine-3'-phosphate
  modified_base 16: mod_base = OTHER; note = 2'-fluoroguanosine-3'-phosphate
  modified_base 17: mod_base = OTHER; note = 2'-O-methylguanosine-3'-phosphate
  modified_base 18: mod_base = OTHER; note = 2'-O-methylguanosine-3'-phosphate
  modified_base 19: mod_base = OTHER; note = 2'-O-methyluridine-3'-phosphate
  modified_base 20: mod_base = OTHER; note = 2'-O-methyladenosine-3'-phosphate
  modified_base 21: mod_base = OTHER; note = 2'-O-methylguanosine-3'-phosphorothioate
  modified_base 22: mod_base = OTHER; note = 2'-O-methyladenosine-3'-phosphorothioate
  modified_base 23: mod_base = OTHER; note = 2'-O-methylcytidine-3'-phosphate
acttgttaagctgttgggtagac

SEQ ID NO: 1044 - RNA, 23 nt, synthetic construct
  source 1..23: mol_type = other RNA
  modified_base 1: mod_base = OTHER; note = 2'-O-methyladenosine-3'-phosphorothioate
  modified_base 2: mod_base = OTHER; note = 2'-fluorocytidine-3'-phosphorothioate
  modified_base 3: mod_base = OTHER; note = 2'-O-methyladenosine-3'-phosphate
  modified_base 4: mod_base = OTHER; note = 2'-O-methylguanosine-3'-phosphate
  modified_base 5: mod_base = OTHER; note = 2'-O-methylguanosine-3'-phosphate
  modified_base 6: mod_base = OTHER; note = 2'-fluorocytidine-3'-phosphate
  modified_base 7: mod_base = OTHER; note = 2'-O-methyluridine-3'-phosphate
  modified_base 8: mod_base = OTHER; note = 2'-fluorouridine-3'-phosphate
  modified_base 9: mod_base = OTHER; note = 2'-fluoroguanosine-3'-phosphate
  modified_base 10: mod_base = OTHER; note = 2'-O-methyluridine-3'-phosphate
  modified_base 11: mod_base = OTHER; note = 2'-O-methyluridine-3'-phosphate
  modified_base 12: mod_base = OTHER; note = 2'-O-methyladenosine-3'-phosphate
  modified_base 13: mod_base = OTHER; note = 2'-O-methyladenosine-3'-phosphate
  modified_base 14: mod_base = OTHER; note = 2'-fluoroguanosine-3'-phosphate
  modified_base 15: mod_base = OTHER; note = 2'-O-methylcytidine-3'-phosphate
  modified_base 16: mod_base = OTHER; note = 2'-fluorouridine-3'-phosphate
  modified_base 17: mod_base = OTHER; note = 2'-O-methylguanosine-3'-phosphate
  modified_base 18: mod_base = OTHER; note = 2'-O-methyluridine-3'-phosphate
  modified_base 19: mod_base = OTHER; note = 2'-O-methyluridine-3'-phosphate
  modified_base 20: mod_base = OTHER; note = 2'-O-methylguanosine-3'-phosphate
  modified_base 21: mod_base = OTHER; note = 2'-O-methylguanosine-3'-phosphorothioate
  modified_base 22: mod_base = OTHER; note = 2'-O-methylguanosine-3'-phosphorothioate
  modified_base 23: mod_base = OTHER; note = 2'-O-methyluridine-3'-phosphate
acaggcttgttaagctgttgggt

SEQ ID NO: 1045 - RNA, 23 nt, synthetic construct
  source 1..23: mol_type = other RNA
  modified_base 1: mod_base = OTHER; note = 2'-O-methyladenosine-3'-phosphorothioate
  modified_base 2: mod_base = OTHER; note = 2'-fluorocytidine-3'-phosphorothioate
  modified_base 3: mod_base = OTHER; note = 2'-O-methylcytidine-3'-phosphate
  modified_base 4: mod_base = OTHER; note = 2'-O-methyluridine-3'-phosphate
  modified_base 5: mod_base = OTHER; note = 2'-O-methylcytidine-3'-phosphate
  modified_base 6: mod_base = OTHER; note = 2'-fluoroadenosine-3'-phosphate
  modified_base 7: mod_base = OTHER; note = 2'-O-methylguanosine-3'-phosphate
  modified_base 8: mod_base = OTHER; note = 2'-fluoroguanosine-3'-phosphate
  modified_base 9: mod_base = OTHER; note = 2'-fluorocytidine-3'-phosphate
  modified_base 10: mod_base = OTHER; note = 2'-O-methyluridine-3'-phosphate
  modified_base 11: mod_base = OTHER; note = 2'-O-methyluridine-3'-phosphate
  modified_base 12: mod_base = OTHER; note = 2'-O-methylguanosine-3'-phosphate
  modified_base 13: mod_base = OTHER; note = 2'-O-methyluridine-3'-phosphate
  modified_base 14: mod_base = OTHER; note = 2'-fluorouridine-3'-phosphate
  modified_base 15: mod_base = OTHER; note = 2'-O-methyladenosine-3'-phosphate
  modified_base 16: mod_base = OTHER; note = 2'-fluoroadenosine-3'-phosphate
  modified_base 17: mod_base = OTHER; note = 2'-O-methylguanosine-3'-phosphate
  modified_base 18: mod_base = OTHER; note = 2'-O-methylcytidine-3'-phosphate
  modified_base 19: mod_base = OTHER; note = 2'-O-methyluridine-3'-phosphate
  modified_base 20: mod_base = OTHER; note = 2'-O-methylguanosine-3'-phosphate
  modified_base 21: mod_base = OTHER; note = 2'-O-methyluridine-3'-phosphorothioate
  modified_base 22: mod_base = OTHER; note = 2'-O-methyluridine-3'-phosphorothioate
  modified_base 23: mod_base = OTHER; note = 2'-O-methylguanosine-3'-phosphate
acctcaggcttgttaagctgttg

SEQ ID NO: 1046 - RNA, 23 nt, synthetic construct
  source 1..23: mol_type = other RNA
  modified_base 1: mod_base = OTHER; note = 2'-O-methyladenosine-3'-phosphorothioate
  modified_base 2: mod_base = OTHER; note = 2'-fluoroadenosine-3'-phosphorothioate
  modified_base 3: mod_base = OTHER; note = 2'-O-methyladenosine-3'-phosphate
  modified_base 4: mod_base = OTHER; note = 2'-O-methylguanosine-3'-phosphate
  modified_base 5: mod_base = OTHER; note = 2'-O-methyladenosine-3'-phosphate
  modified_base 6: mod_base = OTHER; note = 2'-fluorocytidine-3'-phosphate
  modified_base 7: mod_base = OTHER; note = 2'-O-methylcytidine-3'-phosphate
  modified_base 8: mod_base = OTHER; note = 2'-fluorouridine-3'-phosphate
  modified_base 9: mod_base = OTHER; note = 2'-fluorocytidine-3'-phosphate
  modified_base 10: mod_base = OTHER; note = 2'-O-methyladenosine-3'-phosphate
  modified_base 11: mod_base = OTHER; note = 2'-O-methylguanosine-3'-phosphate
  modified_base 12: mod_base = OTHER; note = 2'-O-methylguanosine-3'-phosphate
  modified_base 13: mod_base = OTHER; note = 2'-O-methylcytidine-3'-phosphate
  modified_base 14: mod_base = OTHER; note = 2'-fluorouridine-3'-phosphate
  modified_base 15: mod_base = OTHER; note = 2'-O-methyluridine-3'-phosphate
  modified_base 16: mod_base = OTHER; note = 2'-fluoroguanosine-3'-phosphate
  modified_base 17: mod_base = OTHER; note = 2'-O-methyluridine-3'-phosphate
  modified_base 18: mod_base = OTHER; note = 2'-O-methyluridine-3'-phosphate
  modified_base 19: mod_base = OTHER; note = 2'-O-methyladenosine-3'-phosphate
  modified_base 20: mod_base = OTHER; note = 2'-O-methyladenosine-3'-phosphate
  modified_base 21: mod_base = OTHER; note = 2'-O-methylguanosine-3'-phosphorothioate
  modified_base 22: mod_base = OTHER; note = 2'-O-methylcytidine-3'-phosphorothioate
  modified_base 23: mod_base = OTHER; note = 2'-O-methyluridine-3'-phosphate
aaagacctcaggcttgttaagct

SEQ ID NO: 1047 - RNA, 23 nt, synthetic construct
  source 1..23: mol_type = other RNA
  modified_base 1: mod_base = OTHER; note = 2'-O-methyladenosine-3'-phosphorothioate
  modified_base 2: mod_base = OTHER; note = 2'-fluorocytidine-3'-phosphorothioate
  modified_base 3: mod_base = OTHER; note = 2'-O-methyladenosine-3'-phosphate
  modified_base 4: mod_base = OTHER; note = 2'-O-methyladenosine-3'-phosphate
  modified_base 5: mod_base = OTHER; note = 2'-O-methylguanosine-3'-phosphate
  modified_base 6: mod_base = OTHER; note = 2'-fluoroadenosine-3'-phosphate
  modified_base 7: mod_base = OTHER; note = 2'-O-methylcytidine-3'-phosphate
  modified_base 8: mod_base = OTHER; note = 2'-fluorocytidine-3'-phosphate
  modified_base 9: mod_base = OTHER; note = 2'-fluorouridine-3'-phosphate
  modified_base 10: mod_base = OTHER; note = 2'-O-methylcytidine-3'-phosphate
  modified_base 11: mod_base = OTHER; note = 2'-O-methyladenosine-3'-phosphate
  modified_base 12: mod_base = OTHER; note = 2'-O-methylguanosine-3'-phosphate
  modified_base 13: mod_base = OTHER; note = 2'-O-methylguanosine-3'-phosphate
  modified_base 14: mod_base = OTHER; note = 2'-fluorocytidine-3'-phosphate
  modified_base 15: mod_base = OTHER; note = 2'-O-methyluridine-3'-phosphate
  modified_base 16: mod_base = OTHER; note = 2'-fluorouridine-3'-phosphate
  modified_base 17: mod_base = OTHER; note = 2'-O-methylguanosine-3'-phosphate
  modified_base 18: mod_base = OTHER; note = 2'-O-methyluridine-3'-phosphate
  modified_base 19: mod_base = OTHER; note = 2'-O-methyluridine-3'-phosphate
  modified_base 20: mod_base = OTHER; note = 2'-O-methyladenosine-3'-phosphate
  modified_base 21: mod_base = OTHER; note = 2'-O-methyladenosine-3'-phosphorothioate
  modified_base 22: mod_base = OTHER; note = 2'-O-methylguanosine-3'-phosphorothioate
  modified_base 23: mod_base = OTHER; note = 2'-O-methylcytidine-3'-phosphate
acaagacctcaggcttgttaagc

SEQ ID NO: 1048 - RNA, 23 nt, synthetic construct
  source 1..23: mol_type = other RNA
  modified_base 1: mod_base = OTHER; note = 2'-O-methyladenosine-3'-phosphorothioate
  modified_base 2: mod_base = OTHER; note = 2'-fluorocytidine-3'-phosphorothioate
  modified_base 3: mod_base = OTHER; note = 2'-O-methylcytidine-3'-phosphate
  modified_base 4: mod_base = OTHER; note = 2'-O-methyladenosine-3'-phosphate
  modified_base 5: mod_base = OTHER; note = 2'-O-methyladenosine-3'-phosphate
  modified_base 6: mod_base = OTHER; note = 2'-fluoroguanosine-3'-phosphate
  modified_base 7: mod_base = OTHER; note = 2'-O-methyladenosine-3'-phosphate
  modified_base 8: mod_base = OTHER; note = 2'-fluorocytidine-3'-phosphate
  modified_base 9: mod_base = OTHER; note = 2'-fluorocytidine-3'-phosphate
  modified_base 10: mod_base = OTHER; note = 2'-O-methyluridine-3'-phosphate
  modified_base 11: mod_base = OTHER; note = 2'-O-methylcytidine-3'-phosphate
  modified_base 12: mod_base = OTHER; note = 2'-O-methyladenosine-3'-phosphate
  modified_base 13: mod_base = OTHER; note = 2'-O-methylguanosine-3'-phosphate
  modified_base 14: mod_base = OTHER; note = 2'-fluoroguanosine-3'-phosphate
  modified_base 15: mod_base = OTHER; note = 2'-O-methylcytidine-3'-phosphate
  modified_base 16: mod_base = OTHER; note = 2'-fluorouridine-3'-phosphate
  modified_base 17: mod_base = OTHER; note = 2'-O-methyluridine-3'-phosphate
  modified_base 18: mod_base = OTHER; note = 2'-O-methylguanosine-3'-phosphate
  modified_base 19: mod_base = OTHER; note = 2'-O-methyluridine-3'-phosphate
  modified_base 20: mod_base = OTHER; note = 2'-O-methyluridine-3'-phosphate
  modified_base 21: mod_base = OTHER; note = 2'-O-methyladenosine-3'-phosphorothioate
  modified_base 22: mod_base = OTHER; note = 2'-O-methyladenosine-3'-phosphorothioate
  modified_base 23: mod_base = OTHER; note = 2'-O-methylguanosine-3'-phosphate
accaagacctcaggcttgttaag

SEQ ID NO: 1049 - RNA, 23 nt, synthetic construct
  source 1..23: mol_type = other RNA
  modified_base 1: mod_base = OTHER; note = 2'-O-methyladenosine-3'-phosphorothioate
  modified_base 2: mod_base = OTHER; note = 2'-fluorouridine -3'-phosphorothioate
  modified_base 3: mod_base = OTHER; note = 2'-O-methylcytidine-3'-phosphate
  modified_base 4: mod_base = OTHER; note = 2'-O-methylcytidine-3'-phosphate
  modified_base 5: mod_base = OTHER; note = 2'-O-methyladenosine-3'-phosphate
  modified_base 6: mod_base = OTHER; note = 2'-fluoroadenosine-3'-phosphate
  modified_base 7: mod_base = OTHER; note = 2'-O-methylguanosine-3'-phosphate
  modified_base 8: mod_base = OTHER; note = 2'-fluoroadenosine-3'-phosphate
  modified_base 9: mod_base = OTHER; note = 2'-fluorocytidine-3'-phosphate
  modified_base 10: mod_base = OTHER; note = 2'-O-methylcytidine-3'-phosphate
  modified_base 11: mod_base = OTHER; note = 2'-O-methyluridine-3'-phosphate
  modified_base 12: mod_base = OTHER; note = 2'-O-methylcytidine-3'-phosphate
  modified_base 13: mod_base = OTHER; note = 2'-O-methyladenosine-3'-phosphate
  modified_base 14: mod_base = OTHER; note = 2'-fluoroguanosine-3'-phosphate
  modified_base 15: mod_base = OTHER; note = 2'-O-methylguanosine-3'-phosphate
  modified_base 16: mod_base = OTHER; note = 2'-fluorocytidine-3'-phosphate
  modified_base 17: mod_base = OTHER; note = 2'-O-methyluridine-3'-phosphate
  modified_base 18: mod_base = OTHER; note = 2'-O-methyluridine-3'-phosphate
  modified_base 19: mod_base = OTHER; note = 2'-O-methylguanosine-3'-phosphate
  modified_base 20: mod_base = OTHER; note = 2'-O-methyluridine-3'-phosphate
  modified_base 21: mod_base = OTHER; note = 2'-O-methyluridine-3'-phosphorothioate
  modified_base 22: mod_base = OTHER; note = 2'-O-methyladenosine-3'-phosphorothioate
  modified_base 23: mod_base = OTHER; note = 2'-O-methyladenosine-3'-phosphate
atccaagacctcaggcttgttaa

SEQ ID NO: 1050 - RNA, 23 nt, synthetic construct
  source 1..23: mol_type = other RNA
  modified_base 1: mod_base = OTHER; note = 2'-O-methyladenosine-3'-phosphorothioate
  modified_base 2: mod_base = OTHER; note = 2'-fluorocytidine-3'-phosphorothioate
  modified_base 3: mod_base = OTHER; note = 2'-O-methyluridine-3'-phosphate
  modified_base 4: mod_base = OTHER; note = 2'-O-methylcytidine-3'-phosphate
  modified_base 5: mod_base = OTHER; note = 2'-O-methylcytidine-3'-phosphate
  modified_base 6: mod_base = OTHER; note = 2'-fluoroadenosine-3'-phosphate
  modified_base 7: mod_base = OTHER; note = 2'-O-methyladenosine-3'-phosphate
  modified_base 8: mod_base = OTHER; note = 2'-fluoroguanosine-3'-phosphate
  modified_base 9: mod_base = OTHER; note = 2'-fluoroadenosine-3'-phosphate
  modified_base 10: mod_base = OTHER; note = 2'-O-methylcytidine-3'-phosphate
  modified_base 11: mod_base = OTHER; note = 2'-O-methylcytidine-3'-phosphate
  modified_base 12: mod_base = OTHER; note = 2'-O-methyluridine-3'-phosphate
  modified_base 13: mod_base = OTHER; note = 2'-O-methylcytidine-3'-phosphate
  modified_base 14: mod_base = OTHER; note = 2'-fluoroadenosine-3'-phosphate
  modified_base 15: mod_base = OTHER; note = 2'-O-methylguanosine-3'-phosphate
  modified_base 16: mod_base = OTHER; note = 2'-fluoroguanosine-3'-phosphate
  modified_base 17: mod_base = OTHER; note = 2'-O-methylcytidine-3'-phosphate
  modified_base 18: mod_base = OTHER; note = 2'-O-methyluridine-3'-phosphate
  modified_base 19: mod_base = OTHER; note = 2'-O-methyluridine-3'-phosphate
  modified_base 20: mod_base = OTHER; note = 2'-O-methylguanosine-3'-phosphate
  modified_base 21: mod_base = OTHER; note = 2'-O-methyluridine-3'-phosphorothioate
  modified_base 22: mod_base = OTHER; note = 2'-O-methyluridine-3'-phosphorothioate
  modified_base 23: mod_base = OTHER; note = 2'-O-methyladenosine-3'-phosphate
actccaagacctcaggcttgtta

SEQ ID NO: 1051 - RNA, 23 nt, synthetic construct
  source 1..23: mol_type = other RNA
  modified_base 1: mod_base = OTHER; note = 2'-O-methyladenosine-3'-phosphorothioate
  modified_base 2: mod_base = OTHER; note = 2'-fluorocytidine-3'-phosphorothioate
  modified_base 3: mod_base = OTHER; note = 2'-O-methylcytidine-3'-phosphate
  modified_base 4: mod_base = OTHER; note = 2'-O-methyluridine-3'-phosphate
  modified_base 5: mod_base = OTHER; note = 2'-O-methylcytidine-3'-phosphate
  modified_base 6: mod_base = OTHER; note = 2'-fluorocytidine-3'-phosphate
  modified_base 7: mod_base = OTHER; note = 2'-O-methyladenosine-3'-phosphate
  modified_base 8: mod_base = OTHER; note = 2'-fluoroadenosine-3'-phosphate
  modified_base 9: mod_base = OTHER; note = 2'-fluoroguanosine-3'-phosphate
  modified_base 10: mod_base = OTHER; note = 2'-O-methyladenosine-3'-phosphate
  modified_base 11: mod_base = OTHER; note = 2'-O-methylcytidine-3'-phosphate
  modified_base 12: mod_base = OTHER; note = 2'-O-methylcytidine-3'-phosphate
  modified_base 13: mod_base = OTHER; note = 2'-O-methyluridine-3'-phosphate
  modified_base 14: mod_base = OTHER; note = 2'-fluorocytidine-3'-phosphate
  modified_base 15: mod_base = OTHER; note = 2'-O-methyladenosine-3'-phosphate
  modified_base 16: mod_base = OTHER; note = 2'-fluoroguanosine-3'-phosphate
  modified_base 17: mod_base = OTHER; note = 2'-O-methylguanosine-3'-phosphate
  modified_base 18: mod_base = OTHER; note = 2'-O-methylcytidine-3'-phosphate
  modified_base 19: mod_base = OTHER; note = 2'-O-methyluridine-3'-phosphate
  modified_base 20: mod_base = OTHER; note = 2'-O-methyluridine-3'-phosphate
  modified_base 21: mod_base = OTHER; note = 2'-O-methylguanosine-3'-phosphorothioate
  modified_base 22: mod_base = OTHER; note = 2'-O-methyluridine-3'-phosphorothioate
  modified_base 23: mod_base = OTHER; note = 2'-O-methyluridine-3'-phosphate
acctccaagacctcaggcttgtt

SEQ ID NO: 1052 - RNA, 23 nt, synthetic construct
  source 1..23: mol_type = other RNA
  modified_base 1: mod_base = OTHER; note = 2'-O-methyladenosine-3'-phosphorothioate
  modified_base 2: mod_base = OTHER; note = 2'-fluoroguanosine-3'-phosphorothioate
  modified_base 3: mod_base = OTHER; note = 2'-O-methylcytidine-3'-phosphate
  modified_base 4: mod_base = OTHER; note = 2'-O-methyladenosine-3'-phosphate
  modified_base 5: mod_base = OTHER; note = 2'-O-methyladenosine-3'-phosphate
  modified_base 6: mod_base = OTHER; note = 2'-fluoroadenosine-3'-phosphate
  modified_base 7: mod_base = OTHER; note = 2'-O-methylcytidine-3'-phosphate
  modified_base 8: mod_base = OTHER; note = 2'-fluoroadenosine-3'-phosphate
  modified_base 9: mod_base = OTHER; note = 2'-fluoroguanosine-3'-phosphate
  modified_base 10: mod_base = OTHER; note = 2'-O-methylguanosine-3'-phosphate
  modified_base 11: mod_base = OTHER; note = 2'-O-methyladenosine-3'-phosphate
  modified_base 12: mod_base = OTHER; note = 2'-O-methyladenosine-3'-phosphate
  modified_base 13: mod_base = OTHER; note = 2'-O-methyluridine-3'-phosphate
  modified_base 14: mod_base = OTHER; note = 2'-fluoroguanosine-3'-phosphate
  modified_base 15: mod_base = OTHER; note = 2'-O-methylguanosine-3'-phosphate
  modified_base 16: mod_base = OTHER; note = 2'-fluoroguanosine-3'-phosphate
  modified_base 17: mod_base = OTHER; note = 2'-O-methylcytidine-3'-phosphate
  modified_base 18: mod_base = OTHER; note = 2'-O-methylguanosine-3'-phosphate
  modified_base 19: mod_base = OTHER; note = 2'-O-methylguanosine-3'-phosphate
  modified_base 20: mod_base = OTHER; note = 2'-O-methyluridine-3'-phosphate
  modified_base 21: mod_base = OTHER; note = 2'-O-methyluridine-3'-phosphorothioate
  modified_base 22: mod_base = OTHER; note = 2'-O-methylcytidine-3'-phosphorothioate
  modified_base 23: mod_base = OTHER; note = 2'-O-methyladenosine-3'-phosphate
agcaaacaggaatgggcggttca

SEQ ID NO: 1053 - RNA, 23 nt, synthetic construct
  source 1..23: mol_type = other RNA
  modified_base 1: mod_base = OTHER; note = 2'-O-methyladenosine-3'-phosphorothioate
  modified_base 2: mod_base = OTHER; note = 2'-fluoroadenosine-3'-phosphorothioate
  modified_base 3: mod_base = OTHER; note = 2'-O-methylguanosine-3'-phosphate
  modified_base 4: mod_base = OTHER; note = 2'-O-methylcytidine-3'-phosphate
  modified_base 5: mod_base = OTHER; note = 2'-O-methyladenosine-3'-phosphate
  modified_base 6: mod_base = OTHER; note = 2'-fluoroadenosine-3'-phosphate
  modified_base 7: mod_base = OTHER; note = 2'-O-methyladenosine-3'-phosphate
  modified_base 8: mod_base = OTHER; note = 2'-fluorocytidine-3'-phosphate
  modified_base 9: mod_base = OTHER; note = 2'-fluoroadenosine-3'-phosphate
  modified_base 10: mod_base = OTHER; note = 2'-O-methylguanosine-3'-phosphate
  modified_base 11: mod_base = OTHER; note = 2'-O-methylguanosine-3'-phosphate
  modified_base 12: mod_base = OTHER; note = 2'-O-methyladenosine-3'-phosphate
  modified_base 13: mod_base = OTHER; note = 2'-O-methyladenosine-3'-phosphate
  modified_base 14: mod_base = OTHER; note = 2'-fluorouridine-3'-phosphate
  modified_base 15: mod_base = OTHER; note = 2'-O-methylguanosine-3'-phosphate
  modified_base 16: mod_base = OTHER; note = 2'-fluoroguanosine-3'-phosphate
  modified_base 17: mod_base = OTHER; note = 2'-O-methylguanosine-3'-phosphate
  modified_base 18: mod_base = OTHER; note = 2'-O-methylcytidine-3'-phosphate
  modified_base 19: mod_base = OTHER; note = 2'-O-methylguanosine-3'-phosphate
  modified_base 20: mod_base = OTHER; note = 2'-O-methylguanosine-3'-phosphate
  modified_base 21: mod_base = OTHER; note = 2'-O-methyluridine-3'-phosphorothioate
  modified_base 22: mod_base = OTHER; note = 2'-O-methyluridine-3'-phosphorothioate
  modified_base 23: mod_base = OTHER; note = 2'-O-methylcytidine-3'-phosphate
aagcaaacaggaatgggcggttc

SEQ ID NO: 1054 - RNA, 23 nt, synthetic construct
  source 1..23: mol_type = other RNA
  modified_base 1: mod_base = OTHER; note = 2'-O-methyladenosine-3'-phosphorothioate
  modified_base 2: mod_base = OTHER; note = 2'-fluorocytidine-3'-phosphorothioate
  modified_base 3: mod_base = OTHER; note = 2'-O-methyladenosine-3'-phosphate
  modified_base 4: mod_base = OTHER; note = 2'-O-methylguanosine-3'-phosphate
  modified_base 5: mod_base = OTHER; note = 2'-O-methylcytidine-3'-phosphate
  modified_base 6: mod_base = OTHER; note = 2'-fluoroadenosine-3'-phosphate
  modified_base 7: mod_base = OTHER; note = 2'-O-methyladenosine-3'-phosphate
  modified_base 8: mod_base = OTHER; note = 2'-fluoroadenosine-3'-phosphate
  modified_base 9: mod_base = OTHER; note = 2'-fluorocytidine-3'-phosphate
  modified_base 10: mod_base = OTHER; note = 2'-O-methyladenosine-3'-phosphate
  modified_base 11: mod_base = OTHER; note = 2'-O-methylguanosine-3'-phosphate
  modified_base 12: mod_base = OTHER; note = 2'-O-methylguanosine-3'-phosphate
  modified_base 13: mod_base = OTHER; note = 2'-O-methyladenosine-3'-phosphate
  modified_base 14: mod_base = OTHER; note = 2'-fluoroadenosine-3'-phosphate
  modified_base 15: mod_base = OTHER; note = 2'-O-methyluridine-3'-phosphate
  modified_base 16: mod_base = OTHER; note = 2'-fluoroguanosine-3'-phosphate
  modified_base 17: mod_base = OTHER; note = 2'-O-methylguanosine-3'-phosphate
  modified_base 18: mod_base = OTHER; note = 2'-O-methylguanosine-3'-phosphate
  modified_base 19: mod_base = OTHER; note = 2'-O-methylcytidine-3'-phosphate
  modified_base 20: mod_base = OTHER; note = 2'-O-methylguanosine-3'-phosphate
  modified_base 21: mod_base = OTHER; note = 2'-O-methylguanosine-3'-phosphorothioate
  modified_base 22: mod_base = OTHER; note = 2'-O-methyluridine-3'-phosphorothioate
  modified_base 23: mod_base = OTHER; note = 2'-O-methyluridine-3'-phosphate
acagcaaacaggaatgggcggtt

SEQ ID NO: 1055 - RNA, 23 nt, synthetic construct
  source 1..23: mol_type = other RNA
  modified_base 1: mod_base = OTHER; note = 2'-O-methyladenosine-3'-phosphorothioate
  modified_base 2: mod_base = OTHER; note = 2'-fluoroadenosine-3'-phosphorothioate
  modified_base 3: mod_base = OTHER; note = 2'-O-methylcytidine-3'-phosphate
  modified_base 4: mod_base = OTHER; note = 2'-O-methyladenosine-3'-phosphate
  modified_base 5: mod_base = OTHER; note = 2'-O-methylguanosine-3'-phosphate
  modified_base 6: mod_base = OTHER; note = 2'-fluorocytidine-3'-phosphate
  modified_base 7: mod_base = OTHER; note = 2'-O-methyladenosine-3'-phosphate
  modified_base 8: mod_base = OTHER; note = 2'-fluoroadenosine-3'-phosphate
  modified_base 9: mod_base = OTHER; note = 2'-fluoroadenosine-3'-phosphate
  modified_base 10: mod_base = OTHER; note = 2'-O-methylcytidine-3'-phosphate
  modified_base 11: mod_base = OTHER; note = 2'-O-methyladenosine-3'-phosphate
  modified_base 12: mod_base = OTHER; note = 2'-O-methylguanosine-3'-phosphate
  modified_base 13: mod_base = OTHER; note = 2'-O-methylguanosine-3'-phosphate
  modified_base 14: mod_base = OTHER; note = 2'-fluoroadenosine-3'-phosphate
  modified_base 15: mod_base = OTHER; note = 2'-O-methyladenosine-3'-phosphate
  modified_base 16: mod_base = OTHER; note = 2'-fluorouridine-3'-phosphate
  modified_base 17: mod_base = OTHER; note = 2'-O-methylguanosine-3'-phosphate
  modified_base 18: mod_base = OTHER; note = 2'-O-methylguanosine-3'-phosphate
  modified_base 19: mod_base = OTHER; note = 2'-O-methylguanosine-3'-phosphate
  modified_base 20: mod_base = OTHER; note = 2'-O-methylcytidine-3'-phosphate
  modified_base 21: mod_base = OTHER; note = 2'-O-methylguanosine-3'-phosphorothioate
  modified_base 22: mod_base = OTHER; note = 2'-O-methylguanosine-3'-phosphorothioate
  modified_base 23: mod_base = OTHER; note = 2'-O-methyluridine-3'-phosphate
aacagcaaacaggaatgggcggt

SEQ ID NO: 1056 - RNA, 23 nt, synthetic construct
  source 1..23: mol_type = other RNA
  modified_base 1: mod_base = OTHER; note = 2'-O-methyladenosine-3'-phosphorothioate
  modified_base 2: mod_base = OTHER; note = 2'-fluorocytidine-3'-phosphorothioate
  modified_base 3: mod_base = OTHER; note = 2'-O-methyladenosine-3'-phosphate
  modified_base 4: mod_base = OTHER; note = 2'-O-methyluridine-3'-phosphate
  modified_base 5: mod_base = OTHER; note = 2'-O-methyladenosine-3'-phosphate
  modified_base 6: mod_base = OTHER; note = 2'-fluorocytidine-3'-phosphate
  modified_base 7: mod_base = OTHER; note = 2'-O-methyladenosine-3'-phosphate
  modified_base 8: mod_base = OTHER; note = 2'-fluorocytidine-3'-phosphate
  modified_base 9: mod_base = OTHER; note = 2'-fluoroadenosine-3'-phosphate
  modified_base 10: mod_base = OTHER; note = 2'-O-methylguanosine-3'-phosphate
  modified_base 11: mod_base = OTHER; note = 2'-O-methylcytidine-3'-phosphate
  modified_base 12: mod_base = OTHER; note = 2'-O-methyladenosine-3'-phosphate
  modified_base 13: mod_base = OTHER; note = 2'-O-methyladenosine-3'-phosphate
  modified_base 14: mod_base = OTHER; note = 2'-fluoroadenosine-3'-phosphate
  modified_base 15: mod_base = OTHER; note = 2'-O-methylcytidine-3'-phosphate
  modified_base 16: mod_base = OTHER; note = 2'-fluoroadenosine-3'-phosphate
  modified_base 17: mod_base = OTHER; note = 2'-O-methylguanosine-3'-phosphate
  modified_base 18: mod_base = OTHER; note = 2'-O-methylguanosine-3'-phosphate
  modified_base 19: mod_base = OTHER; note = 2'-O-methyladenosine-3'-phosphate
  modified_base 20: mod_base = OTHER; note = 2'-O-methyladenosine-3'-phosphate
  modified_base 21: mod_base = OTHER; note = 2'-O-methyluridine-3'-phosphorothioate
  modified_base 22: mod_base = OTHER; note = 2'-O-methylguanosine-3'-phosphorothioate
  modified_base 23: mod_base = OTHER; note = 2'-O-methylguanosine-3'-phosphate
acatacacagcaaacaggaatgg

SEQ ID NO: 1057 - RNA, 23 nt, synthetic construct
  source 1..23: mol_type = other RNA
  modified_base 1: mod_base = OTHER; note = 2'-O-methyladenosine-3'-phosphorothioate
  modified_base 2: mod_base = OTHER; note = 2'-fluoroadenosine-3'-phosphorothioate
  modified_base 3: mod_base = OTHER; note = 2'-O-methyluridine-3'-phosphate
  modified_base 4: mod_base = OTHER; note = 2'-O-methylcytidine-3'-phosphate
  modified_base 5: mod_base = OTHER; note = 2'-O-methyladenosine-3'-phosphate
  modified_base 6: mod_base = OTHER; note = 2'-fluorouridine-3'-phosphate
  modified_base 7: mod_base = OTHER; note = 2'-O-methyladenosine-3'-phosphate
  modified_base 8: mod_base = OTHER; note = 2'-fluorocytidine-3'-phosphate
  modified_base 9: mod_base = OTHER; note = 2'-fluoroadenosine-3'-phosphate
  modified_base 10: mod_base = OTHER; note = 2'-O-methylcytidine-3'-phosphate
  modified_base 11: mod_base = OTHER; note = 2'-O-methyladenosine-3'-phosphate
  modified_base 12: mod_base = OTHER; note = 2'-O-methylguanosine-3'-phosphate
  modified_base 13: mod_base = OTHER; note = 2'-O-methylcytidine-3'-phosphate
  modified_base 14: mod_base = OTHER; note = 2'-fluoroadenosine-3'-phosphate
  modified_base 15: mod_base = OTHER; note = 2'-O-methyladenosine-3'-phosphate
  modified_base 16: mod_base = OTHER; note = 2'-fluoroadenosine-3'-phosphate
  modified_base 17: mod_base = OTHER; note = 2'-O-methylcytidine-3'-phosphate
  modified_base 18: mod_base = OTHER; note = 2'-O-methyladenosine-3'-phosphate
  modified_base 19: mod_base = OTHER; note = 2'-O-methylguanosine-3'-phosphate
  modified_base 20: mod_base = OTHER; note = 2'-O-methylguanosine-3'-phosphate
  modified_base 21: mod_base = OTHER; note = 2'-O-methyladenosine-3'-phosphorothioate
  modified_base 22: mod_base = OTHER; note = 2'-O-methyladenosine-3'-phosphorothioate
  modified_base 23: mod_base = OTHER; note = 2'-O-methyluridine-3'-phosphate
aatcatacacagcaaacaggaat

SEQ ID NO: 1058 - RNA, 23 nt, synthetic construct
  source 1..23: mol_type = other RNA
  modified_base 1: mod_base = OTHER; note = 2'-O-methyladenosine-3'-phosphorothioate
  modified_base 2: mod_base = OTHER; note = 2'-fluorocytidine-3'-phosphorothioate
  modified_base 3: mod_base = OTHER; note = 2'-O-methylguanosine-3'-phosphate
  modified_base 4: mod_base = OTHER; note = 2'-O-methylcytidine-3'-phosphate
  modified_base 5: mod_base = OTHER; note = 2'-O-methyluridine-3'-phosphate
  modified_base 6: mod_base = OTHER; note = 2'-fluorouridine-3'-phosphate
  modified_base 7: mod_base = OTHER; note = 2'-O-methyluridine-3'-phosphate
  modified_base 8: mod_base = OTHER; note = 2'-fluoroguanosine-3'-phosphate
  modified_base 9: mod_base = OTHER; note = 2'-fluoroadenosine-3'-phosphate
  modified_base 10: mod_base = OTHER; note = 2'-O-methyluridine-3'-phosphate
  modified_base 11: mod_base = OTHER; note = 2'-O-methylcytidine-3'-phosphate
  modified_base 12: mod_base = OTHER; note = 2'-O-methyladenosine-3'-phosphate
  modified_base 13: mod_base = OTHER; note = 2'-O-methyluridine-3'-phosphate
  modified_base 14: mod_base = OTHER; note = 2'-fluoroadenosine-3'-phosphate
  modified_base 15: mod_base = OTHER; note = 2'-O-methylcytidine-3'-phosphate
  modified_base 16: mod_base = OTHER; note = 2'-fluoroadenosine-3'-phosphate
  modified_base 17: mod_base = OTHER; note = 2'-O-methylcytidine-3'-phosphate
  modified_base 18: mod_base = OTHER; note = 2'-O-methyladenosine-3'-phosphate
  modified_base 19: mod_base = OTHER; note = 2'-O-methylguanosine-3'-phosphate
  modified_base 20: mod_base = OTHER; note = 2'-O-methylcytidine-3'-phosphate
  modified_base 21: mod_base = OTHER; note = 2'-O-methyladenosine-3'-phosphorothioate
  modified_base 22: mod_base = OTHER; note = 2'-O-methyladenosine-3'-phosphorothioate
  modified_base 23: mod_base = OTHER; note = 2'-O-methyladenosine-3'-phosphate
acgctttgatcatacacagcaaa

SEQ ID NO: 1059 - RNA, 23 nt, synthetic construct
  source 1..23: mol_type = other RNA
  modified_base 1: mod_base = OTHER; note = 2'-O-methyladenosine-3'-phosphorothioate
  modified_base 2: mod_base = OTHER; note = 2'-fluoroguanosine-3'-phosphorothioate
  modified_base 3: mod_base = OTHER; note = 2'-O-methylcytidine-3'-phosphate
  modified_base 4: mod_base = OTHER; note = 2'-O-methylguanosine-3'-phosphate
  modified_base 5: mod_base = OTHER; note = 2'-O-methylcytidine-3'-phosphate
  modified_base 6: mod_base = OTHER; note = 2'-fluorouridine-3'-phosphate
  modified_base 7: mod_base = OTHER; note = 2'-O-methyluridine-3'-phosphate
  modified_base 8: mod_base = OTHER; note = 2'-fluorouridine-3'-phosphate
  modified_base 9: mod_base = OTHER; note = 2'-fluoroguanosine-3'-phosphate
  modified_base 10: mod_base = OTHER; note = 2'-O-methyladenosine-3'-phosphate
  modified_base 11: mod_base = OTHER; note = 2'-O-methyluridine-3'-phosphate
  modified_base 12: mod_base = OTHER; note = 2'-O-methylcytidine-3'-phosphate
  modified_base 13: mod_base = OTHER; note = 2'-O-methyladenosine-3'-phosphate
  modified_base 14: mod_base = OTHER; note = 2'-fluorouridine-3'-phosphate
  modified_base 15: mod_base = OTHER; note = 2'-O-methyladenosine-3'-phosphate
  modified_base 16: mod_base = OTHER; note = 2'-fluorocytidine-3'-phosphate
  modified_base 17: mod_base = OTHER; note = 2'-O-methyladenosine-3'-phosphate
  modified_base 18: mod_base = OTHER; note = 2'-O-methylcytidine-3'-phosphate
  modified_base 19: mod_base = OTHER; note = 2'-O-methyladenosine-3'-phosphate
  modified_base 20: mod_base = OTHER; note = 2'-O-methylguanosine-3'-phosphate
  modified_base 21: mod_base = OTHER; note = 2'-O-methylcytidine-3'-phosphorothioate
  modified_base 22: mod_base = OTHER; note = 2'-O-methyladenosine-3'-phosphorothioate
  modified_base 23: mod_base = OTHER; note = 2'-O-methyladenosine-3'-phosphate
agcgctttgatcatacacagcaa

SEQ ID NO: 1060 - RNA, 23 nt, synthetic construct
  source 1..23: mol_type = other RNA
  modified_base 1: mod_base = OTHER; note = 2'-O-methyladenosine-3'-phosphorothioate
  modified_base 2: mod_base = OTHER; note = 2'-fluoroguanosine-3'-phosphorothioate
  modified_base 3: mod_base = OTHER; note = 2'-O-methylguanosine-3'-phosphate
  modified_base 4: mod_base = OTHER; note = 2'-O-methylcytidine-3'-phosphate
  modified_base 5: mod_base = OTHER; note = 2'-O-methylguanosine-3'-phosphate
  modified_base 6: mod_base = OTHER; note = 2'-fluorocytidine-3'-phosphate
  modified_base 7: mod_base = OTHER; note = 2'-O-methyluridine-3'-phosphate
  modified_base 8: mod_base = OTHER; note = 2'-fluorouridine-3'-phosphate
  modified_base 9: mod_base = OTHER; note = 2'-fluorouridine-3'-phosphate
  modified_base 10: mod_base = OTHER; note = 2'-O-methylguanosine-3'-phosphate
  modified_base 11: mod_base = OTHER; note = 2'-O-methyladenosine-3'-phosphate
  modified_base 12: mod_base = OTHER; note = 2'-O-methyluridine-3'-phosphate
  modified_base 13: mod_base = OTHER; note = 2'-O-methylcytidine-3'-phosphate
  modified_base 14: mod_base = OTHER; note = 2'-fluoroadenosine-3'-phosphate
  modified_base 15: mod_base = OTHER; note = 2'-O-methyluridine-3'-phosphate
  modified_base 16: mod_base = OTHER; note = 2'-fluoroadenosine-3'-phosphate
  modified_base 17: mod_base = OTHER; note = 2'-O-methylcytidine-3'-phosphate
  modified_base 18: mod_base = OTHER; note = 2'-O-methyladenosine-3'-phosphate
  modified_base 19: mod_base = OTHER; note = 2'-O-methylcytidine-3'-phosphate
  modified_base 20: mod_base = OTHER; note = 2'-O-methyladenosine-3'-phosphate
  modified_base 21: mod_base = OTHER; note = 2'-O-methylguanosine-3'-phosphorothioate
  modified_base 22: mod_base = OTHER; note = 2'-O-methylcytidine-3'-phosphorothioate
  modified_base 23: mod_base = OTHER; note = 2'-O-methyladenosine-3'-phosphate
aggcgctttgatcatacacagca

SEQ ID NO: 1061 - RNA, 23 nt, synthetic construct
  source 1..23: mol_type = other RNA
  modified_base 1: mod_base = OTHER; note = 2'-O-methyladenosine-3'-phosphorothioate
  modified_base 2: mod_base = OTHER; note = 2'-fluorouridine -3'-phosphorothioate
  modified_base 3: mod_base = OTHER; note = 2'-O-methyluridine-3'-phosphate
  modified_base 4: mod_base = OTHER; note = 2'-O-methylguanosine-3'-phosphate
  modified_base 5: mod_base = OTHER; note = 2'-O-methyluridine-3'-phosphate
  modified_base 6: mod_base = OTHER; note = 2'-fluorouridine-3'-phosphate
  modified_base 7: mod_base = OTHER; note = 2'-O-methyladenosine-3'-phosphate
  modified_base 8: mod_base = OTHER; note = 2'-fluorouridine-3'-phosphate
  modified_base 9: mod_base = OTHER; note = 2'-fluorocytidine-3'-phosphate
  modified_base 10: mod_base = OTHER; note = 2'-O-methyluridine-3'-phosphate
  modified_base 11: mod_base = OTHER; note = 2'-O-methylguanosine-3'-phosphate
  modified_base 12: mod_base = OTHER; note = 2'-O-methylcytidine-3'-phosphate
  modified_base 13: mod_base = OTHER; note = 2'-O-methyluridine-3'-phosphate
  modified_base 14: mod_base = OTHER; note = 2'-fluoroguanosine-3'-phosphate
  modified_base 15: mod_base = OTHER; note = 2'-O-methylcytidine-3'-phosphate
  modified_base 16: mod_base = OTHER; note = 2'-fluorouridine-3'-phosphate
  modified_base 17: mod_base = OTHER; note = 2'-O-methylguanosine-3'-phosphate
  modified_base 18: mod_base = OTHER; note = 2'-O-methylguanosine-3'-phosphate
  modified_base 19: mod_base = OTHER; note = 2'-O-methylcytidine-3'-phosphate
  modified_base 20: mod_base = OTHER; note = 2'-O-methylcytidine-3'-phosphate
  modified_base 21: mod_base = OTHER; note = 2'-O-methyluridine-3'-phosphorothioate
  modified_base 22: mod_base = OTHER; note = 2'-O-methyluridine-3'-phosphorothioate
  modified_base 23: mod_base = OTHER; note = 2'-O-methyluridine-3'-phosphate
attgttatctgctgctggccttt

SEQ ID NO: 1062 - RNA, 23 nt, synthetic construct
  source 1..23: mol_type = other RNA
  modified_base 1: mod_base = OTHER; note = 2'-O-methyladenosine-3'-phosphorothioate
  modified_base 2: mod_base = OTHER; note = 2'-fluoroadenosine-3'-phosphorothioate
  modified_base 3: mod_base = OTHER; note = 2'-O-methylcytidine-3'-phosphate
  modified_base 4: mod_base = OTHER; note = 2'-O-methyladenosine-3'-phosphate
  modified_base 5: mod_base = OTHER; note = 2'-O-methylcytidine-3'-phosphate
  modified_base 6: mod_base = OTHER; note = 2'-fluoroadenosine-3'-phosphate
  modified_base 7: mod_base = OTHER; note = 2'-O-methyluridine-3'-phosphate
  modified_base 8: mod_base = OTHER; note = 2'-fluorocytidine-3'-phosphate
  modified_base 9: mod_base = OTHER; note = 2'-fluoroguanosine-3'-phosphate
  modified_base 10: mod_base = OTHER; note = 2'-O-methylcytidine-3'-phosphate
  modified_base 11: mod_base = OTHER; note = 2'-O-methyluridine-3'-phosphate
  modified_base 12: mod_base = OTHER; note = 2'-O-methylguanosine-3'-phosphate
  modified_base 13: mod_base = OTHER; note = 2'-O-methyladenosine-3'-phosphate
  modified_base 14: mod_base = OTHER; note = 2'-fluorouridine-3'-phosphate
  modified_base 15: mod_base = OTHER; note = 2'-O-methyluridine-3'-phosphate
  modified_base 16: mod_base = OTHER; note = 2'-fluorouridine-3'-phosphate
  modified_base 17: mod_base = OTHER; note = 2'-O-methylguanosine-3'-phosphate
  modified_base 18: mod_base = OTHER; note = 2'-O-methyluridine-3'-phosphate
  modified_base 19: mod_base = OTHER; note = 2'-O-methylcytidine-3'-phosphate
  modified_base 20: mod_base = OTHER; note = 2'-O-methylcytidine-3'-phosphate
  modified_base 21: mod_base = OTHER; note = 2'-O-methylguanosine-3'-phosphorothioate
  modified_base 22: mod_base = OTHER; note = 2'-O-methylguanosine-3'-phosphorothioate
  modified_base 23: mod_base = OTHER; note = 2'-O-methylguanosine-3'-phosphate
aacacatcgctgatttgtccggg

SEQ ID NO: 1063 - RNA, 23 nt, synthetic construct
  source 1..23: mol_type = other RNA
  modified_base 1: mod_base = OTHER; note = 2'-O-methyladenosine-3'-phosphorothioate
  modified_base 2: mod_base = OTHER; note = 2'-fluoroguanosine-3'-phosphorothioate
  modified_base 3: mod_base = OTHER; note = 2'-O-methyladenosine-3'-phosphate
  modified_base 4: mod_base = OTHER; note = 2'-O-methylcytidine-3'-phosphate
  modified_base 5: mod_base = OTHER; note = 2'-O-methyladenosine-3'-phosphate
  modified_base 6: mod_base = OTHER; note = 2'-fluorocytidine-3'-phosphate
  modified_base 7: mod_base = OTHER; note = 2'-O-methyladenosine-3'-phosphate
  modified_base 8: mod_base = OTHER; note = 2'-fluorouridine-3'-phosphate
  modified_base 9: mod_base = OTHER; note = 2'-fluorocytidine-3'-phosphate
  modified_base 10: mod_base = OTHER; note = 2'-O-methylguanosine-3'-phosphate
  modified_base 11: mod_base = OTHER; note = 2'-O-methylcytidine-3'-phosphate
  modified_base 12: mod_base = OTHER; note = 2'-O-methyluridine-3'-phosphate
  modified_base 13: mod_base = OTHER; note = 2'-O-methylguanosine-3'-phosphate
  modified_base 14: mod_base = OTHER; note = 2'-fluoroadenosine-3'-phosphate
  modified_base 15: mod_base = OTHER; note = 2'-O-methyluridine-3'-phosphate
  modified_base 16: mod_base = OTHER; note = 2'-fluorouridine-3'-phosphate
  modified_base 17: mod_base = OTHER; note = 2'-O-methyluridine-3'-phosphate
  modified_base 18: mod_base = OTHER; note = 2'-O-methylguanosine-3'-phosphate
  modified_base 19: mod_base = OTHER; note = 2'-O-methyluridine-3'-phosphate
  modified_base 20: mod_base = OTHER; note = 2'-O-methylcytidine-3'-phosphate
  modified_base 21: mod_base = OTHER; note = 2'-O-methylcytidine-3'-phosphorothioate
  modified_base 22: mod_base = OTHER; note = 2'-O-methylguanosine-3'-phosphorothioate
  modified_base 23: mod_base = OTHER; note = 2'-O-methylguanosine-3'-phosphate
agacacatcgctgatttgtccgg

SEQ ID NO: 1064 - RNA, 23 nt, synthetic construct
  source 1..23: mol_type = other RNA
  modified_base 1: mod_base = OTHER; note = 2'-O-methyladenosine-3'-phosphorothioate
  modified_base 2: mod_base = OTHER; note = 2'-fluoroadenosine-3'-phosphorothioate
  modified_base 3: mod_base = OTHER; note = 2'-O-methyluridine-3'-phosphate
  modified_base 4: mod_base = OTHER; note = 2'-O-methyluridine-3'-phosphate
  modified_base 5: mod_base = OTHER; note = 2'-O-methyladenosine-3'-phosphate
  modified_base 6: mod_base = OTHER; note = 2'-fluoroguanosine-3'-phosphate
  modified_base 7: mod_base = OTHER; note = 2'-O-methyladenosine-3'-phosphate
  modified_base 8: mod_base = OTHER; note = 2'-fluoroadenosine-3'-phosphate
  modified_base 9: mod_base = OTHER; note = 2'-fluoroguanosine-3'-phosphate
  modified_base 10: mod_base = OTHER; note = 2'-O-methyladenosine-3'-phosphate
  modified_base 11: mod_base = OTHER; note = 2'-O-methyladenosine-3'-phosphate
  modified_base 12: mod_base = OTHER; note = 2'-O-methyladenosine-3'-phosphate
  modified_base 13: mod_base = OTHER; note = 2'-O-methyladenosine-3'-phosphate
  modified_base 14: mod_base = OTHER; note = 2'-fluoroguanosine-3'-phosphate
  modified_base 15: mod_base = OTHER; note = 2'-O-methylguanosine-3'-phosphate
  modified_base 16: mod_base = OTHER; note = 2'-fluorouridine-3'-phosphate
  modified_base 17: mod_base = OTHER; note = 2'-O-methylguanosine-3'-phosphate
  modified_base 18: mod_base = OTHER; note = 2'-O-methylguanosine-3'-phosphate
  modified_base 19: mod_base = OTHER; note = 2'-O-methylguanosine-3'-phosphate
  modified_base 20: mod_base = OTHER; note = 2'-O-methyladenosine-3'-phosphate
  modified_base 21: mod_base = OTHER; note = 2'-O-methylguanosine-3'-phosphorothioate
  modified_base 22: mod_base = OTHER; note = 2'-O-methyladenosine-3'-phosphorothioate
  modified_base 23: mod_base = OTHER; note = 2'-O-methylcytidine-3'-phosphate
aattagaagaaaaggtgggagac

SEQ ID NO: 1065 - RNA, 23 nt, synthetic construct
  source 1..23: mol_type = other RNA
  modified_base 1: mod_base = OTHER; note = 2'-O-methyladenosine-3'-phosphorothioate
  modified_base 2: mod_base = OTHER; note = 2'-fluorocytidine-3'-phosphorothioate
  modified_base 3: mod_base = OTHER; note = 2'-O-methyladenosine-3'-phosphate
  modified_base 4: mod_base = OTHER; note = 2'-O-methyluridine-3'-phosphate
  modified_base 5: mod_base = OTHER; note = 2'-O-methyluridine-3'-phosphate
  modified_base 6: mod_base = OTHER; note = 2'-fluoroadenosine-3'-phosphate
  modified_base 7: mod_base = OTHER; note = 2'-O-methylguanosine-3'-phosphate
  modified_base 8: mod_base = OTHER; note = 2'-fluoroadenosine-3'-phosphate
  modified_base 9: mod_base = OTHER; note = 2'-fluoroadenosine-3'-phosphate
  modified_base 10: mod_base = OTHER; note = 2'-O-methylguanosine-3'-phosphate
  modified_base 11: mod_base = OTHER; note = 2'-O-methyladenosine-3'-phosphate
  modified_base 12: mod_base = OTHER; note = 2'-O-methyladenosine-3'-phosphate
  modified_base 13: mod_base = OTHER; note = 2'-O-methyladenosine-3'-phosphate
  modified_base 14: mod_base = OTHER; note = 2'-fluoroadenosine-3'-phosphate
  modified_base 15: mod_base = OTHER; note = 2'-O-methylguanosine-3'-phosphate
  modified_base 16: mod_base = OTHER; note = 2'-fluoroguanosine-3'-phosphate
  modified_base 17: mod_base = OTHER; note = 2'-O-methyluridine-3'-phosphate
  modified_base 18: mod_base = OTHER; note = 2'-O-methylguanosine-3'-phosphate
  modified_base 19: mod_base = OTHER; note = 2'-O-methylguanosine-3'-phosphate
  modified_base 20: mod_base = OTHER; note = 2'-O-methylguanosine-3'-phosphate
  modified_base 21: mod_base = OTHER; note = 2'-O-methyladenosine-3'-phosphorothioate
  modified_base 22: mod_base = OTHER; note = 2'-O-methylguanosine-3'-phosphorothioate
  modified_base 23: mod_base = OTHER; note = 2'-O-methyladenosine-3'-phosphate
acattagaagaaaaggtgggaga

SEQ ID NO: 1066 - RNA, 23 nt, synthetic construct
  source 1..23: mol_type = other RNA
  modified_base 1: mod_base = OTHER; note = 2'-O-methyladenosine-3'-phosphorothioate
  modified_base 2: mod_base = OTHER; note = 2'-fluorouridine -3'-phosphorothioate
  modified_base 3: mod_base = OTHER; note = 2'-O-methylcytidine-3'-phosphate
  modified_base 4: mod_base = OTHER; note = 2'-O-methyladenosine-3'-phosphate
  modified_base 5: mod_base = OTHER; note = 2'-O-methyluridine-3'-phosphate
  modified_base 6: mod_base = OTHER; note = 2'-fluorouridine-3'-phosphate
  modified_base 7: mod_base = OTHER; note = 2'-O-methyladenosine-3'-phosphate
  modified_base 8: mod_base = OTHER; note = 2'-fluoroguanosine-3'-phosphate
  modified_base 9: mod_base = OTHER; note = 2'-fluoroadenosine-3'-phosphate
  modified_base 10: mod_base = OTHER; note = 2'-O-methyladenosine-3'-phosphate
  modified_base 11: mod_base = OTHER; note = 2'-O-methylguanosine-3'-phosphate
  modified_base 12: mod_base = OTHER; note = 2'-O-methyladenosine-3'-phosphate
  modified_base 13: mod_base = OTHER; note = 2'-O-methyladenosine-3'-phosphate
  modified_base 14: mod_base = OTHER; note = 2'-fluoroadenosine-3'-phosphate
  modified_base 15: mod_base = OTHER; note = 2'-O-methyladenosine-3'-phosphate
  modified_base 16: mod_base = OTHER; note = 2'-fluoroguanosine-3'-phosphate
  modified_base 17: mod_base = OTHER; note = 2'-O-methylguanosine-3'-phosphate
  modified_base 18: mod_base = OTHER; note = 2'-O-methyluridine-3'-phosphate
  modified_base 19: mod_base = OTHER; note = 2'-O-methylguanosine-3'-phosphate
  modified_base 20: mod_base = OTHER; note = 2'-O-methylguanosine-3'-phosphate
  modified_base 21: mod_base = OTHER; note = 2'-O-methylguanosine-3'-phosphorothioate
  modified_base 22: mod_base = OTHER; note = 2'-O-methyladenosine-3'-phosphorothioate
  modified_base 23: mod_base = OTHER; note = 2'-O-methylguanosine-3'-phosphate
atcattagaagaaaaggtgggag

SEQ ID NO: 1067 - RNA, 23 nt, synthetic construct
  source 1..23: mol_type = other RNA
  modified_base 1: mod_base = OTHER; note = 2'-O-methyladenosine-3'-phosphorothioate
  modified_base 2: mod_base = OTHER; note = 2'-fluoroguanosine-3'-phosphorothioate
  modified_base 3: mod_base = OTHER; note = 2'-O-methyluridine-3'-phosphate
  modified_base 4: mod_base = OTHER; note = 2'-O-methylcytidine-3'-phosphate
  modified_base 5: mod_base = OTHER; note = 2'-O-methylguanosine-3'-phosphate
  modified_base 6: mod_base = OTHER; note = 2'-fluoroadenosine-3'-phosphate
  modified_base 7: mod_base = OTHER; note = 2'-O-methylcytidine-3'-phosphate
  modified_base 8: mod_base = OTHER; note = 2'-fluorouridine-3'-phosphate
  modified_base 9: mod_base = OTHER; note = 2'-fluorocytidine-3'-phosphate
  modified_base 10: mod_base = OTHER; note = 2'-O-methyladenosine-3'-phosphate
  modified_base 11: mod_base = OTHER; note = 2'-O-methyluridine-3'-phosphate
  modified_base 12: mod_base = OTHER; note = 2'-O-methyluridine-3'-phosphate
  modified_base 13: mod_base = OTHER; note = 2'-O-methyladenosine-3'-phosphate
  modified_base 14: mod_base = OTHER; note = 2'-fluoroguanosine-3'-phosphate
  modified_base 15: mod_base = OTHER; note = 2'-O-methyladenosine-3'-phosphate
  modified_base 16: mod_base = OTHER; note = 2'-fluoroadenosine-3'-phosphate
  modified_base 17: mod_base = OTHER; note = 2'-O-methylguanosine-3'-phosphate
  modified_base 18: mod_base = OTHER; note = 2'-O-methyladenosine-3'-phosphate
  modified_base 19: mod_base = OTHER; note = 2'-O-methyladenosine-3'-phosphate
  modified_base 20: mod_base = OTHER; note = 2'-O-methyladenosine-3'-phosphate
  modified_base 21: mod_base = OTHER; note = 2'-O-methyladenosine-3'-phosphorothioate
  modified_base 22: mod_base = OTHER; note = 2'-O-methylguanosine-3'-phosphorothioate
  modified_base 23: mod_base = OTHER; note = 2'-O-methylguanosine-3'-phosphate
agtcgactcattagaagaaaagg

SEQ ID NO: 1068 - RNA, 23 nt, synthetic construct
  source 1..23: mol_type = other RNA
  modified_base 1: mod_base = OTHER; note = 2'-O-methyladenosine-3'-phosphorothioate
  modified_base 2: mod_base = OTHER; note = 2'-fluoroadenosine-3'-phosphorothioate
  modified_base 3: mod_base = OTHER; note = 2'-O-methylguanosine-3'-phosphate
  modified_base 4: mod_base = OTHER; note = 2'-O-methyluridine-3'-phosphate
  modified_base 5: mod_base = OTHER; note = 2'-O-methylcytidine-3'-phosphate
  modified_base 6: mod_base = OTHER; note = 2'-fluoroguanosine-3'-phosphate
  modified_base 7: mod_base = OTHER; note = 2'-O-methyladenosine-3'-phosphate
  modified_base 8: mod_base = OTHER; note = 2'-fluorocytidine-3'-phosphate
  modified_base 9: mod_base = OTHER; note = 2'-fluorouridine-3'-phosphate
  modified_base 10: mod_base = OTHER; note = 2'-O-methylcytidine-3'-phosphate
  modified_base 11: mod_base = OTHER; note = 2'-O-methyladenosine-3'-phosphate
  modified_base 12: mod_base = OTHER; note = 2'-O-methyluridine-3'-phosphate
  modified_base 13: mod_base = OTHER; note = 2'-O-methyluridine-3'-phosphate
  modified_base 14: mod_base = OTHER; note = 2'-fluoroadenosine-3'-phosphate
  modified_base 15: mod_base = OTHER; note = 2'-O-methylguanosine-3'-phosphate
  modified_base 16: mod_base = OTHER; note = 2'-fluoroadenosine-3'-phosphate
  modified_base 17: mod_base = OTHER; note = 2'-O-methyladenosine-3'-phosphate
  modified_base 18: mod_base = OTHER; note = 2'-O-methylguanosine-3'-phosphate
  modified_base 19: mod_base = OTHER; note = 2'-O-methyladenosine-3'-phosphate
  modified_base 20: mod_base = OTHER; note = 2'-O-methyladenosine-3'-phosphate
  modified_base 21: mod_base = OTHER; note = 2'-O-methyladenosine-3'-phosphorothioate
  modified_base 22: mod_base = OTHER; note = 2'-O-methyladenosine-3'-phosphorothioate
  modified_base 23: mod_base = OTHER; note = 2'-O-methylguanosine-3'-phosphate
aagtcgactcattagaagaaaag

SEQ ID NO: 1069 - RNA, 23 nt, synthetic construct
  source 1..23: mol_type = other RNA
  modified_base 1: mod_base = OTHER; note = 2'-O-methyladenosine-3'-phosphorothioate
  modified_base 2: mod_base = OTHER; note = 2'-fluoroadenosine-3'-phosphorothioate
  modified_base 3: mod_base = OTHER; note = 2'-O-methyladenosine-3'-phosphate
  modified_base 4: mod_base = OTHER; note = 2'-O-methylguanosine-3'-phosphate
  modified_base 5: mod_base = OTHER; note = 2'-O-methyluridine-3'-phosphate
  modified_base 6: mod_base = OTHER; note = 2'-fluorocytidine-3'-phosphate
  modified_base 7: mod_base = OTHER; note = 2'-O-methylguanosine-3'-phosphate
  modified_base 8: mod_base = OTHER; note = 2'-fluoroadenosine-3'-phosphate
  modified_base 9: mod_base = OTHER; note = 2'-fluorocytidine-3'-phosphate
  modified_base 10: mod_base = OTHER; note = 2'-O-methyluridine-3'-phosphate
  modified_base 11: mod_base = OTHER; note = 2'-O-methylcytidine-3'-phosphate
  modified_base 12: mod_base = OTHER; note = 2'-O-methyladenosine-3'-phosphate
  modified_base 13: mod_base = OTHER; note = 2'-O-methyluridine-3'-phosphate
  modified_base 14: mod_base = OTHER; note = 2'-fluorouridine-3'-phosphate
  modified_base 15: mod_base = OTHER; note = 2'-O-methyladenosine-3'-phosphate
  modified_base 16: mod_base = OTHER; note = 2'-fluoroguanosine-3'-phosphate
  modified_base 17: mod_base = OTHER; note = 2'-O-methyladenosine-3'-phosphate
  modified_base 18: mod_base = OTHER; note = 2'-O-methyladenosine-3'-phosphate
  modified_base 19: mod_base = OTHER; note = 2'-O-methylguanosine-3'-phosphate
  modified_base 20: mod_base = OTHER; note = 2'-O-methyladenosine-3'-phosphate
  modified_base 21: mod_base = OTHER; note = 2'-O-methyladenosine-3'-phosphorothioate
  modified_base 22: mod_base = OTHER; note = 2'-O-methyladenosine-3'-phosphorothioate
  modified_base 23: mod_base = OTHER; note = 2'-O-methyladenosine-3'-phosphate
aaagtcgactcattagaagaaaa

SEQ ID NO: 1070 - RNA, 23 nt, synthetic construct
  source 1..23: mol_type = other RNA
  modified_base 1: mod_base = OTHER; note = 2'-O-methyladenosine-3'-phosphorothioate
  modified_base 2: mod_base = OTHER; note = 2'-fluorocytidine-3'-phosphorothioate
  modified_base 3: mod_base = OTHER; note = 2'-O-methyladenosine-3'-phosphate
  modified_base 4: mod_base = OTHER; note = 2'-O-methyladenosine-3'-phosphate
  modified_base 5: mod_base = OTHER; note = 2'-O-methyladenosine-3'-phosphate
  modified_base 6: mod_base = OTHER; note = 2'-fluoroguanosine-3'-phosphate
  modified_base 7: mod_base = OTHER; note = 2'-O-methyluridine-3'-phosphate
  modified_base 8: mod_base = OTHER; note = 2'-fluorocytidine-3'-phosphate
  modified_base 9: mod_base = OTHER; note = 2'-fluoroguanosine-3'-phosphate
  modified_base 10: mod_base = OTHER; note = 2'-O-methyladenosine-3'-phosphate
  modified_base 11: mod_base = OTHER; note = 2'-O-methylcytidine-3'-phosphate
  modified_base 12: mod_base = OTHER; note = 2'-O-methyluridine-3'-phosphate
  modified_base 13: mod_base = OTHER; note = 2'-O-methylcytidine-3'-phosphate
  modified_base 14: mod_base = OTHER; note = 2'-fluoroadenosine-3'-phosphate
  modified_base 15: mod_base = OTHER; note = 2'-O-methyluridine-3'-phosphate
  modified_base 16: mod_base = OTHER; note = 2'-fluorouridine-3'-phosphate
  modified_base 17: mod_base = OTHER; note = 2'-O-methyladenosine-3'-phosphate
  modified_base 18: mod_base = OTHER; note = 2'-O-methylguanosine-3'-phosphate
  modified_base 19: mod_base = OTHER; note = 2'-O-methyladenosine-3'-phosphate
  modified_base 20: mod_base = OTHER; note = 2'-O-methyladenosine-3'-phosphate
  modified_base 21: mod_base = OTHER; note = 2'-O-methylguanosine-3'-phosphorothioate
  modified_base 22: mod_base = OTHER; note = 2'-O-methyladenosine-3'-phosphorothioate
  modified_base 23: mod_base = OTHER; note = 2'-O-methyladenosine-3'-phosphate
acaaagtcgactcattagaagaa

SEQ ID NO: 1071 - RNA, 23 nt, synthetic construct
  source 1..23: mol_type = other RNA
  modified_base 1: mod_base = OTHER; note = 2'-O-methyladenosine-3'-phosphorothioate
  modified_base 2: mod_base = OTHER; note = 2'-fluorouridine -3'-phosphorothioate
  modified_base 3: mod_base = OTHER; note = 2'-O-methylcytidine-3'-phosphate
  modified_base 4: mod_base = OTHER; note = 2'-O-methyladenosine-3'-phosphate
  modified_base 5: mod_base = OTHER; note = 2'-O-methyladenosine-3'-phosphate
  modified_base 6: mod_base = OTHER; note = 2'-fluoroadenosine-3'-phosphate
  modified_base 7: mod_base = OTHER; note = 2'-O-methylguanosine-3'-phosphate
  modified_base 8: mod_base = OTHER; note = 2'-fluorouridine-3'-phosphate
  modified_base 9: mod_base = OTHER; note = 2'-fluorocytidine-3'-phosphate
  modified_base 10: mod_base = OTHER; note = 2'-O-methylguanosine-3'-phosphate
  modified_base 11: mod_base = OTHER; note = 2'-O-methyladenosine-3'-phosphate
  modified_base 12: mod_base = OTHER; note = 2'-O-methylcytidine-3'-phosphate
  modified_base 13: mod_base = OTHER; note = 2'-O-methyluridine-3'-phosphate
  modified_base 14: mod_base = OTHER; note = 2'-fluorocytidine-3'-phosphate
  modified_base 15: mod_base = OTHER; note = 2'-O-methyladenosine-3'-phosphate
  modified_base 16: mod_base = OTHER; note = 2'-fluorouridine-3'-phosphate
  modified_base 17: mod_base = OTHER; note = 2'-O-methyluridine-3'-phosphate
  modified_base 18: mod_base = OTHER; note = 2'-O-methyladenosine-3'-phosphate
  modified_base 19: mod_base = OTHER; note = 2'-O-methylguanosine-3'-phosphate
  modified_base 20: mod_base = OTHER; note = 2'-O-methyladenosine-3'-phosphate
  modified_base 21: mod_base = OTHER; note = 2'-O-methyladenosine-3'-phosphorothioate
  modified_base 22: mod_base = OTHER; note = 2'-O-methylguanosine-3'-phosphorothioate
  modified_base 23: mod_base = OTHER; note = 2'-O-methyladenosine-3'-phosphate
atcaaagtcgactcattagaaga

SEQ ID NO: 1072 - RNA, 23 nt, synthetic construct
  source 1..23: mol_type = other RNA
  modified_base 1: mod_base = OTHER; note = 2'-O-methyladenosine-3'-phosphorothioate
  modified_base 2: mod_base = OTHER; note = 2'-fluorocytidine-3'-phosphorothioate
  modified_base 3: mod_base = OTHER; note = 2'-O-methyluridine-3'-phosphate
  modified_base 4: mod_base = OTHER; note = 2'-O-methylcytidine-3'-phosphate
  modified_base 5: mod_base = OTHER; note = 2'-O-methyladenosine-3'-phosphate
  modified_base 6: mod_base = OTHER; note = 2'-fluoroadenosine-3'-phosphate
  modified_base 7: mod_base = OTHER; note = 2'-O-methyladenosine-3'-phosphate
  modified_base 8: mod_base = OTHER; note = 2'-fluoroguanosine-3'-phosphate
  modified_base 9: mod_base = OTHER; note = 2'-fluorouridine-3'-phosphate
  modified_base 10: mod_base = OTHER; note = 2'-O-methylcytidine-3'-phosphate
  modified_base 11: mod_base = OTHER; note = 2'-O-methylguanosine-3'-phosphate
  modified_base 12: mod_base = OTHER; note = 2'-O-methyladenosine-3'-phosphate
  modified_base 13: mod_base = OTHER; note = 2'-O-methylcytidine-3'-phosphate
  modified_base 14: mod_base = OTHER; note = 2'-fluorouridine-3'-phosphate
  modified_base 15: mod_base = OTHER; note = 2'-O-methylcytidine-3'-phosphate
  modified_base 16: mod_base = OTHER; note = 2'-fluoroadenosine-3'-phosphate
  modified_base 17: mod_base = OTHER; note = 2'-O-methyluridine-3'-phosphate
  modified_base 18: mod_base = OTHER; note = 2'-O-methyluridine-3'-phosphate
  modified_base 19: mod_base = OTHER; note = 2'-O-methyladenosine-3'-phosphate
  modified_base 20: mod_base = OTHER; note = 2'-O-methylguanosine-3'-phosphate
  modified_base 21: mod_base = OTHER; note = 2'-O-methyladenosine-3'-phosphorothioate
  modified_base 22: mod_base = OTHER; note = 2'-O-methyladenosine-3'-phosphorothioate
  modified_base 23: mod_base = OTHER; note = 2'-O-methylguanosine-3'-phosphate
actcaaagtcgactcattagaag

SEQ ID NO: 1073 - RNA, 23 nt, synthetic construct
  source 1..23: mol_type = other RNA
  modified_base 1: mod_base = OTHER; note = 2'-O-methyladenosine-3'-phosphorothioate
  modified_base 2: mod_base = OTHER; note = 2'-fluoroguanosine-3'-phosphorothioate
  modified_base 3: mod_base = OTHER; note = 2'-O-methylcytidine-3'-phosphate
  modified_base 4: mod_base = OTHER; note = 2'-O-methyluridine-3'-phosphate
  modified_base 5: mod_base = OTHER; note = 2'-O-methylcytidine-3'-phosphate
  modified_base 6: mod_base = OTHER; note = 2'-fluoroadenosine-3'-phosphate
  modified_base 7: mod_base = OTHER; note = 2'-O-methyladenosine-3'-phosphate
  modified_base 8: mod_base = OTHER; note = 2'-fluoroadenosine-3'-phosphate
  modified_base 9: mod_base = OTHER; note = 2'-fluoroguanosine-3'-phosphate
  modified_base 10: mod_base = OTHER; note = 2'-O-methyluridine-3'-phosphate
  modified_base 11: mod_base = OTHER; note = 2'-O-methylcytidine-3'-phosphate
  modified_base 12: mod_base = OTHER; note = 2'-O-methylguanosine-3'-phosphate
  modified_base 13: mod_base = OTHER; note = 2'-O-methyladenosine-3'-phosphate
  modified_base 14: mod_base = OTHER; note = 2'-fluorocytidine-3'-phosphate
  modified_base 15: mod_base = OTHER; note = 2'-O-methyluridine-3'-phosphate
  modified_base 16: mod_base = OTHER; note = 2'-fluorocytidine-3'-phosphate
  modified_base 17: mod_base = OTHER; note = 2'-O-methyladenosine-3'-phosphate
  modified_base 18: mod_base = OTHER; note = 2'-O-methyluridine-3'-phosphate
  modified_base 19: mod_base = OTHER; note = 2'-O-methyluridine-3'-phosphate
  modified_base 20: mod_base = OTHER; note = 2'-O-methyladenosine-3'-phosphate
  modified_base 21: mod_base = OTHER; note = 2'-O-methylguanosine-3'-phosphorothioate
  modified_base 22: mod_base = OTHER; note = 2'-O-methyladenosine-3'-phosphorothioate
  modified_base 23: mod_base = OTHER; note = 2'-O-methyladenosine-3'-phosphate
agctcaaagtcgactcattagaa

SEQ ID NO: 1074 - RNA, 23 nt, synthetic construct
  source 1..23: mol_type = other RNA
  modified_base 1: mod_base = OTHER; note = 2'-O-methyladenosine-3'-phosphorothioate
  modified_base 2: mod_base = OTHER; note = 2'-fluoroadenosine-3'-phosphorothioate
  modified_base 3: mod_base = OTHER; note = 2'-O-methylguanosine-3'-phosphate
  modified_base 4: mod_base = OTHER; note = 2'-O-methylcytidine-3'-phosphate
  modified_base 5: mod_base = OTHER; note = 2'-O-methyluridine-3'-phosphate
  modified_base 6: mod_base = OTHER; note = 2'-fluorocytidine-3'-phosphate
  modified_base 7: mod_base = OTHER; note = 2'-O-methyladenosine-3'-phosphate
  modified_base 8: mod_base = OTHER; note = 2'-fluoroadenosine-3'-phosphate
  modified_base 9: mod_base = OTHER; note = 2'-fluoroadenosine-3'-phosphate
  modified_base 10: mod_base = OTHER; note = 2'-O-methylguanosine-3'-phosphate
  modified_base 11: mod_base = OTHER; note = 2'-O-methyluridine-3'-phosphate
  modified_base 12: mod_base = OTHER; note = 2'-O-methylcytidine-3'-phosphate
  modified_base 13: mod_base = OTHER; note = 2'-O-methylguanosine-3'-phosphate
  modified_base 14: mod_base = OTHER; note = 2'-fluoroadenosine-3'-phosphate
  modified_base 15: mod_base = OTHER; note = 2'-O-methylcytidine-3'-phosphate
  modified_base 16: mod_base = OTHER; note = 2'-fluorouridine-3'-phosphate
  modified_base 17: mod_base = OTHER; note = 2'-O-methylcytidine-3'-phosphate
  modified_base 18: mod_base = OTHER; note = 2'-O-methyladenosine-3'-phosphate
  modified_base 19: mod_base = OTHER; note = 2'-O-methyluridine-3'-phosphate
  modified_base 20: mod_base = OTHER; note = 2'-O-methyluridine-3'-phosphate
  modified_base 21: mod_base = OTHER; note = 2'-O-methyladenosine-3'-phosphorothioate
  modified_base 22: mod_base = OTHER; note = 2'-O-methylguanosine-3'-phosphorothioate
  modified_base 23: mod_base = OTHER; note = 2'-O-methyladenosine-3'-phosphate
aagctcaaagtcgactcattaga

SEQ ID NO: 1075 - RNA, 23 nt, synthetic construct
  source 1..23: mol_type = other RNA
  modified_base 1: mod_base = OTHER; note = 2'-O-methyladenosine-3'-phosphorothioate
  modified_base 2: mod_base = OTHER; note = 2'-fluorocytidine-3'-phosphorothioate
  modified_base 3: mod_base = OTHER; note = 2'-O-methyluridine-3'-phosphate
  modified_base 4: mod_base = OTHER; note = 2'-O-methylguanosine-3'-phosphate
  modified_base 5: mod_base = OTHER; note = 2'-O-methylcytidine-3'-phosphate
  modified_base 6: mod_base = OTHER; note = 2'-fluorouridine-3'-phosphate
  modified_base 7: mod_base = OTHER; note = 2'-O-methyluridine-3'-phosphate
  modified_base 8: mod_base = OTHER; note = 2'-fluorouridine-3'-phosphate
  modified_base 9: mod_base = OTHER; note = 2'-fluorocytidine-3'-phosphate
  modified_base 10: mod_base = OTHER; note = 2'-O-methylcytidine-3'-phosphate
  modified_base 11: mod_base = OTHER; note = 2'-O-methyladenosine-3'-phosphate
  modified_base 12: mod_base = OTHER; note = 2'-O-methylguanosine-3'-phosphate
  modified_base 13: mod_base = OTHER; note = 2'-O-methylcytidine-3'-phosphate
  modified_base 14: mod_base = OTHER; note = 2'-fluorouridine-3'-phosphate
  modified_base 15: mod_base = OTHER; note = 2'-O-methylcytidine-3'-phosphate
  modified_base 16: mod_base = OTHER; note = 2'-fluoroadenosine-3'-phosphate
  modified_base 17: mod_base = OTHER; note = 2'-O-methyladenosine-3'-phosphate
  modified_base 18: mod_base = OTHER; note = 2'-O-methyladenosine-3'-phosphate
  modified_base 19: mod_base = OTHER; note = 2'-O-methylguanosine-3'-phosphate
  modified_base 20: mod_base = OTHER; note = 2'-O-methyluridine-3'-phosphate
  modified_base 21: mod_base = OTHER; note = 2'-O-methylcytidine-3'-phosphorothioate
  modified_base 22: mod_base = OTHER; note = 2'-O-methylguanosine-3'-phosphorothioate
  modified_base 23: mod_base = OTHER; note = 2'-O-methyladenosine-3'-phosphate
actgctttccagctcaaagtcga

SEQ ID NO: 1076 - RNA, 23 nt, synthetic construct
  source 1..23: mol_type = other RNA
  modified_base 1: mod_base = OTHER; note = 2'-O-methyladenosine-3'-phosphorothioate
  modified_base 2: mod_base = OTHER; note = 2'-fluoroadenosine-3'-phosphorothioate
  modified_base 3: mod_base = OTHER; note = 2'-O-methyladenosine-3'-phosphate
  modified_base 4: mod_base = OTHER; note = 2'-O-methyladenosine-3'-phosphate
  modified_base 5: mod_base = OTHER; note = 2'-O-methylcytidine-3'-phosphate
  modified_base 6: mod_base = OTHER; note = 2'-fluoroguanosine-3'-phosphate
  modified_base 7: mod_base = OTHER; note = 2'-O-methylguanosine-3'-phosphate
  modified_base 8: mod_base = OTHER; note = 2'-fluorocytidine-3'-phosphate
  modified_base 9: mod_base = OTHER; note = 2'-fluorouridine-3'-phosphate
  modified_base 10: mod_base = OTHER; note = 2'-O-methylguanosine-3'-phosphate
  modified_base 11: mod_base = OTHER; note = 2'-O-methylcytidine-3'-phosphate
  modified_base 12: mod_base = OTHER; note = 2'-O-methyluridine-3'-phosphate
  modified_base 13: mod_base = OTHER; note = 2'-O-methyluridine-3'-phosphate
  modified_base 14: mod_base = OTHER; note = 2'-fluorouridine-3'-phosphate
  modified_base 15: mod_base = OTHER; note = 2'-O-methylcytidine-3'-phosphate
  modified_base 16: mod_base = OTHER; note = 2'-fluorocytidine-3'-phosphate
  modified_base 17: mod_base = OTHER; note = 2'-O-methyladenosine-3'-phosphate
  modified_base 18: mod_base = OTHER; note = 2'-O-methylguanosine-3'-phosphate
  modified_base 19: mod_base = OTHER; note = 2'-O-methylcytidine-3'-phosphate
  modified_base 20: mod_base = OTHER; note = 2'-O-methyluridine-3'-phosphate
  modified_base 21: mod_base = OTHER; note = 2'-O-methylcytidine-3'-phosphorothioate
  modified_base 22: mod_base = OTHER; note = 2'-O-methyladenosine-3'-phosphorothioate
  modified_base 23: mod_base = OTHER; note = 2'-O-methyladenosine-3'-phosphate
aaaacggctgctttccagctcaa

SEQ ID NO: 1077 - RNA, 23 nt, synthetic construct
  source 1..23: mol_type = other RNA
  modified_base 1: mod_base = OTHER; note = 2'-O-methyladenosine-3'-phosphorothioate
  modified_base 2: mod_base = OTHER; note = 2'-fluoroguanosine-3'-phosphorothioate
  modified_base 3: mod_base = OTHER; note = 2'-O-methyladenosine-3'-phosphate
  modified_base 4: mod_base = OTHER; note = 2'-O-methyladenosine-3'-phosphate
  modified_base 5: mod_base = OTHER; note = 2'-O-methyladenosine-3'-phosphate
  modified_base 6: mod_base = OTHER; note = 2'-fluorocytidine-3'-phosphate
  modified_base 7: mod_base = OTHER; note = 2'-O-methylguanosine-3'-phosphate
  modified_base 8: mod_base = OTHER; note = 2'-fluoroguanosine-3'-phosphate
  modified_base 9: mod_base = OTHER; note = 2'-fluorocytidine-3'-phosphate
  modified_base 10: mod_base = OTHER; note = 2'-O-methyluridine-3'-phosphate
  modified_base 11: mod_base = OTHER; note = 2'-O-methylguanosine-3'-phosphate
  modified_base 12: mod_base = OTHER; note = 2'-O-methylcytidine-3'-phosphate
  modified_base 13: mod_base = OTHER; note = 2'-O-methyluridine-3'-phosphate
  modified_base 14: mod_base = OTHER; note = 2'-fluorouridine-3'-phosphate
  modified_base 15: mod_base = OTHER; note = 2'-O-methyluridine-3'-phosphate
  modified_base 16: mod_base = OTHER; note = 2'-fluorocytidine-3'-phosphate
  modified_base 17: mod_base = OTHER; note = 2'-O-methylcytidine-3'-phosphate
  modified_base 18: mod_base = OTHER; note = 2'-O-methyladenosine-3'-phosphate
  modified_base 19: mod_base = OTHER; note = 2'-O-methylguanosine-3'-phosphate
  modified_base 20: mod_base = OTHER; note = 2'-O-methylcytidine-3'-phosphate
  modified_base 21: mod_base = OTHER; note = 2'-O-methyluridine-3'-phosphorothioate
  modified_base 22: mod_base = OTHER; note = 2'-O-methylcytidine-3'-phosphorothioate
  modified_base 23: mod_base = OTHER; note = 2'-O-methyladenosine-3'-phosphate
agaaacggctgctttccagctca

SEQ ID NO: 1078 - RNA, 23 nt, synthetic construct
  source 1..23: mol_type = other RNA
  modified_base 1: mod_base = OTHER; note = 2'-O-methyladenosine-3'-phosphorothioate
  modified_base 2: mod_base = OTHER; note = 2'-fluoroadenosine-3'-phosphorothioate
  modified_base 3: mod_base = OTHER; note = 2'-O-methylguanosine-3'-phosphate
  modified_base 4: mod_base = OTHER; note = 2'-O-methyladenosine-3'-phosphate
  modified_base 5: mod_base = OTHER; note = 2'-O-methyladenosine-3'-phosphate
  modified_base 6: mod_base = OTHER; note = 2'-fluoroadenosine-3'-phosphate
  modified_base 7: mod_base = OTHER; note = 2'-O-methylcytidine-3'-phosphate
  modified_base 8: mod_base = OTHER; note = 2'-fluoroguanosine-3'-phosphate
  modified_base 9: mod_base = OTHER; note = 2'-fluoroguanosine-3'-phosphate
  modified_base 10: mod_base = OTHER; note = 2'-O-methylcytidine-3'-phosphate
  modified_base 11: mod_base = OTHER; note = 2'-O-methyluridine-3'-phosphate
  modified_base 12: mod_base = OTHER; note = 2'-O-methylguanosine-3'-phosphate
  modified_base 13: mod_base = OTHER; note = 2'-O-methylcytidine-3'-phosphate
  modified_base 14: mod_base = OTHER; note = 2'-fluorouridine-3'-phosphate
  modified_base 15: mod_base = OTHER; note = 2'-O-methyluridine-3'-phosphate
  modified_base 16: mod_base = OTHER; note = 2'-fluorouridine-3'-phosphate
  modified_base 17: mod_base = OTHER; note = 2'-O-methylcytidine-3'-phosphate
  modified_base 18: mod_base = OTHER; note = 2'-O-methylcytidine-3'-phosphate
  modified_base 19: mod_base = OTHER; note = 2'-O-methyladenosine-3'-phosphate
  modified_base 20: mod_base = OTHER; note = 2'-O-methylguanosine-3'-phosphate
  modified_base 21: mod_base = OTHER; note = 2'-O-methylcytidine-3'-phosphorothioate
  modified_base 22: mod_base = OTHER; note = 2'-O-methyluridine-3'-phosphorothioate
  modified_base 23: mod_base = OTHER; note = 2'-O-methylcytidine-3'-phosphate
aagaaacggctgctttccagctc

SEQ ID NO: 1079 - RNA, 23 nt, synthetic construct
  source 1..23: mol_type = other RNA
  modified_base 1: mod_base = OTHER; note = 2'-O-methyladenosine-3'-phosphorothioate
  modified_base 2: mod_base = OTHER; note = 2'-fluoroguanosine-3'-phosphorothioate
  modified_base 3: mod_base = OTHER; note = 2'-O-methyladenosine-3'-phosphate
  modified_base 4: mod_base = OTHER; note = 2'-O-methylguanosine-3'-phosphate
  modified_base 5: mod_base = OTHER; note = 2'-O-methyladenosine-3'-phosphate
  modified_base 6: mod_base = OTHER; note = 2'-fluoroadenosine-3'-phosphate
  modified_base 7: mod_base = OTHER; note = 2'-O-methyladenosine-3'-phosphate
  modified_base 8: mod_base = OTHER; note = 2'-fluorocytidine-3'-phosphate
  modified_base 9: mod_base = OTHER; note = 2'-fluoroguanosine-3'-phosphate
  modified_base 10: mod_base = OTHER; note = 2'-O-methylguanosine-3'-phosphate
  modified_base 11: mod_base = OTHER; note = 2'-O-methylcytidine-3'-phosphate
  modified_base 12: mod_base = OTHER; note = 2'-O-methyluridine-3'-phosphate
  modified_base 13: mod_base = OTHER; note = 2'-O-methylguanosine-3'-phosphate
  modified_base 14: mod_base = OTHER; note = 2'-fluorocytidine-3'-phosphate
  modified_base 15: mod_base = OTHER; note = 2'-O-methyluridine-3'-phosphate
  modified_base 16: mod_base = OTHER; note = 2'-fluorouridine-3'-phosphate
  modified_base 17: mod_base = OTHER; note = 2'-O-methyluridine-3'-phosphate
  modified_base 18: mod_base = OTHER; note = 2'-O-methylcytidine-3'-phosphate
  modified_base 19: mod_base = OTHER; note = 2'-O-methylcytidine-3'-phosphate
  modified_base 20: mod_base = OTHER; note = 2'-O-methyladenosine-3'-phosphate
  modified_base 21: mod_base = OTHER; note = 2'-O-methylguanosine-3'-phosphorothioate
  modified_base 22: mod_base = OTHER; note = 2'-O-methylcytidine-3'-phosphorothioate
  modified_base 23: mod_base = OTHER; note = 2'-O-methyluridine-3'-phosphate
agagaaacggctgctttccagct

SEQ ID NO: 1080 - RNA, 23 nt, synthetic construct
  source 1..23: mol_type = other RNA
  modified_base 1: mod_base = OTHER; note = 2'-O-methyladenosine-3'-phosphorothioate
  modified_base 2: mod_base = OTHER; note = 2'-fluoroadenosine-3'-phosphorothioate
  modified_base 3: mod_base = OTHER; note = 2'-O-methylguanosine-3'-phosphate
  modified_base 4: mod_base = OTHER; note = 2'-O-methylguanosine-3'-phosphate
  modified_base 5: mod_base = OTHER; note = 2'-O-methyladenosine-3'-phosphate
  modified_base 6: mod_base = OTHER; note = 2'-fluoroguanosine-3'-phosphate
  modified_base 7: mod_base = OTHER; note = 2'-O-methyladenosine-3'-phosphate
  modified_base 8: mod_base = OTHER; note = 2'-fluoroadenosine-3'-phosphate
  modified_base 9: mod_base = OTHER; note = 2'-fluoroadenosine-3'-phosphate
  modified_base 10: mod_base = OTHER; note = 2'-O-methylcytidine-3'-phosphate
  modified_base 11: mod_base = OTHER; note = 2'-O-methylguanosine-3'-phosphate
  modified_base 12: mod_base = OTHER; note = 2'-O-methylguanosine-3'-phosphate
  modified_base 13: mod_base = OTHER; note = 2'-O-methylcytidine-3'-phosphate
  modified_base 14: mod_base = OTHER; note = 2'-fluorouridine-3'-phosphate
  modified_base 15: mod_base = OTHER; note = 2'-O-methylguanosine-3'-phosphate
  modified_base 16: mod_base = OTHER; note = 2'-fluorocytidine-3'-phosphate
  modified_base 17: mod_base = OTHER; note = 2'-O-methyluridine-3'-phosphate
  modified_base 18: mod_base = OTHER; note = 2'-O-methyluridine-3'-phosphate
  modified_base 19: mod_base = OTHER; note = 2'-O-methyluridine-3'-phosphate
  modified_base 20: mod_base = OTHER; note = 2'-O-methylcytidine-3'-phosphate
  modified_base 21: mod_base = OTHER; note = 2'-O-methylcytidine-3'-phosphorothioate
  modified_base 22: mod_base = OTHER; note = 2'-O-methyladenosine-3'-phosphorothioate
  modified_base 23: mod_base = OTHER; note = 2'-O-methylguanosine-3'-phosphate
aaggagaaacggctgctttccag

SEQ ID NO: 1081 - RNA, 23 nt, synthetic construct
  source 1..23: mol_type = other RNA
  modified_base 1: mod_base = OTHER; note = 2'-O-methyladenosine-3'-phosphorothioate
  modified_base 2: mod_base = OTHER; note = 2'-fluorocytidine-3'-phosphorothioate
  modified_base 3: mod_base = OTHER; note = 2'-O-methyladenosine-3'-phosphate
  modified_base 4: mod_base = OTHER; note = 2'-O-methyladenosine-3'-phosphate
  modified_base 5: mod_base = OTHER; note = 2'-O-methylguanosine-3'-phosphate
  modified_base 6: mod_base = OTHER; note = 2'-fluoroguanosine-3'-phosphate
  modified_base 7: mod_base = OTHER; note = 2'-O-methyladenosine-3'-phosphate
  modified_base 8: mod_base = OTHER; note = 2'-fluoroguanosine-3'-phosphate
  modified_base 9: mod_base = OTHER; note = 2'-fluoroadenosine-3'-phosphate
  modified_base 10: mod_base = OTHER; note = 2'-O-methyladenosine-3'-phosphate
  modified_base 11: mod_base = OTHER; note = 2'-O-methyladenosine-3'-phosphate
  modified_base 12: mod_base = OTHER; note = 2'-O-methylcytidine-3'-phosphate
  modified_base 13: mod_base = OTHER; note = 2'-O-methylguanosine-3'-phosphate
  modified_base 14: mod_base = OTHER; note = 2'-fluoroguanosine-3'-phosphate
  modified_base 15: mod_base = OTHER; note = 2'-O-methylcytidine-3'-phosphate
  modified_base 16: mod_base = OTHER; note = 2'-fluorouridine-3'-phosphate
  modified_base 17: mod_base = OTHER; note = 2'-O-methylguanosine-3'-phosphate
  modified_base 18: mod_base = OTHER; note = 2'-O-methylcytidine-3'-phosphate
  modified_base 19: mod_base = OTHER; note = 2'-O-methyluridine-3'-phosphate
  modified_base 20: mod_base = OTHER; note = 2'-O-methyluridine-3'-phosphate
  modified_base 21: mod_base = OTHER; note = 2'-O-methyluridine-3'-phosphorothioate
  modified_base 22: mod_base = OTHER; note = 2'-O-methylcytidine-3'-phosphorothioate
  modified_base 23: mod_base = OTHER; note = 2'-O-methylcytidine-3'-phosphate
acaaggagaaacggctgctttcc

SEQ ID NO: 1082 - RNA, 23 nt, synthetic construct
  source 1..23: mol_type = other RNA
  modified_base 1: mod_base = OTHER; note = 2'-O-methyladenosine-3'-phosphorothioate
  modified_base 2: mod_base = OTHER; note = 2'-fluoroadenosine-3'-phosphorothioate
  modified_base 3: mod_base = OTHER; note = 2'-O-methylcytidine-3'-phosphate
  modified_base 4: mod_base = OTHER; note = 2'-O-methylcytidine-3'-phosphate
  modified_base 5: mod_base = OTHER; note = 2'-O-methyladenosine-3'-phosphate
  modified_base 6: mod_base = OTHER; note = 2'-fluoroadenosine-3'-phosphate
  modified_base 7: mod_base = OTHER; note = 2'-O-methylguanosine-3'-phosphate
  modified_base 8: mod_base = OTHER; note = 2'-fluoroguanosine-3'-phosphate
  modified_base 9: mod_base = OTHER; note = 2'-fluoroadenosine-3'-phosphate
  modified_base 10: mod_base = OTHER; note = 2'-O-methylguanosine-3'-phosphate
  modified_base 11: mod_base = OTHER; note = 2'-O-methyladenosine-3'-phosphate
  modified_base 12: mod_base = OTHER; note = 2'-O-methyladenosine-3'-phosphate
  modified_base 13: mod_base = OTHER; note = 2'-O-methyladenosine-3'-phosphate
  modified_base 14: mod_base = OTHER; note = 2'-fluorocytidine-3'-phosphate
  modified_base 15: mod_base = OTHER; note = 2'-O-methylguanosine-3'-phosphate
  modified_base 16: mod_base = OTHER; note = 2'-fluoroguanosine-3'-phosphate
  modified_base 17: mod_base = OTHER; note = 2'-O-methylcytidine-3'-phosphate
  modified_base 18: mod_base = OTHER; note = 2'-O-methyluridine-3'-phosphate
  modified_base 19: mod_base = OTHER; note = 2'-O-methylguanosine-3'-phosphate
  modified_base 20: mod_base = OTHER; note = 2'-O-methylcytidine-3'-phosphate
  modified_base 21: mod_base = OTHER; note = 2'-O-methyluridine-3'-phosphorothioate
  modified_base 22: mod_base = OTHER; note = 2'-O-methyluridine-3'-phosphorothioate
  modified_base 23: mod_base = OTHER; note = 2'-O-methyluridine-3'-phosphate
aaccaaggagaaacggctgcttt

SEQ ID NO: 1083 - RNA, 23 nt, synthetic construct
  source 1..23: mol_type = other RNA
  modified_base 1: mod_base = OTHER; note = 2'-O-methyladenosine-3'-phosphorothioate
  modified_base 2: mod_base = OTHER; note = 2'-fluoroguanosine-3'-phosphorothioate
  modified_base 3: mod_base = OTHER; note = 2'-O-methyladenosine-3'-phosphate
  modified_base 4: mod_base = OTHER; note = 2'-O-methylcytidine-3'-phosphate
  modified_base 5: mod_base = OTHER; note = 2'-O-methylcytidine-3'-phosphate
  modified_base 6: mod_base = OTHER; note = 2'-fluoroadenosine-3'-phosphate
  modified_base 7: mod_base = OTHER; note = 2'-O-methyladenosine-3'-phosphate
  modified_base 8: mod_base = OTHER; note = 2'-fluoroguanosine-3'-phosphate
  modified_base 9: mod_base = OTHER; note = 2'-fluoroguanosine-3'-phosphate
  modified_base 10: mod_base = OTHER; note = 2'-O-methyladenosine-3'-phosphate
  modified_base 11: mod_base = OTHER; note = 2'-O-methylguanosine-3'-phosphate
  modified_base 12: mod_base = OTHER; note = 2'-O-methyladenosine-3'-phosphate
  modified_base 13: mod_base = OTHER; note = 2'-O-methyladenosine-3'-phosphate
  modified_base 14: mod_base = OTHER; note = 2'-fluoroadenosine-3'-phosphate
  modified_base 15: mod_base = OTHER; note = 2'-O-methylcytidine-3'-phosphate
  modified_base 16: mod_base = OTHER; note = 2'-fluoroguanosine-3'-phosphate
  modified_base 17: mod_base = OTHER; note = 2'-O-methylguanosine-3'-phosphate
  modified_base 18: mod_base = OTHER; note = 2'-O-methylcytidine-3'-phosphate
  modified_base 19: mod_base = OTHER; note = 2'-O-methyluridine-3'-phosphate
  modified_base 20: mod_base = OTHER; note = 2'-O-methylguanosine-3'-phosphate
  modified_base 21: mod_base = OTHER; note = 2'-O-methylcytidine-3'-phosphorothioate
  modified_base 22: mod_base = OTHER; note = 2'-O-methyluridine-3'-phosphorothioate
  modified_base 23: mod_base = OTHER; note = 2'-O-methyluridine-3'-phosphate
agaccaaggagaaacggctgctt

SEQ ID NO: 1084 - RNA, 23 nt, synthetic construct
  source 1..23: mol_type = other RNA
  modified_base 1: mod_base = OTHER; note = 2'-O-methyladenosine-3'-phosphorothioate
  modified_base 2: mod_base = OTHER; note = 2'-fluoroadenosine-3'-phosphorothioate
  modified_base 3: mod_base = OTHER; note = 2'-O-methylguanosine-3'-phosphate
  modified_base 4: mod_base = OTHER; note = 2'-O-methyladenosine-3'-phosphate
  modified_base 5: mod_base = OTHER; note = 2'-O-methylcytidine-3'-phosphate
  modified_base 6: mod_base = OTHER; note = 2'-fluorocytidine-3'-phosphate
  modified_base 7: mod_base = OTHER; note = 2'-O-methyladenosine-3'-phosphate
  modified_base 8: mod_base = OTHER; note = 2'-fluoroadenosine-3'-phosphate
  modified_base 9: mod_base = OTHER; note = 2'-fluoroguanosine-3'-phosphate
  modified_base 10: mod_base = OTHER; note = 2'-O-methylguanosine-3'-phosphate
  modified_base 11: mod_base = OTHER; note = 2'-O-methyladenosine-3'-phosphate
  modified_base 12: mod_base = OTHER; note = 2'-O-methylguanosine-3'-phosphate
  modified_base 13: mod_base = OTHER; note = 2'-O-methyladenosine-3'-phosphate
  modified_base 14: mod_base = OTHER; note = 2'-fluoroadenosine-3'-phosphate
  modified_base 15: mod_base = OTHER; note = 2'-O-methyladenosine-3'-phosphate
  modified_base 16: mod_base = OTHER; note = 2'-fluorocytidine-3'-phosphate
  modified_base 17: mod_base = OTHER; note = 2'-O-methylguanosine-3'-phosphate
  modified_base 18: mod_base = OTHER; note = 2'-O-methylguanosine-3'-phosphate
  modified_base 19: mod_base = OTHER; note = 2'-O-methylcytidine-3'-phosphate
  modified_base 20: mod_base = OTHER; note = 2'-O-methyluridine-3'-phosphate
  modified_base 21: mod_base = OTHER; note = 2'-O-methylguanosine-3'-phosphorothioate
  modified_base 22: mod_base = OTHER; note = 2'-O-methylcytidine-3'-phosphorothioate
  modified_base 23: mod_base = OTHER; note = 2'-O-methyluridine-3'-phosphate
aagaccaaggagaaacggctgct

SEQ ID NO: 1085 - RNA, 23 nt, synthetic construct
  source 1..23: mol_type = other RNA
  modified_base 1: mod_base = OTHER; note = 2'-O-methyladenosine-3'-phosphorothioate
  modified_base 2: mod_base = OTHER; note = 2'-fluoroadenosine-3'-phosphorothioate
  modified_base 3: mod_base = OTHER; note = 2'-O-methylcytidine-3'-phosphate
  modified_base 4: mod_base = OTHER; note = 2'-O-methyluridine-3'-phosphate
  modified_base 5: mod_base = OTHER; note = 2'-O-methyluridine-3'-phosphate
  modified_base 6: mod_base = OTHER; note = 2'-fluoroadenosine-3'-phosphate
  modified_base 7: mod_base = OTHER; note = 2'-O-methylguanosine-3'-phosphate
  modified_base 8: mod_base = OTHER; note = 2'-fluoroadenosine-3'-phosphate
  modified_base 9: mod_base = OTHER; note = 2'-fluorocytidine-3'-phosphate
  modified_base 10: mod_base = OTHER; note = 2'-O-methylcytidine-3'-phosphate
  modified_base 11: mod_base = OTHER; note = 2'-O-methyladenosine-3'-phosphate
  modified_base 12: mod_base = OTHER; note = 2'-O-methyladenosine-3'-phosphate
  modified_base 13: mod_base = OTHER; note = 2'-O-methylguanosine-3'-phosphate
  modified_base 14: mod_base = OTHER; note = 2'-fluoroguanosine-3'-phosphate
  modified_base 15: mod_base = OTHER; note = 2'-O-methyladenosine-3'-phosphate
  modified_base 16: mod_base = OTHER; note = 2'-fluoroguanosine-3'-phosphate
  modified_base 17: mod_base = OTHER; note = 2'-O-methyladenosine-3'-phosphate
  modified_base 18: mod_base = OTHER; note = 2'-O-methyladenosine-3'-phosphate
  modified_base 19: mod_base = OTHER; note = 2'-O-methyladenosine-3'-phosphate
  modified_base 20: mod_base = OTHER; note = 2'-O-methylcytidine-3'-phosphate
  modified_base 21: mod_base = OTHER; note = 2'-O-methylguanosine-3'-phosphorothioate
  modified_base 22: mod_base = OTHER; note = 2'-O-methylguanosine-3'-phosphorothioate
  modified_base 23: mod_base = OTHER; note = 2'-O-methylcytidine-3'-phosphate
aacttagaccaaggagaaacggc

SEQ ID NO: 1086 - RNA, 23 nt, synthetic construct
  source 1..23: mol_type = other RNA
  modified_base 1: mod_base = OTHER; note = 2'-O-methyladenosine-3'-phosphorothioate
  modified_base 2: mod_base = OTHER; note = 2'-fluorocytidine-3'-phosphorothioate
  modified_base 3: mod_base = OTHER; note = 2'-O-methyladenosine-3'-phosphate
  modified_base 4: mod_base = OTHER; note = 2'-O-methylcytidine-3'-phosphate
  modified_base 5: mod_base = OTHER; note = 2'-O-methyluridine-3'-phosphate
  modified_base 6: mod_base = OTHER; note = 2'-fluorouridine-3'-phosphate
  modified_base 7: mod_base = OTHER; note = 2'-O-methyladenosine-3'-phosphate
  modified_base 8: mod_base = OTHER; note = 2'-fluoroguanosine-3'-phosphate
  modified_base 9: mod_base = OTHER; note = 2'-fluoroadenosine-3'-phosphate
  modified_base 10: mod_base = OTHER; note = 2'-O-methylcytidine-3'-phosphate
  modified_base 11: mod_base = OTHER; note = 2'-O-methylcytidine-3'-phosphate
  modified_base 12: mod_base = OTHER; note = 2'-O-methyladenosine-3'-phosphate
  modified_base 13: mod_base = OTHER; note = 2'-O-methyladenosine-3'-phosphate
  modified_base 14: mod_base = OTHER; note = 2'-fluoroguanosine-3'-phosphate
  modified_base 15: mod_base = OTHER; note = 2'-O-methylguanosine-3'-phosphate
  modified_base 16: mod_base = OTHER; note = 2'-fluoroadenosine-3'-phosphate
  modified_base 17: mod_base = OTHER; note = 2'-O-methylguanosine-3'-phosphate
  modified_base 18: mod_base = OTHER; note = 2'-O-methyladenosine-3'-phosphate
  modified_base 19: mod_base = OTHER; note = 2'-O-methyladenosine-3'-phosphate
  modified_base 20: mod_base = OTHER; note = 2'-O-methyladenosine-3'-phosphate
  modified_base 21: mod_base = OTHER; note = 2'-O-methylcytidine-3'-phosphorothioate
  modified_base 22: mod_base = OTHER; note = 2'-O-methylguanosine-3'-phosphorothioate
  modified_base 23: mod_base = OTHER; note = 2'-O-methylguanosine-3'-phosphate
acacttagaccaaggagaaacgg

SEQ ID NO: 1087 - RNA, 23 nt, synthetic construct
  source 1..23: mol_type = other RNA
  modified_base 1: mod_base = OTHER; note = 2'-O-methyladenosine-3'-phosphorothioate
  modified_base 2: mod_base = OTHER; note = 2'-fluoroadenosine-3'-phosphorothioate
  modified_base 3: mod_base = OTHER; note = 2'-O-methylcytidine-3'-phosphate
  modified_base 4: mod_base = OTHER; note = 2'-O-methyladenosine-3'-phosphate
  modified_base 5: mod_base = OTHER; note = 2'-O-methylcytidine-3'-phosphate
  modified_base 6: mod_base = OTHER; note = 2'-fluorouridine-3'-phosphate
  modified_base 7: mod_base = OTHER; note = 2'-O-methyluridine-3'-phosphate
  modified_base 8: mod_base = OTHER; note = 2'-fluoroadenosine-3'-phosphate
  modified_base 9: mod_base = OTHER; note = 2'-fluoroguanosine-3'-phosphate
  modified_base 10: mod_base = OTHER; note = 2'-O-methyladenosine-3'-phosphate
  modified_base 11: mod_base = OTHER; note = 2'-O-methylcytidine-3'-phosphate
  modified_base 12: mod_base = OTHER; note = 2'-O-methylcytidine-3'-phosphate
  modified_base 13: mod_base = OTHER; note = 2'-O-methyladenosine-3'-phosphate
  modified_base 14: mod_base = OTHER; note = 2'-fluoroadenosine-3'-phosphate
  modified_base 15: mod_base = OTHER; note = 2'-O-methylguanosine-3'-phosphate
  modified_base 16: mod_base = OTHER; note = 2'-fluoroguanosine-3'-phosphate
  modified_base 17: mod_base = OTHER; note = 2'-O-methyladenosine-3'-phosphate
  modified_base 18: mod_base = OTHER; note = 2'-O-methylguanosine-3'-phosphate
  modified_base 19: mod_base = OTHER; note = 2'-O-methyladenosine-3'-phosphate
  modified_base 20: mod_base = OTHER; note = 2'-O-methyladenosine-3'-phosphate
  modified_base 21: mod_base = OTHER; note = 2'-O-methyladenosine-3'-phosphorothioate
  modified_base 22: mod_base = OTHER; note = 2'-O-methylcytidine-3'-phosphorothioate
  modified_base 23: mod_base = OTHER; note = 2'-O-methylguanosine-3'-phosphate
aacacttagaccaaggagaaacg

SEQ ID NO: 1088 - RNA, 23 nt, synthetic construct
  source 1..23: mol_type = other RNA
  modified_base 1: mod_base = OTHER; note = 2'-O-methyladenosine-3'-phosphorothioate
  modified_base 2: mod_base = OTHER; note = 2'-fluorocytidine-3'-phosphorothioate
  modified_base 3: mod_base = OTHER; note = 2'-O-methyladenosine-3'-phosphate
  modified_base 4: mod_base = OTHER; note = 2'-O-methylcytidine-3'-phosphate
  modified_base 5: mod_base = OTHER; note = 2'-O-methyladenosine-3'-phosphate
  modified_base 6: mod_base = OTHER; note = 2'-fluorocytidine-3'-phosphate
  modified_base 7: mod_base = OTHER; note = 2'-O-methyluridine-3'-phosphate
  modified_base 8: mod_base = OTHER; note = 2'-fluorouridine-3'-phosphate
  modified_base 9: mod_base = OTHER; note = 2'-fluoroadenosine-3'-phosphate
  modified_base 10: mod_base = OTHER; note = 2'-O-methylguanosine-3'-phosphate
  modified_base 11: mod_base = OTHER; note = 2'-O-methyladenosine-3'-phosphate
  modified_base 12: mod_base = OTHER; note = 2'-O-methylcytidine-3'-phosphate
  modified_base 13: mod_base = OTHER; note = 2'-O-methylcytidine-3'-phosphate
  modified_base 14: mod_base = OTHER; note = 2'-fluoroadenosine-3'-phosphate
  modified_base 15: mod_base = OTHER; note = 2'-O-methyladenosine-3'-phosphate
  modified_base 16: mod_base = OTHER; note = 2'-fluoroguanosine-3'-phosphate
  modified_base 17: mod_base = OTHER; note = 2'-O-methylguanosine-3'-phosphate
  modified_base 18: mod_base = OTHER; note = 2'-O-methyladenosine-3'-phosphate
  modified_base 19: mod_base = OTHER; note = 2'-O-methylguanosine-3'-phosphate
  modified_base 20: mod_base = OTHER; note = 2'-O-methyladenosine-3'-phosphate
  modified_base 21: mod_base = OTHER; note = 2'-O-methyladenosine-3'-phosphorothioate
  modified_base 22: mod_base = OTHER; note = 2'-O-methyladenosine-3'-phosphorothioate
  modified_base 23: mod_base = OTHER; note = 2'-O-methylcytidine-3'-phosphate
acacacttagaccaaggagaaac

SEQ ID NO: 1089 - RNA, 23 nt, synthetic construct
  source 1..23: mol_type = other RNA
  modified_base 1: mod_base = OTHER; note = 2'-O-methyladenosine-3'-phosphorothioate
  modified_base 2: mod_base = OTHER; note = 2'-fluoroguanosine-3'-phosphorothioate
  modified_base 3: mod_base = OTHER; note = 2'-O-methylcytidine-3'-phosphate
  modified_base 4: mod_base = OTHER; note = 2'-O-methyladenosine-3'-phosphate
  modified_base 5: mod_base = OTHER; note = 2'-O-methylcytidine-3'-phosphate
  modified_base 6: mod_base = OTHER; note = 2'-fluoroadenosine-3'-phosphate
  modified_base 7: mod_base = OTHER; note = 2'-O-methylcytidine-3'-phosphate
  modified_base 8: mod_base = OTHER; note = 2'-fluorouridine-3'-phosphate
  modified_base 9: mod_base = OTHER; note = 2'-fluorouridine-3'-phosphate
  modified_base 10: mod_base = OTHER; note = 2'-O-methyladenosine-3'-phosphate
  modified_base 11: mod_base = OTHER; note = 2'-O-methylguanosine-3'-phosphate
  modified_base 12: mod_base = OTHER; note = 2'-O-methyladenosine-3'-phosphate
  modified_base 13: mod_base = OTHER; note = 2'-O-methylcytidine-3'-phosphate
  modified_base 14: mod_base = OTHER; note = 2'-fluorocytidine-3'-phosphate
  modified_base 15: mod_base = OTHER; note = 2'-O-methyladenosine-3'-phosphate
  modified_base 16: mod_base = OTHER; note = 2'-fluoroadenosine-3'-phosphate
  modified_base 17: mod_base = OTHER; note = 2'-O-methylguanosine-3'-phosphate
  modified_base 18: mod_base = OTHER; note = 2'-O-methylguanosine-3'-phosphate
  modified_base 19: mod_base = OTHER; note = 2'-O-methyladenosine-3'-phosphate
  modified_base 20: mod_base = OTHER; note = 2'-O-methylguanosine-3'-phosphate
  modified_base 21: mod_base = OTHER; note = 2'-O-methyladenosine-3'-phosphorothioate
  modified_base 22: mod_base = OTHER; note = 2'-O-methyladenosine-3'-phosphorothioate
  modified_base 23: mod_base = OTHER; note = 2'-O-methyladenosine-3'-phosphate
agcacacttagaccaaggagaaa

SEQ ID NO: 1090 - RNA, 23 nt, synthetic construct
  source 1..23: mol_type = other RNA
  modified_base 1: mod_base = OTHER; note = 2'-O-methyladenosine-3'-phosphorothioate
  modified_base 2: mod_base = OTHER; note = 2'-fluorocytidine-3'-phosphorothioate
  modified_base 3: mod_base = OTHER; note = 2'-O-methyladenosine-3'-phosphate
  modified_base 4: mod_base = OTHER; note = 2'-O-methylguanosine-3'-phosphate
  modified_base 5: mod_base = OTHER; note = 2'-O-methylcytidine-3'-phosphate
  modified_base 6: mod_base = OTHER; note = 2'-fluoroadenosine-3'-phosphate
  modified_base 7: mod_base = OTHER; note = 2'-O-methylcytidine-3'-phosphate
  modified_base 8: mod_base = OTHER; note = 2'-fluoroadenosine-3'-phosphate
  modified_base 9: mod_base = OTHER; note = 2'-fluorocytidine-3'-phosphate
  modified_base 10: mod_base = OTHER; note = 2'-O-methyluridine-3'-phosphate
  modified_base 11: mod_base = OTHER; note = 2'-O-methyluridine-3'-phosphate
  modified_base 12: mod_base = OTHER; note = 2'-O-methyladenosine-3'-phosphate
  modified_base 13: mod_base = OTHER; note = 2'-O-methylguanosine-3'-phosphate
  modified_base 14: mod_base = OTHER; note = 2'-fluoroadenosine-3'-phosphate
  modified_base 15: mod_base = OTHER; note = 2'-O-methylcytidine-3'-phosphate
  modified_base 16: mod_base = OTHER; note = 2'-fluorocytidine-3'-phosphate
  modified_base 17: mod_base = OTHER; note = 2'-O-methyladenosine-3'-phosphate
  modified_base 18: mod_base = OTHER; note = 2'-O-methyladenosine-3'-phosphate
  modified_base 19: mod_base = OTHER; note = 2'-O-methylguanosine-3'-phosphate
  modified_base 20: mod_base = OTHER; note = 2'-O-methylguanosine-3'-phosphate
  modified_base 21: mod_base = OTHER; note = 2'-O-methyladenosine-3'-phosphorothioate
  modified_base 22: mod_base = OTHER; note = 2'-O-methylguanosine-3'-phosphorothioate
  modified_base 23: mod_base = OTHER; note = 2'-O-methyladenosine-3'-phosphate
acagcacacttagaccaaggaga

SEQ ID NO: 1091 - RNA, 23 nt, synthetic construct
  source 1..23: mol_type = other RNA
  modified_base 1: mod_base = OTHER; note = 2'-O-methyladenosine-3'-phosphorothioate
  modified_base 2: mod_base = OTHER; note = 2'-fluorocytidine-3'-phosphorothioate
  modified_base 3: mod_base = OTHER; note = 2'-O-methyluridine-3'-phosphate
  modified_base 4: mod_base = OTHER; note = 2'-O-methylcytidine-3'-phosphate
  modified_base 5: mod_base = OTHER; note = 2'-O-methylcytidine-3'-phosphate
  modified_base 6: mod_base = OTHER; note = 2'-fluoroadenosine-3'-phosphate
  modified_base 7: mod_base = OTHER; note = 2'-O-methyluridine-3'-phosphate
  modified_base 8: mod_base = OTHER; note = 2'-fluoroguanosine-3'-phosphate
  modified_base 9: mod_base = OTHER; note = 2'-fluorocytidine-3'-phosphate
  modified_base 10: mod_base = OTHER; note = 2'-O-methyladenosine-3'-phosphate
  modified_base 11: mod_base = OTHER; note = 2'-O-methylguanosine-3'-phosphate
  modified_base 12: mod_base = OTHER; note = 2'-O-methylcytidine-3'-phosphate
  modified_base 13: mod_base = OTHER; note = 2'-O-methyladenosine-3'-phosphate
  modified_base 14: mod_base = OTHER; note = 2'-fluorocytidine-3'-phosphate
  modified_base 15: mod_base = OTHER; note = 2'-O-methyladenosine-3'-phosphate
  modified_base 16: mod_base = OTHER; note = 2'-fluorocytidine-3'-phosphate
  modified_base 17: mod_base = OTHER; note = 2'-O-methyluridine-3'-phosphate
  modified_base 18: mod_base = OTHER; note = 2'-O-methyluridine-3'-phosphate
  modified_base 19: mod_base = OTHER; note = 2'-O-methyladenosine-3'-phosphate
  modified_base 20: mod_base = OTHER; note = 2'-O-methylguanosine-3'-phosphate
  modified_base 21: mod_base = OTHER; note = 2'-O-methyladenosine-3'-phosphorothioate
  modified_base 22: mod_base = OTHER; note = 2'-O-methylcytidine-3'-phosphorothioate
  modified_base 23: mod_base = OTHER; note = 2'-O-methylcytidine-3'-phosphate
actccatgcagcacacttagacc

SEQ ID NO: 1092 - RNA, 23 nt, synthetic construct
  source 1..23: mol_type = other RNA
  modified_base 1: mod_base = OTHER; note = 2'-O-methyladenosine-3'-phosphorothioate
  modified_base 2: mod_base = OTHER; note = 2'-fluorocytidine-3'-phosphorothioate
  modified_base 3: mod_base = OTHER; note = 2'-O-methyluridine-3'-phosphate
  modified_base 4: mod_base = OTHER; note = 2'-O-methylcytidine-3'-phosphate
  modified_base 5: mod_base = OTHER; note = 2'-O-methyladenosine-3'-phosphate
  modified_base 6: mod_base = OTHER; note = 2'-fluorocytidine-3'-phosphate
  modified_base 7: mod_base = OTHER; note = 2'-O-methyluridine-3'-phosphate
  modified_base 8: mod_base = OTHER; note = 2'-fluorocytidine-3'-phosphate
  modified_base 9: mod_base = OTHER; note = 2'-fluorocytidine-3'-phosphate
  modified_base 10: mod_base = OTHER; note = 2'-O-methyladenosine-3'-phosphate
  modified_base 11: mod_base = OTHER; note = 2'-O-methyluridine-3'-phosphate
  modified_base 12: mod_base = OTHER; note = 2'-O-methylguanosine-3'-phosphate
  modified_base 13: mod_base = OTHER; note = 2'-O-methylcytidine-3'-phosphate
  modified_base 14: mod_base = OTHER; note = 2'-fluoroadenosine-3'-phosphate
  modified_base 15: mod_base = OTHER; note = 2'-O-methylguanosine-3'-phosphate
  modified_base 16: mod_base = OTHER; note = 2'-fluorocytidine-3'-phosphate
  modified_base 17: mod_base = OTHER; note = 2'-O-methyladenosine-3'-phosphate
  modified_base 18: mod_base = OTHER; note = 2'-O-methylcytidine-3'-phosphate
  modified_base 19: mod_base = OTHER; note = 2'-O-methyladenosine-3'-phosphate
  modified_base 20: mod_base = OTHER; note = 2'-O-methylcytidine-3'-phosphate
  modified_base 21: mod_base = OTHER; note = 2'-O-methyluridine-3'-phosphorothioate
  modified_base 22: mod_base = OTHER; note = 2'-O-methyluridine-3'-phosphorothioate
  modified_base 23: mod_base = OTHER; note = 2'-O-methyladenosine-3'-phosphate
actcactccatgcagcacactta

SEQ ID NO: 1093 - RNA, 23 nt, synthetic construct
  source 1..23: mol_type = other RNA
  modified_base 1: mod_base = OTHER; note = 2'-O-methyladenosine-3'-phosphorothioate
  modified_base 2: mod_base = OTHER; note = 2'-fluorocytidine-3'-phosphorothioate
  modified_base 3: mod_base = OTHER; note = 2'-O-methyluridine-3'-phosphate
  modified_base 4: mod_base = OTHER; note = 2'-O-methyluridine-3'-phosphate
  modified_base 5: mod_base = OTHER; note = 2'-O-methylcytidine-3'-phosphate
  modified_base 6: mod_base = OTHER; note = 2'-fluorouridine-3'-phosphate
  modified_base 7: mod_base = OTHER; note = 2'-O-methyladenosine-3'-phosphate
  modified_base 8: mod_base = OTHER; note = 2'-fluorocytidine-3'-phosphate
  modified_base 9: mod_base = OTHER; note = 2'-fluorouridine-3'-phosphate
  modified_base 10: mod_base = OTHER; note = 2'-O-methylguanosine-3'-phosphate
  modified_base 11: mod_base = OTHER; note = 2'-O-methylcytidine-3'-phosphate
  modified_base 12: mod_base = OTHER; note = 2'-O-methyluridine-3'-phosphate
  modified_base 13: mod_base = OTHER; note = 2'-O-methylcytidine-3'-phosphate
  modified_base 14: mod_base = OTHER; note = 2'-fluoroadenosine-3'-phosphate
  modified_base 15: mod_base = OTHER; note = 2'-O-methylcytidine-3'-phosphate
  modified_base 16: mod_base = OTHER; note = 2'-fluorouridine-3'-phosphate
  modified_base 17: mod_base = OTHER; note = 2'-O-methylcytidine-3'-phosphate
  modified_base 18: mod_base = OTHER; note = 2'-O-methylcytidine-3'-phosphate
  modified_base 19: mod_base = OTHER; note = 2'-O-methyladenosine-3'-phosphate
  modified_base 20: mod_base = OTHER; note = 2'-O-methyluridine-3'-phosphate
  modified_base 21: mod_base = OTHER; note = 2'-O-methylguanosine-3'-phosphorothioate
  modified_base 22: mod_base = OTHER; note = 2'-O-methylcytidine-3'-phosphorothioate
  modified_base 23: mod_base = OTHER; note = 2'-O-methyladenosine-3'-phosphate
acttctactgctcactccatgca

SEQ ID NO: 1094 - RNA, 23 nt, synthetic construct
  source 1..23: mol_type = other RNA
  modified_base 1: mod_base = OTHER; note = 2'-O-methyladenosine-3'-phosphorothioate
  modified_base 2: mod_base = OTHER; note = 2'-fluorocytidine-3'-phosphorothioate
  modified_base 3: mod_base = OTHER; note = 2'-O-methyladenosine-3'-phosphate
  modified_base 4: mod_base = OTHER; note = 2'-O-methylguanosine-3'-phosphate
  modified_base 5: mod_base = OTHER; note = 2'-O-methylguanosine-3'-phosphate
  modified_base 6: mod_base = OTHER; note = 2'-fluorocytidine-3'-phosphate
  modified_base 7: mod_base = OTHER; note = 2'-O-methyluridine-3'-phosphate
  modified_base 8: mod_base = OTHER; note = 2'-fluorouridine-3'-phosphate
  modified_base 9: mod_base = OTHER; note = 2'-fluorocytidine-3'-phosphate
  modified_base 10: mod_base = OTHER; note = 2'-O-methyluridine-3'-phosphate
  modified_base 11: mod_base = OTHER; note = 2'-O-methyladenosine-3'-phosphate
  modified_base 12: mod_base = OTHER; note = 2'-O-methylcytidine-3'-phosphate
  modified_base 13: mod_base = OTHER; note = 2'-O-methyluridine-3'-phosphate
  modified_base 14: mod_base = OTHER; note = 2'-fluoroguanosine-3'-phosphate
  modified_base 15: mod_base = OTHER; note = 2'-O-methylcytidine-3'-phosphate
  modified_base 16: mod_base = OTHER; note = 2'-fluorouridine-3'-phosphate
  modified_base 17: mod_base = OTHER; note = 2'-O-methylcytidine-3'-phosphate
  modified_base 18: mod_base = OTHER; note = 2'-O-methyladenosine-3'-phosphate
  modified_base 19: mod_base = OTHER; note = 2'-O-methylcytidine-3'-phosphate
  modified_base 20: mod_base = OTHER; note = 2'-O-methyluridine-3'-phosphate
  modified_base 21: mod_base = OTHER; note = 2'-O-methylcytidine-3'-phosphorothioate
  modified_base 22: mod_base = OTHER; note = 2'-O-methylcytidine-3'-phosphorothioate
  modified_base 23: mod_base = OTHER; note = 2'-O-methyladenosine-3'-phosphate
acaggcttctactgctcactcca

SEQ ID NO: 1095 - RNA, 23 nt, synthetic construct
  source 1..23: mol_type = other RNA
  modified_base 1: mod_base = OTHER; note = 2'-O-methyladenosine-3'-phosphorothioate
  modified_base 2: mod_base = OTHER; note = 2'-fluorocytidine-3'-phosphorothioate
  modified_base 3: mod_base = OTHER; note = 2'-O-methyladenosine-3'-phosphate
  modified_base 4: mod_base = OTHER; note = 2'-O-methyladenosine-3'-phosphate
  modified_base 5: mod_base = OTHER; note = 2'-O-methyladenosine-3'-phosphate
  modified_base 6: mod_base = OTHER; note = 2'-fluorocytidine-3'-phosphate
  modified_base 7: mod_base = OTHER; note = 2'-O-methyluridine-3'-phosphate
  modified_base 8: mod_base = OTHER; note = 2'-fluoroguanosine-3'-phosphate
  modified_base 9: mod_base = OTHER; note = 2'-fluoroguanosine-3'-phosphate
  modified_base 10: mod_base = OTHER; note = 2'-O-methylguanosine-3'-phosphate
  modified_base 11: mod_base = OTHER; note = 2'-O-methyladenosine-3'-phosphate
  modified_base 12: mod_base = OTHER; note = 2'-O-methylguanosine-3'-phosphate
  modified_base 13: mod_base = OTHER; note = 2'-O-methylguanosine-3'-phosphate
  modified_base 14: mod_base = OTHER; note = 2'-fluorouridine-3'-phosphate
  modified_base 15: mod_base = OTHER; note = 2'-O-methylguanosine-3'-phosphate
  modified_base 16: mod_base = OTHER; note = 2'-fluorocytidine-3'-phosphate
  modified_base 17: mod_base = OTHER; note = 2'-O-methyladenosine-3'-phosphate
  modified_base 18: mod_base = OTHER; note = 2'-O-methyluridine-3'-phosphate
  modified_base 19: mod_base = OTHER; note = 2'-O-methyluridine-3'-phosphate
  modified_base 20: mod_base = OTHER; note = 2'-O-methyluridine-3'-phosphate
  modified_base 21: mod_base = OTHER; note = 2'-O-methylguanosine-3'-phosphorothioate
  modified_base 22: mod_base = OTHER; note = 2'-O-methyluridine-3'-phosphorothioate
  modified_base 23: mod_base = OTHER; note = 2'-O-methylguanosine-3'-phosphate
acaaactgggaggtgcatttgtg

SEQ ID NO: 1096 - RNA, 23 nt, synthetic construct
  source 1..23: mol_type = other RNA
  modified_base 1: mod_base = OTHER; note = 2'-O-methyladenosine-3'-phosphorothioate
  modified_base 2: mod_base = OTHER; note = 2'-fluoroguanosine-3'-phosphorothioate
  modified_base 3: mod_base = OTHER; note = 2'-O-methylcytidine-3'-phosphate
  modified_base 4: mod_base = OTHER; note = 2'-O-methyladenosine-3'-phosphate
  modified_base 5: mod_base = OTHER; note = 2'-O-methyladenosine-3'-phosphate
  modified_base 6: mod_base = OTHER; note = 2'-fluoroadenosine-3'-phosphate
  modified_base 7: mod_base = OTHER; note = 2'-O-methylcytidine-3'-phosphate
  modified_base 8: mod_base = OTHER; note = 2'-fluorouridine-3'-phosphate
  modified_base 9: mod_base = OTHER; note = 2'-fluoroguanosine-3'-phosphate
  modified_base 10: mod_base = OTHER; note = 2'-O-methylguanosine-3'-phosphate
  modified_base 11: mod_base = OTHER; note = 2'-O-methylguanosine-3'-phosphate
  modified_base 12: mod_base = OTHER; note = 2'-O-methyladenosine-3'-phosphate
  modified_base 13: mod_base = OTHER; note = 2'-O-methylguanosine-3'-phosphate
  modified_base 14: mod_base = OTHER; note = 2'-fluoroguanosine-3'-phosphate
  modified_base 15: mod_base = OTHER; note = 2'-O-methyluridine-3'-phosphate
  modified_base 16: mod_base = OTHER; note = 2'-fluoroguanosine-3'-phosphate
  modified_base 17: mod_base = OTHER; note = 2'-O-methylcytidine-3'-phosphate
  modified_base 18: mod_base = OTHER; note = 2'-O-methyladenosine-3'-phosphate
  modified_base 19: mod_base = OTHER; note = 2'-O-methyluridine-3'-phosphate
  modified_base 20: mod_base = OTHER; note = 2'-O-methyluridine-3'-phosphate
  modified_base 21: mod_base = OTHER; note = 2'-O-methyluridine-3'-phosphorothioate
  modified_base 22: mod_base = OTHER; note = 2'-O-methylguanosine-3'-phosphorothioate
  modified_base 23: mod_base = OTHER; note = 2'-O-methyluridine-3'-phosphate
agcaaactgggaggtgcatttgt

SEQ ID NO: 1097 - RNA, 23 nt, synthetic construct
  source 1..23: mol_type = other RNA
  modified_base 1: mod_base = OTHER; note = 2'-O-methyladenosine-3'-phosphorothioate
  modified_base 2: mod_base = OTHER; note = 2'-fluoroadenosine-3'-phosphorothioate
  modified_base 3: mod_base = OTHER; note = 2'-O-methylguanosine-3'-phosphate
  modified_base 4: mod_base = OTHER; note = 2'-O-methylcytidine-3'-phosphate
  modified_base 5: mod_base = OTHER; note = 2'-O-methyladenosine-3'-phosphate
  modified_base 6: mod_base = OTHER; note = 2'-fluoroadenosine-3'-phosphate
  modified_base 7: mod_base = OTHER; note = 2'-O-methyladenosine-3'-phosphate
  modified_base 8: mod_base = OTHER; note = 2'-fluorocytidine-3'-phosphate
  modified_base 9: mod_base = OTHER; note = 2'-fluorouridine-3'-phosphate
  modified_base 10: mod_base = OTHER; note = 2'-O-methylguanosine-3'-phosphate
  modified_base 11: mod_base = OTHER; note = 2'-O-methylguanosine-3'-phosphate
  modified_base 12: mod_base = OTHER; note = 2'-O-methylguanosine-3'-phosphate
  modified_base 13: mod_base = OTHER; note = 2'-O-methyladenosine-3'-phosphate
  modified_base 14: mod_base = OTHER; note = 2'-fluoroguanosine-3'-phosphate
  modified_base 15: mod_base = OTHER; note = 2'-O-methylguanosine-3'-phosphate
  modified_base 16: mod_base = OTHER; note = 2'-fluorouridine-3'-phosphate
  modified_base 17: mod_base = OTHER; note = 2'-O-methylguanosine-3'-phosphate
  modified_base 18: mod_base = OTHER; note = 2'-O-methylcytidine-3'-phosphate
  modified_base 19: mod_base = OTHER; note = 2'-O-methyladenosine-3'-phosphate
  modified_base 20: mod_base = OTHER; note = 2'-O-methyluridine-3'-phosphate
  modified_base 21: mod_base = OTHER; note = 2'-O-methyluridine-3'-phosphorothioate
  modified_base 22: mod_base = OTHER; note = 2'-O-methyluridine-3'-phosphorothioate
  modified_base 23: mod_base = OTHER; note = 2'-O-methylguanosine-3'-phosphate
aagcaaactgggaggtgcatttg

SEQ ID NO: 1098 - RNA, 23 nt, synthetic construct
  source 1..23: mol_type = other RNA
  modified_base 1: mod_base = OTHER; note = 2'-O-methyladenosine-3'-phosphorothioate
  modified_base 2: mod_base = OTHER; note = 2'-fluorocytidine-3'-phosphorothioate
  modified_base 3: mod_base = OTHER; note = 2'-O-methyladenosine-3'-phosphate
  modified_base 4: mod_base = OTHER; note = 2'-O-methylguanosine-3'-phosphate
  modified_base 5: mod_base = OTHER; note = 2'-O-methylcytidine-3'-phosphate
  modified_base 6: mod_base = OTHER; note = 2'-fluoroadenosine-3'-phosphate
  modified_base 7: mod_base = OTHER; note = 2'-O-methyladenosine-3'-phosphate
  modified_base 8: mod_base = OTHER; note = 2'-fluoroadenosine-3'-phosphate
  modified_base 9: mod_base = OTHER; note = 2'-fluorocytidine-3'-phosphate
  modified_base 10: mod_base = OTHER; note = 2'-O-methyluridine-3'-phosphate
  modified_base 11: mod_base = OTHER; note = 2'-O-methylguanosine-3'-phosphate
  modified_base 12: mod_base = OTHER; note = 2'-O-methylguanosine-3'-phosphate
  modified_base 13: mod_base = OTHER; note = 2'-O-methylguanosine-3'-phosphate
  modified_base 14: mod_base = OTHER; note = 2'-fluoroadenosine-3'-phosphate
  modified_base 15: mod_base = OTHER; note = 2'-O-methylguanosine-3'-phosphate
  modified_base 16: mod_base = OTHER; note = 2'-fluoroguanosine-3'-phosphate
  modified_base 17: mod_base = OTHER; note = 2'-O-methyluridine-3'-phosphate
  modified_base 18: mod_base = OTHER; note = 2'-O-methylguanosine-3'-phosphate
  modified_base 19: mod_base = OTHER; note = 2'-O-methylcytidine-3'-phosphate
  modified_base 20: mod_base = OTHER; note = 2'-O-methyladenosine-3'-phosphate
  modified_base 21: mod_base = OTHER; note = 2'-O-methyluridine-3'-phosphorothioate
  modified_base 22: mod_base = OTHER; note = 2'-O-methyluridine-3'-phosphorothioate
  modified_base 23: mod_base = OTHER; note = 2'-O-methyluridine-3'-phosphate
acagcaaactgggaggtgcattt

SEQ ID NO: 1099 - RNA, 23 nt, synthetic construct
  source 1..23: mol_type = other RNA
  modified_base 1: mod_base = OTHER; note = 2'-O-methyladenosine-3'-phosphorothioate
  modified_base 2: mod_base = OTHER; note = 2'-fluorocytidine-3'-phosphorothioate
  modified_base 3: mod_base = OTHER; note = 2'-O-methylcytidine-3'-phosphate
  modified_base 4: mod_base = OTHER; note = 2'-O-methyladenosine-3'-phosphate
  modified_base 5: mod_base = OTHER; note = 2'-O-methylguanosine-3'-phosphate
  modified_base 6: mod_base = OTHER; note = 2'-fluorocytidine-3'-phosphate
  modified_base 7: mod_base = OTHER; note = 2'-O-methyladenosine-3'-phosphate
  modified_base 8: mod_base = OTHER; note = 2'-fluoroadenosine-3'-phosphate
  modified_base 9: mod_base = OTHER; note = 2'-fluoroadenosine-3'-phosphate
  modified_base 10: mod_base = OTHER; note = 2'-O-methylcytidine-3'-phosphate
  modified_base 11: mod_base = OTHER; note = 2'-O-methyluridine-3'-phosphate
  modified_base 12: mod_base = OTHER; note = 2'-O-methylguanosine-3'-phosphate
  modified_base 13: mod_base = OTHER; note = 2'-O-methylguanosine-3'-phosphate
  modified_base 14: mod_base = OTHER; note = 2'-fluoroguanosine-3'-phosphate
  modified_base 15: mod_base = OTHER; note = 2'-O-methyladenosine-3'-phosphate
  modified_base 16: mod_base = OTHER; note = 2'-fluoroguanosine-3'-phosphate
  modified_base 17: mod_base = OTHER; note = 2'-O-methylguanosine-3'-phosphate
  modified_base 18: mod_base = OTHER; note = 2'-O-methyluridine-3'-phosphate
  modified_base 19: mod_base = OTHER; note = 2'-O-methylguanosine-3'-phosphate
  modified_base 20: mod_base = OTHER; note = 2'-O-methylcytidine-3'-phosphate
  modified_base 21: mod_base = OTHER; note = 2'-O-methyladenosine-3'-phosphorothioate
  modified_base 22: mod_base = OTHER; note = 2'-O-methyluridine-3'-phosphorothioate
  modified_base 23: mod_base = OTHER; note = 2'-O-methyluridine-3'-phosphate
accagcaaactgggaggtgcatt

SEQ ID NO: 1100 - RNA, 23 nt, synthetic construct
  source 1..23: mol_type = other RNA
  modified_base 1: mod_base = OTHER; note = 2'-O-methyladenosine-3'-phosphorothioate
  modified_base 2: mod_base = OTHER; note = 2'-fluorouridine -3'-phosphorothioate
  modified_base 3: mod_base = OTHER; note = 2'-O-methyladenosine-3'-phosphate
  modified_base 4: mod_base = OTHER; note = 2'-O-methyladenosine-3'-phosphate
  modified_base 5: mod_base = OTHER; note = 2'-O-methyladenosine-3'-phosphate
  modified_base 6: mod_base = OTHER; note = 2'-fluorocytidine-3'-phosphate
  modified_base 7: mod_base = OTHER; note = 2'-O-methylcytidine-3'-phosphate
  modified_base 8: mod_base = OTHER; note = 2'-fluorocytidine-3'-phosphate
  modified_base 9: mod_base = OTHER; note = 2'-fluoroadenosine-3'-phosphate
  modified_base 10: mod_base = OTHER; note = 2'-O-methylguanosine-3'-phosphate
  modified_base 11: mod_base = OTHER; note = 2'-O-methylcytidine-3'-phosphate
  modified_base 12: mod_base = OTHER; note = 2'-O-methyladenosine-3'-phosphate
  modified_base 13: mod_base = OTHER; note = 2'-O-methyladenosine-3'-phosphate
  modified_base 14: mod_base = OTHER; note = 2'-fluoroadenosine-3'-phosphate
  modified_base 15: mod_base = OTHER; note = 2'-O-methylcytidine-3'-phosphate
  modified_base 16: mod_base = OTHER; note = 2'-fluorouridine-3'-phosphate
  modified_base 17: mod_base = OTHER; note = 2'-O-methylguanosine-3'-phosphate
  modified_base 18: mod_base = OTHER; note = 2'-O-methylguanosine-3'-phosphate
  modified_base 19: mod_base = OTHER; note = 2'-O-methylguanosine-3'-phosphate
  modified_base 20: mod_base = OTHER; note = 2'-O-methyladenosine-3'-phosphate
  modified_base 21: mod_base = OTHER; note = 2'-O-methylguanosine-3'-phosphorothioate
  modified_base 22: mod_base = OTHER; note = 2'-O-methylguanosine-3'-phosphorothioate
  modified_base 23: mod_base = OTHER; note = 2'-O-methyluridine-3'-phosphate
ataaacccagcaaactgggaggt

SEQ ID NO: 1101 - RNA, 23 nt, synthetic construct
  source 1..23: mol_type = other RNA
  modified_base 1: mod_base = OTHER; note = 2'-O-methyladenosine-3'-phosphorothioate
  modified_base 2: mod_base = OTHER; note = 2'-fluoroadenosine-3'-phosphorothioate
  modified_base 3: mod_base = OTHER; note = 2'-O-methyladenosine-3'-phosphate
  modified_base 4: mod_base = OTHER; note = 2'-O-methyluridine-3'-phosphate
  modified_base 5: mod_base = OTHER; note = 2'-O-methyladenosine-3'-phosphate
  modified_base 6: mod_base = OTHER; note = 2'-fluoroadenosine-3'-phosphate
  modified_base 7: mod_base = OTHER; note = 2'-O-methyladenosine-3'-phosphate
  modified_base 8: mod_base = OTHER; note = 2'-fluorocytidine-3'-phosphate
  modified_base 9: mod_base = OTHER; note = 2'-fluorocytidine-3'-phosphate
  modified_base 10: mod_base = OTHER; note = 2'-O-methylcytidine-3'-phosphate
  modified_base 11: mod_base = OTHER; note = 2'-O-methyladenosine-3'-phosphate
  modified_base 12: mod_base = OTHER; note = 2'-O-methylguanosine-3'-phosphate
  modified_base 13: mod_base = OTHER; note = 2'-O-methylcytidine-3'-phosphate
  modified_base 14: mod_base = OTHER; note = 2'-fluoroadenosine-3'-phosphate
  modified_base 15: mod_base = OTHER; note = 2'-O-methyladenosine-3'-phosphate
  modified_base 16: mod_base = OTHER; note = 2'-fluoroadenosine-3'-phosphate
  modified_base 17: mod_base = OTHER; note = 2'-O-methylcytidine-3'-phosphate
  modified_base 18: mod_base = OTHER; note = 2'-O-methyluridine-3'-phosphate
  modified_base 19: mod_base = OTHER; note = 2'-O-methylguanosine-3'-phosphate
  modified_base 20: mod_base = OTHER; note = 2'-O-methylguanosine-3'-phosphate
  modified_base 21: mod_base = OTHER; note = 2'-O-methylguanosine-3'-phosphorothioate
  modified_base 22: mod_base = OTHER; note = 2'-O-methyladenosine-3'-phosphorothioate
  modified_base 23: mod_base = OTHER; note = 2'-O-methylguanosine-3'-phosphate
aaataaacccagcaaactgggag

SEQ ID NO: 1102 - RNA, 23 nt, synthetic construct
  source 1..23: mol_type = other RNA
  modified_base 1: mod_base = OTHER; note = 2'-O-methyladenosine-3'-phosphorothioate
  modified_base 2: mod_base = OTHER; note = 2'-fluoroadenosine-3'-phosphorothioate
  modified_base 3: mod_base = OTHER; note = 2'-O-methyladenosine-3'-phosphate
  modified_base 4: mod_base = OTHER; note = 2'-O-methyladenosine-3'-phosphate
  modified_base 5: mod_base = OTHER; note = 2'-O-methyluridine-3'-phosphate
  modified_base 6: mod_base = OTHER; note = 2'-fluoroadenosine-3'-phosphate
  modified_base 7: mod_base = OTHER; note = 2'-O-methyladenosine-3'-phosphate
  modified_base 8: mod_base = OTHER; note = 2'-fluoroadenosine-3'-phosphate
  modified_base 9: mod_base = OTHER; note = 2'-fluorocytidine-3'-phosphate
  modified_base 10: mod_base = OTHER; note = 2'-O-methylcytidine-3'-phosphate
  modified_base 11: mod_base = OTHER; note = 2'-O-methylcytidine-3'-phosphate
  modified_base 12: mod_base = OTHER; note = 2'-O-methyladenosine-3'-phosphate
  modified_base 13: mod_base = OTHER; note = 2'-O-methylguanosine-3'-phosphate
  modified_base 14: mod_base = OTHER; note = 2'-fluorocytidine-3'-phosphate
  modified_base 15: mod_base = OTHER; note = 2'-O-methyladenosine-3'-phosphate
  modified_base 16: mod_base = OTHER; note = 2'-fluoroadenosine-3'-phosphate
  modified_base 17: mod_base = OTHER; note = 2'-O-methyladenosine-3'-phosphate
  modified_base 18: mod_base = OTHER; note = 2'-O-methylcytidine-3'-phosphate
  modified_base 19: mod_base = OTHER; note = 2'-O-methyluridine-3'-phosphate
  modified_base 20: mod_base = OTHER; note = 2'-O-methylguanosine-3'-phosphate
  modified_base 21: mod_base = OTHER; note = 2'-O-methylguanosine-3'-phosphorothioate
  modified_base 22: mod_base = OTHER; note = 2'-O-methylguanosine-3'-phosphorothioate
  modified_base 23: mod_base = OTHER; note = 2'-O-methyladenosine-3'-phosphate
aaaataaacccagcaaactggga

SEQ ID NO: 1103 - RNA, 23 nt, synthetic construct
  source 1..23: mol_type = other RNA
  modified_base 1: mod_base = OTHER; note = 2'-O-methyladenosine-3'-phosphorothioate
  modified_base 2: mod_base = OTHER; note = 2'-fluoroadenosine-3'-phosphorothioate
  modified_base 3: mod_base = OTHER; note = 2'-O-methyladenosine-3'-phosphate
  modified_base 4: mod_base = OTHER; note = 2'-O-methyladenosine-3'-phosphate
  modified_base 5: mod_base = OTHER; note = 2'-O-methyladenosine-3'-phosphate
  modified_base 6: mod_base = OTHER; note = 2'-fluorouridine-3'-phosphate
  modified_base 7: mod_base = OTHER; note = 2'-O-methyladenosine-3'-phosphate
  modified_base 8: mod_base = OTHER; note = 2'-fluoroadenosine-3'-phosphate
  modified_base 9: mod_base = OTHER; note = 2'-fluoroadenosine-3'-phosphate
  modified_base 10: mod_base = OTHER; note = 2'-O-methylcytidine-3'-phosphate
  modified_base 11: mod_base = OTHER; note = 2'-O-methylcytidine-3'-phosphate
  modified_base 12: mod_base = OTHER; note = 2'-O-methylcytidine-3'-phosphate
  modified_base 13: mod_base = OTHER; note = 2'-O-methyladenosine-3'-phosphate
  modified_base 14: mod_base = OTHER; note = 2'-fluoroguanosine-3'-phosphate
  modified_base 15: mod_base = OTHER; note = 2'-O-methylcytidine-3'-phosphate
  modified_base 16: mod_base = OTHER; note = 2'-fluoroadenosine-3'-phosphate
  modified_base 17: mod_base = OTHER; note = 2'-O-methyladenosine-3'-phosphate
  modified_base 18: mod_base = OTHER; note = 2'-O-methyladenosine-3'-phosphate
  modified_base 19: mod_base = OTHER; note = 2'-O-methylcytidine-3'-phosphate
  modified_base 20: mod_base = OTHER; note = 2'-O-methyluridine-3'-phosphate
  modified_base 21: mod_base = OTHER; note = 2'-O-methylguanosine-3'-phosphorothioate
  modified_base 22: mod_base = OTHER; note = 2'-O-methylguanosine-3'-phosphorothioate
  modified_base 23: mod_base = OTHER; note = 2'-O-methylguanosine-3'-phosphate
aaaaataaacccagcaaactggg

SEQ ID NO: 1104 - RNA, 23 nt, synthetic construct
  source 1..23: mol_type = other RNA
  modified_base 1: mod_base = OTHER; note = 2'-O-methyladenosine-3'-phosphorothioate
  modified_base 2: mod_base = OTHER; note = 2'-fluorouridine -3'-phosphorothioate
  modified_base 3: mod_base = OTHER; note = 2'-O-methyladenosine-3'-phosphate
  modified_base 4: mod_base = OTHER; note = 2'-O-methyladenosine-3'-phosphate
  modified_base 5: mod_base = OTHER; note = 2'-O-methyladenosine-3'-phosphate
  modified_base 6: mod_base = OTHER; note = 2'-fluoroadenosine-3'-phosphate
  modified_base 7: mod_base = OTHER; note = 2'-O-methyluridine-3'-phosphate
  modified_base 8: mod_base = OTHER; note = 2'-fluoroadenosine-3'-phosphate
  modified_base 9: mod_base = OTHER; note = 2'-fluoroadenosine-3'-phosphate
  modified_base 10: mod_base = OTHER; note = 2'-O-methyladenosine-3'-phosphate
  modified_base 11: mod_base = OTHER; note = 2'-O-methylcytidine-3'-phosphate
  modified_base 12: mod_base = OTHER; note = 2'-O-methylcytidine-3'-phosphate
  modified_base 13: mod_base = OTHER; note = 2'-O-methylcytidine-3'-phosphate
  modified_base 14: mod_base = OTHER; note = 2'-fluoroadenosine-3'-phosphate
  modified_base 15: mod_base = OTHER; note = 2'-O-methylguanosine-3'-phosphate
  modified_base 16: mod_base = OTHER; note = 2'-fluorocytidine-3'-phosphate
  modified_base 17: mod_base = OTHER; note = 2'-O-methyladenosine-3'-phosphate
  modified_base 18: mod_base = OTHER; note = 2'-O-methyladenosine-3'-phosphate
  modified_base 19: mod_base = OTHER; note = 2'-O-methyladenosine-3'-phosphate
  modified_base 20: mod_base = OTHER; note = 2'-O-methylcytidine-3'-phosphate
  modified_base 21: mod_base = OTHER; note = 2'-O-methyluridine-3'-phosphorothioate
  modified_base 22: mod_base = OTHER; note = 2'-O-methylguanosine-3'-phosphorothioate
  modified_base 23: mod_base = OTHER; note = 2'-O-methylguanosine-3'-phosphate
ataaaataaacccagcaaactgg

SEQ ID NO: 1105 - RNA, 23 nt, synthetic construct
  source 1..23: mol_type = other RNA
  modified_base 1: mod_base = OTHER; note = 2'-O-methyladenosine-3'-phosphorothioate
  modified_base 2: mod_base = OTHER; note = 2'-fluorocytidine-3'-phosphorothioate
  modified_base 3: mod_base = OTHER; note = 2'-O-methyluridine-3'-phosphate
  modified_base 4: mod_base = OTHER; note = 2'-O-methyladenosine-3'-phosphate
  modified_base 5: mod_base = OTHER; note = 2'-O-methyladenosine-3'-phosphate
  modified_base 6: mod_base = OTHER; note = 2'-fluoroadenosine-3'-phosphate
  modified_base 7: mod_base = OTHER; note = 2'-O-methyladenosine-3'-phosphate
  modified_base 8: mod_base = OTHER; note = 2'-fluorouridine-3'-phosphate
  modified_base 9: mod_base = OTHER; note = 2'-fluoroadenosine-3'-phosphate
  modified_base 10: mod_base = OTHER; note = 2'-O-methyladenosine-3'-phosphate
  modified_base 11: mod_base = OTHER; note = 2'-O-methyladenosine-3'-phosphate
  modified_base 12: mod_base = OTHER; note = 2'-O-methylcytidine-3'-phosphate
  modified_base 13: mod_base = OTHER; note = 2'-O-methylcytidine-3'-phosphate
  modified_base 14: mod_base = OTHER; note = 2'-fluorocytidine-3'-phosphate
  modified_base 15: mod_base = OTHER; note = 2'-O-methyladenosine-3'-phosphate
  modified_base 16: mod_base = OTHER; note = 2'-fluoroguanosine-3'-phosphate
  modified_base 17: mod_base = OTHER; note = 2'-O-methylcytidine-3'-phosphate
  modified_base 18: mod_base = OTHER; note = 2'-O-methyladenosine-3'-phosphate
  modified_base 19: mod_base = OTHER; note = 2'-O-methyladenosine-3'-phosphate
  modified_base 20: mod_base = OTHER; note = 2'-O-methyladenosine-3'-phosphate
  modified_base 21: mod_base = OTHER; note = 2'-O-methylcytidine-3'-phosphorothioate
  modified_base 22: mod_base = OTHER; note = 2'-O-methyluridine-3'-phosphorothioate
  modified_base 23: mod_base = OTHER; note = 2'-O-methylguanosine-3'-phosphate
actaaaataaacccagcaaactg

SEQ ID NO: 1106 - RNA, 23 nt, synthetic construct
  source 1..23: mol_type = other RNA
  modified_base 1: mod_base = OTHER; note = 2'-O-methyladenosine-3'-phosphorothioate
  modified_base 2: mod_base = OTHER; note = 2'-fluorouridine -3'-phosphorothioate
  modified_base 3: mod_base = OTHER; note = 2'-O-methylcytidine-3'-phosphate
  modified_base 4: mod_base = OTHER; note = 2'-O-methyluridine-3'-phosphate
  modified_base 5: mod_base = OTHER; note = 2'-O-methyladenosine-3'-phosphate
  modified_base 6: mod_base = OTHER; note = 2'-fluoroadenosine-3'-phosphate
  modified_base 7: mod_base = OTHER; note = 2'-O-methyladenosine-3'-phosphate
  modified_base 8: mod_base = OTHER; note = 2'-fluoroadenosine-3'-phosphate
  modified_base 9: mod_base = OTHER; note = 2'-fluorouridine-3'-phosphate
  modified_base 10: mod_base = OTHER; note = 2'-O-methyladenosine-3'-phosphate
  modified_base 11: mod_base = OTHER; note = 2'-O-methyladenosine-3'-phosphate
  modified_base 12: mod_base = OTHER; note = 2'-O-methyladenosine-3'-phosphate
  modified_base 13: mod_base = OTHER; note = 2'-O-methylcytidine-3'-phosphate
  modified_base 14: mod_base = OTHER; note = 2'-fluorocytidine-3'-phosphate
  modified_base 15: mod_base = OTHER; note = 2'-O-methylcytidine-3'-phosphate
  modified_base 16: mod_base = OTHER; note = 2'-fluoroadenosine-3'-phosphate
  modified_base 17: mod_base = OTHER; note = 2'-O-methylguanosine-3'-phosphate
  modified_base 18: mod_base = OTHER; note = 2'-O-methylcytidine-3'-phosphate
  modified_base 19: mod_base = OTHER; note = 2'-O-methyladenosine-3'-phosphate
  modified_base 20: mod_base = OTHER; note = 2'-O-methyladenosine-3'-phosphate
  modified_base 21: mod_base = OTHER; note = 2'-O-methyladenosine-3'-phosphorothioate
  modified_base 22: mod_base = OTHER; note = 2'-O-methylcytidine-3'-phosphorothioate
  modified_base 23: mod_base = OTHER; note = 2'-O-methyluridine-3'-phosphate
atctaaaataaacccagcaaact

SEQ ID NO: 1107 - RNA, 23 nt, synthetic construct
  source 1..23: mol_type = other RNA
  modified_base 1: mod_base = OTHER; note = 2'-O-methyladenosine-3'-phosphorothioate
  modified_base 2: mod_base = OTHER; note = 2'-fluorocytidine-3'-phosphorothioate
  modified_base 3: mod_base = OTHER; note = 2'-O-methyluridine-3'-phosphate
  modified_base 4: mod_base = OTHER; note = 2'-O-methylcytidine-3'-phosphate
  modified_base 5: mod_base = OTHER; note = 2'-O-methyluridine-3'-phosphate
  modified_base 6: mod_base = OTHER; note = 2'-fluoroadenosine-3'-phosphate
  modified_base 7: mod_base = OTHER; note = 2'-O-methyladenosine-3'-phosphate
  modified_base 8: mod_base = OTHER; note = 2'-fluoroadenosine-3'-phosphate
  modified_base 9: mod_base = OTHER; note = 2'-fluoroadenosine-3'-phosphate
  modified_base 10: mod_base = OTHER; note = 2'-O-methyluridine-3'-phosphate
  modified_base 11: mod_base = OTHER; note = 2'-O-methyladenosine-3'-phosphate
  modified_base 12: mod_base = OTHER; note = 2'-O-methyladenosine-3'-phosphate
  modified_base 13: mod_base = OTHER; note = 2'-O-methyladenosine-3'-phosphate
  modified_base 14: mod_base = OTHER; note = 2'-fluorocytidine-3'-phosphate
  modified_base 15: mod_base = OTHER; note = 2'-O-methylcytidine-3'-phosphate
  modified_base 16: mod_base = OTHER; note = 2'-fluorocytidine-3'-phosphate
  modified_base 17: mod_base = OTHER; note = 2'-O-methyladenosine-3'-phosphate
  modified_base 18: mod_base = OTHER; note = 2'-O-methylguanosine-3'-phosphate
  modified_base 19: mod_base = OTHER; note = 2'-O-methylcytidine-3'-phosphate
  modified_base 20: mod_base = OTHER; note = 2'-O-methyladenosine-3'-phosphate
  modified_base 21: mod_base = OTHER; note = 2'-O-methyladenosine-3'-phosphorothioate
  modified_base 22: mod_base = OTHER; note = 2'-O-methyladenosine-3'-phosphorothioate
  modified_base 23: mod_base = OTHER; note = 2'-O-methylcytidine-3'-phosphate
actctaaaataaacccagcaaac

SEQ ID NO: 1108 - RNA, 23 nt, synthetic construct
  source 1..23: mol_type = other RNA
  modified_base 1: mod_base = OTHER; note = 2'-O-methyladenosine-3'-phosphorothioate
  modified_base 2: mod_base = OTHER; note = 2'-fluorouridine -3'-phosphorothioate
  modified_base 3: mod_base = OTHER; note = 2'-O-methylcytidine-3'-phosphate
  modified_base 4: mod_base = OTHER; note = 2'-O-methyluridine-3'-phosphate
  modified_base 5: mod_base = OTHER; note = 2'-O-methylcytidine-3'-phosphate
  modified_base 6: mod_base = OTHER; note = 2'-fluorouridine-3'-phosphate
  modified_base 7: mod_base = OTHER; note = 2'-O-methyladenosine-3'-phosphate
  modified_base 8: mod_base = OTHER; note = 2'-fluoroadenosine-3'-phosphate
  modified_base 9: mod_base = OTHER; note = 2'-fluoroadenosine-3'-phosphate
  modified_base 10: mod_base = OTHER; note = 2'-O-methyladenosine-3'-phosphate
  modified_base 11: mod_base = OTHER; note = 2'-O-methyluridine-3'-phosphate
  modified_base 12: mod_base = OTHER; note = 2'-O-methyladenosine-3'-phosphate
  modified_base 13: mod_base = OTHER; note = 2'-O-methyladenosine-3'-phosphate
  modified_base 14: mod_base = OTHER; note = 2'-fluoroadenosine-3'-phosphate
  modified_base 15: mod_base = OTHER; note = 2'-O-methylcytidine-3'-phosphate
  modified_base 16: mod_base = OTHER; note = 2'-fluorocytidine-3'-phosphate
  modified_base 17: mod_base = OTHER; note = 2'-O-methylcytidine-3'-phosphate
  modified_base 18: mod_base = OTHER; note = 2'-O-methyladenosine-3'-phosphate
  modified_base 19: mod_base = OTHER; note = 2'-O-methylguanosine-3'-phosphate
  modified_base 20: mod_base = OTHER; note = 2'-O-methylcytidine-3'-phosphate
  modified_base 21: mod_base = OTHER; note = 2'-O-methyladenosine-3'-phosphorothioate
  modified_base 22: mod_base = OTHER; note = 2'-O-methyladenosine-3'-phosphorothioate
  modified_base 23: mod_base = OTHER; note = 2'-O-methyladenosine-3'-phosphate
atctctaaaataaacccagcaaa

SEQ ID NO: 1109 - RNA, 23 nt, synthetic construct
  source 1..23: mol_type = other RNA
  modified_base 1: mod_base = OTHER; note = 2'-O-methyladenosine-3'-phosphorothioate
  modified_base 2: mod_base = OTHER; note = 2'-fluorocytidine-3'-phosphorothioate
  modified_base 3: mod_base = OTHER; note = 2'-O-methylcytidine-3'-phosphate
  modified_base 4: mod_base = OTHER; note = 2'-O-methyladenosine-3'-phosphate
  modified_base 5: mod_base = OTHER; note = 2'-O-methyluridine-3'-phosphate
  modified_base 6: mod_base = OTHER; note = 2'-fluorouridine-3'-phosphate
  modified_base 7: mod_base = OTHER; note = 2'-O-methylcytidine-3'-phosphate
  modified_base 8: mod_base = OTHER; note = 2'-fluorouridine-3'-phosphate
  modified_base 9: mod_base = OTHER; note = 2'-fluorocytidine-3'-phosphate
  modified_base 10: mod_base = OTHER; note = 2'-O-methyluridine-3'-phosphate
  modified_base 11: mod_base = OTHER; note = 2'-O-methyladenosine-3'-phosphate
  modified_base 12: mod_base = OTHER; note = 2'-O-methyladenosine-3'-phosphate
  modified_base 13: mod_base = OTHER; note = 2'-O-methyladenosine-3'-phosphate
  modified_base 14: mod_base = OTHER; note = 2'-fluoroadenosine-3'-phosphate
  modified_base 15: mod_base = OTHER; note = 2'-O-methyluridine-3'-phosphate
  modified_base 16: mod_base = OTHER; note = 2'-fluoroadenosine-3'-phosphate
  modified_base 17: mod_base = OTHER; note = 2'-O-methyladenosine-3'-phosphate
  modified_base 18: mod_base = OTHER; note = 2'-O-methyladenosine-3'-phosphate
  modified_base 19: mod_base = OTHER; note = 2'-O-methylcytidine-3'-phosphate
  modified_base 20: mod_base = OTHER; note = 2'-O-methylcytidine-3'-phosphate
  modified_base 21: mod_base = OTHER; note = 2'-O-methylcytidine-3'-phosphorothioate
  modified_base 22: mod_base = OTHER; note = 2'-O-methyladenosine-3'-phosphorothioate
  modified_base 23: mod_base = OTHER; note = 2'-O-methylguanosine-3'-phosphate
accattctctaaaataaacccag

SEQ ID NO: 1110 - RNA, 23 nt, synthetic construct
  source 1..23: mol_type = other RNA
  modified_base 1: mod_base = OTHER; note = 2'-O-methyladenosine-3'-phosphorothioate
  modified_base 2: mod_base = OTHER; note = 2'-fluoroadenosine-3'-phosphorothioate
  modified_base 3: mod_base = OTHER; note = 2'-O-methyladenosine-3'-phosphate
  modified_base 4: mod_base = OTHER; note = 2'-O-methylcytidine-3'-phosphate
  modified_base 5: mod_base = OTHER; note = 2'-O-methyladenosine-3'-phosphate
  modified_base 6: mod_base = OTHER; note = 2'-fluorocytidine-3'-phosphate
  modified_base 7: mod_base = OTHER; note = 2'-O-methyluridine-3'-phosphate
  modified_base 8: mod_base = OTHER; note = 2'-fluoroguanosine-3'-phosphate
  modified_base 9: mod_base = OTHER; note = 2'-fluoroguanosine-3'-phosphate
  modified_base 10: mod_base = OTHER; note = 2'-O-methyluridine-3'-phosphate
  modified_base 11: mod_base = OTHER; note = 2'-O-methyluridine-3'-phosphate
  modified_base 12: mod_base = OTHER; note = 2'-O-methylcytidine-3'-phosphate
  modified_base 13: mod_base = OTHER; note = 2'-O-methyluridine-3'-phosphate
  modified_base 14: mod_base = OTHER; note = 2'-fluorouridine-3'-phosphate
  modified_base 15: mod_base = OTHER; note = 2'-O-methylguanosine-3'-phosphate
  modified_base 16: mod_base = OTHER; note = 2'-fluorocytidine-3'-phosphate
  modified_base 17: mod_base = OTHER; note = 2'-O-methylcytidine-3'-phosphate
  modified_base 18: mod_base = OTHER; note = 2'-O-methyluridine-3'-phosphate
  modified_base 19: mod_base = OTHER; note = 2'-O-methylcytidine-3'-phosphate
  modified_base 20: mod_base = OTHER; note = 2'-O-methylcytidine-3'-phosphate
  modified_base 21: mod_base = OTHER; note = 2'-O-methylcytidine-3'-phosphorothioate
  modified_base 22: mod_base = OTHER; note = 2'-O-methylcytidine-3'-phosphorothioate
  modified_base 23: mod_base = OTHER; note = 2'-O-methyladenosine-3'-phosphate
aaacactggttcttgcctcccca

SEQ ID NO: 1111 - RNA, 23 nt, synthetic construct
  source 1..23: mol_type = other RNA
  modified_base 1: mod_base = OTHER; note = 2'-O-methyladenosine-3'-phosphorothioate
  modified_base 2: mod_base = OTHER; note = 2'-fluoroadenosine-3'-phosphorothioate
  modified_base 3: mod_base = OTHER; note = 2'-O-methyladenosine-3'-phosphate
  modified_base 4: mod_base = OTHER; note = 2'-O-methyladenosine-3'-phosphate
  modified_base 5: mod_base = OTHER; note = 2'-O-methylcytidine-3'-phosphate
  modified_base 6: mod_base = OTHER; note = 2'-fluoroadenosine-3'-phosphate
  modified_base 7: mod_base = OTHER; note = 2'-O-methylcytidine-3'-phosphate
  modified_base 8: mod_base = OTHER; note = 2'-fluorouridine-3'-phosphate
  modified_base 9: mod_base = OTHER; note = 2'-fluoroguanosine-3'-phosphate
  modified_base 10: mod_base = OTHER; note = 2'-O-methylguanosine-3'-phosphate
  modified_base 11: mod_base = OTHER; note = 2'-O-methyluridine-3'-phosphate
  modified_base 12: mod_base = OTHER; note = 2'-O-methyluridine-3'-phosphate
  modified_base 13: mod_base = OTHER; note = 2'-O-methylcytidine-3'-phosphate
  modified_base 14: mod_base = OTHER; note = 2'-fluorouridine-3'-phosphate
  modified_base 15: mod_base = OTHER; note = 2'-O-methyluridine-3'-phosphate
  modified_base 16: mod_base = OTHER; note = 2'-fluoroguanosine-3'-phosphate
  modified_base 17: mod_base = OTHER; note = 2'-O-methylcytidine-3'-phosphate
  modified_base 18: mod_base = OTHER; note = 2'-O-methylcytidine-3'-phosphate
  modified_base 19: mod_base = OTHER; note = 2'-O-methyluridine-3'-phosphate
  modified_base 20: mod_base = OTHER; note = 2'-O-methylcytidine-3'-phosphate
  modified_base 21: mod_base = OTHER; note = 2'-O-methylcytidine-3'-phosphorothioate
  modified_base 22: mod_base = OTHER; note = 2'-O-methylcytidine-3'-phosphorothioate
  modified_base 23: mod_base = OTHER; note = 2'-O-methylcytidine-3'-phosphate
aaaacactggttcttgcctcccc

SEQ ID NO: 1112 - RNA, 23 nt, synthetic construct
  source 1..23: mol_type = other RNA
  modified_base 1: mod_base = OTHER; note = 2'-O-methyladenosine-3'-phosphorothioate
  modified_base 2: mod_base = OTHER; note = 2'-fluorocytidine-3'-phosphorothioate
  modified_base 3: mod_base = OTHER; note = 2'-O-methyluridine-3'-phosphate
  modified_base 4: mod_base = OTHER; note = 2'-O-methyladenosine-3'-phosphate
  modified_base 5: mod_base = OTHER; note = 2'-O-methyladenosine-3'-phosphate
  modified_base 6: mod_base = OTHER; note = 2'-fluoroadenosine-3'-phosphate
  modified_base 7: mod_base = OTHER; note = 2'-O-methylcytidine-3'-phosphate
  modified_base 8: mod_base = OTHER; note = 2'-fluoroadenosine-3'-phosphate
  modified_base 9: mod_base = OTHER; note = 2'-fluorocytidine-3'-phosphate
  modified_base 10: mod_base = OTHER; note = 2'-O-methyluridine-3'-phosphate
  modified_base 11: mod_base = OTHER; note = 2'-O-methylguanosine-3'-phosphate
  modified_base 12: mod_base = OTHER; note = 2'-O-methylguanosine-3'-phosphate
  modified_base 13: mod_base = OTHER; note = 2'-O-methyluridine-3'-phosphate
  modified_base 14: mod_base = OTHER; note = 2'-fluorouridine-3'-phosphate
  modified_base 15: mod_base = OTHER; note = 2'-O-methylcytidine-3'-phosphate
  modified_base 16: mod_base = OTHER; note = 2'-fluorouridine-3'-phosphate
  modified_base 17: mod_base = OTHER; note = 2'-O-methyluridine-3'-phosphate
  modified_base 18: mod_base = OTHER; note = 2'-O-methylguanosine-3'-phosphate
  modified_base 19: mod_base = OTHER; note = 2'-O-methylcytidine-3'-phosphate
  modified_base 20: mod_base = OTHER; note = 2'-O-methylcytidine-3'-phosphate
  modified_base 21: mod_base = OTHER; note = 2'-O-methyluridine-3'-phosphorothioate
  modified_base 22: mod_base = OTHER; note = 2'-O-methylcytidine-3'-phosphorothioate
  modified_base 23: mod_base = OTHER; note = 2'-O-methylcytidine-3'-phosphate
actaaacactggttcttgcctcc

SEQ ID NO: 1113 - RNA, 23 nt, synthetic construct
  source 1..23: mol_type = other RNA
  modified_base 1: mod_base = OTHER; note = 2'-O-methyladenosine-3'-phosphorothioate
  modified_base 2: mod_base = OTHER; note = 2'-fluoroguanosine-3'-phosphorothioate
  modified_base 3: mod_base = OTHER; note = 2'-O-methylcytidine-3'-phosphate
  modified_base 4: mod_base = OTHER; note = 2'-O-methyluridine-3'-phosphate
  modified_base 5: mod_base = OTHER; note = 2'-O-methyladenosine-3'-phosphate
  modified_base 6: mod_base = OTHER; note = 2'-fluoroadenosine-3'-phosphate
  modified_base 7: mod_base = OTHER; note = 2'-O-methyladenosine-3'-phosphate
  modified_base 8: mod_base = OTHER; note = 2'-fluorocytidine-3'-phosphate
  modified_base 9: mod_base = OTHER; note = 2'-fluoroadenosine-3'-phosphate
  modified_base 10: mod_base = OTHER; note = 2'-O-methylcytidine-3'-phosphate
  modified_base 11: mod_base = OTHER; note = 2'-O-methyluridine-3'-phosphate
  modified_base 12: mod_base = OTHER; note = 2'-O-methylguanosine-3'-phosphate
  modified_base 13: mod_base = OTHER; note = 2'-O-methylguanosine-3'-phosphate
  modified_base 14: mod_base = OTHER; note = 2'-fluorouridine-3'-phosphate
  modified_base 15: mod_base = OTHER; note = 2'-O-methyluridine-3'-phosphate
  modified_base 16: mod_base = OTHER; note = 2'-fluorocytidine-3'-phosphate
  modified_base 17: mod_base = OTHER; note = 2'-O-methyluridine-3'-phosphate
  modified_base 18: mod_base = OTHER; note = 2'-O-methyluridine-3'-phosphate
  modified_base 19: mod_base = OTHER; note = 2'-O-methylguanosine-3'-phosphate
  modified_base 20: mod_base = OTHER; note = 2'-O-methylcytidine-3'-phosphate
  modified_base 21: mod_base = OTHER; note = 2'-O-methylcytidine-3'-phosphorothioate
  modified_base 22: mod_base = OTHER; note = 2'-O-methyluridine-3'-phosphorothioate
  modified_base 23: mod_base = OTHER; note = 2'-O-methylcytidine-3'-phosphate
agctaaacactggttcttgcctc

SEQ ID NO: 1114 - RNA, 23 nt, synthetic construct
  source 1..23: mol_type = other RNA
  modified_base 1: mod_base = OTHER; note = 2'-O-methyladenosine-3'-phosphorothioate
  modified_base 2: mod_base = OTHER; note = 2'-fluorocytidine-3'-phosphorothioate
  modified_base 3: mod_base = OTHER; note = 2'-O-methyladenosine-3'-phosphate
  modified_base 4: mod_base = OTHER; note = 2'-O-methylguanosine-3'-phosphate
  modified_base 5: mod_base = OTHER; note = 2'-O-methyluridine-3'-phosphate
  modified_base 6: mod_base = OTHER; note = 2'-fluoroadenosine-3'-phosphate
  modified_base 7: mod_base = OTHER; note = 2'-O-methylguanosine-3'-phosphate
  modified_base 8: mod_base = OTHER; note = 2'-fluorouridine-3'-phosphate
  modified_base 9: mod_base = OTHER; note = 2'-fluorocytidine-3'-phosphate
  modified_base 10: mod_base = OTHER; note = 2'-O-methylcytidine-3'-phosphate
  modified_base 11: mod_base = OTHER; note = 2'-O-methylcytidine-3'-phosphate
  modified_base 12: mod_base = OTHER; note = 2'-O-methylguanosine-3'-phosphate
  modified_base 13: mod_base = OTHER; note = 2'-O-methylcytidine-3'-phosphate
  modified_base 14: mod_base = OTHER; note = 2'-fluoroguanosine-3'-phosphate
  modified_base 15: mod_base = OTHER; note = 2'-O-methylcytidine-3'-phosphate
  modified_base 16: mod_base = OTHER; note = 2'-fluorouridine-3'-phosphate
  modified_base 17: mod_base = OTHER; note = 2'-O-methyladenosine-3'-phosphate
  modified_base 18: mod_base = OTHER; note = 2'-O-methyladenosine-3'-phosphate
  modified_base 19: mod_base = OTHER; note = 2'-O-methyladenosine-3'-phosphate
  modified_base 20: mod_base = OTHER; note = 2'-O-methylcytidine-3'-phosphate
  modified_base 21: mod_base = OTHER; note = 2'-O-methyladenosine-3'-phosphorothioate
  modified_base 22: mod_base = OTHER; note = 2'-O-methylcytidine-3'-phosphorothioate
  modified_base 23: mod_base = OTHER; note = 2'-O-methyluridine-3'-phosphate
acagtagtcccgcgctaaacact

SEQ ID NO: 1115 - RNA, 23 nt, synthetic construct
  source 1..23: mol_type = other RNA
  modified_base 1: mod_base = OTHER; note = 2'-O-methyladenosine-3'-phosphorothioate
  modified_base 2: mod_base = OTHER; note = 2'-fluorouridine -3'-phosphorothioate
  modified_base 3: mod_base = OTHER; note = 2'-O-methyluridine-3'-phosphate
  modified_base 4: mod_base = OTHER; note = 2'-O-methylcytidine-3'-phosphate
  modified_base 5: mod_base = OTHER; note = 2'-O-methyluridine-3'-phosphate
  modified_base 6: mod_base = OTHER; note = 2'-fluorouridine-3'-phosphate
  modified_base 7: mod_base = OTHER; note = 2'-O-methyluridine-3'-phosphate
  modified_base 8: mod_base = OTHER; note = 2'-fluorouridine-3'-phosphate
  modified_base 9: mod_base = OTHER; note = 2'-fluorouridine-3'-phosphate
  modified_base 10: mod_base = OTHER; note = 2'-O-methylguanosine-3'-phosphate
  modified_base 11: mod_base = OTHER; note = 2'-O-methylguanosine-3'-phosphate
  modified_base 12: mod_base = OTHER; note = 2'-O-methyladenosine-3'-phosphate
  modified_base 13: mod_base = OTHER; note = 2'-O-methyladenosine-3'-phosphate
  modified_base 14: mod_base = OTHER; note = 2'-fluorocytidine-3'-phosphate
  modified_base 15: mod_base = OTHER; note = 2'-O-methyladenosine-3'-phosphate
  modified_base 16: mod_base = OTHER; note = 2'-fluoroguanosine-3'-phosphate
  modified_base 17: mod_base = OTHER; note = 2'-O-methyluridine-3'-phosphate
  modified_base 18: mod_base = OTHER; note = 2'-O-methyladenosine-3'-phosphate
  modified_base 19: mod_base = OTHER; note = 2'-O-methylguanosine-3'-phosphate
  modified_base 20: mod_base = OTHER; note = 2'-O-methyluridine-3'-phosphate
  modified_base 21: mod_base = OTHER; note = 2'-O-methylcytidine-3'-phosphorothioate
  modified_base 22: mod_base = OTHER; note = 2'-O-methylcytidine-3'-phosphorothioate
  modified_base 23: mod_base = OTHER; note = 2'-O-methylcytidine-3'-phosphate
attctttttggaacagtagtccc

SEQ ID NO: 1116 - RNA, 23 nt, synthetic construct
  source 1..23: mol_type = other RNA
  modified_base 1: mod_base = OTHER; note = 2'-O-methyladenosine-3'-phosphorothioate
  modified_base 2: mod_base = OTHER; note = 2'-fluoroguanosine-3'-phosphorothioate
  modified_base 3: mod_base = OTHER; note = 2'-O-methylguanosine-3'-phosphate
  modified_base 4: mod_base = OTHER; note = 2'-O-methyladenosine-3'-phosphate
  modified_base 5: mod_base = OTHER; note = 2'-O-methyladenosine-3'-phosphate
  modified_base 6: mod_base = OTHER; note = 2'-fluorouridine-3'-phosphate
  modified_base 7: mod_base = OTHER; note = 2'-O-methyluridine-3'-phosphate
  modified_base 8: mod_base = OTHER; note = 2'-fluorocytidine-3'-phosphate
  modified_base 9: mod_base = OTHER; note = 2'-fluorouridine-3'-phosphate
  modified_base 10: mod_base = OTHER; note = 2'-O-methyluridine-3'-phosphate
  modified_base 11: mod_base = OTHER; note = 2'-O-methyluridine-3'-phosphate
  modified_base 12: mod_base = OTHER; note = 2'-O-methyluridine-3'-phosphate
  modified_base 13: mod_base = OTHER; note = 2'-O-methyluridine-3'-phosphate
  modified_base 14: mod_base = OTHER; note = 2'-fluoroguanosine-3'-phosphate
  modified_base 15: mod_base = OTHER; note = 2'-O-methylguanosine-3'-phosphate
  modified_base 16: mod_base = OTHER; note = 2'-fluoroadenosine-3'-phosphate
  modified_base 17: mod_base = OTHER; note = 2'-O-methyladenosine-3'-phosphate
  modified_base 18: mod_base = OTHER; note = 2'-O-methylcytidine-3'-phosphate
  modified_base 19: mod_base = OTHER; note = 2'-O-methyladenosine-3'-phosphate
  modified_base 20: mod_base = OTHER; note = 2'-O-methylguanosine-3'-phosphate
  modified_base 21: mod_base = OTHER; note = 2'-O-methyluridine-3'-phosphorothioate
  modified_base 22: mod_base = OTHER; note = 2'-O-methyladenosine-3'-phosphorothioate
  modified_base 23: mod_base = OTHER; note = 2'-O-methylguanosine-3'-phosphate
aggaattctttttggaacagtag

SEQ ID NO: 1117 - RNA, 23 nt, synthetic construct
  source 1..23: mol_type = other RNA
  modified_base 1: mod_base = OTHER; note = 2'-O-methyladenosine-3'-phosphorothioate
  modified_base 2: mod_base = OTHER; note = 2'-fluorouridine -3'-phosphorothioate
  modified_base 3: mod_base = OTHER; note = 2'-O-methylguanosine-3'-phosphate
  modified_base 4: mod_base = OTHER; note = 2'-O-methylguanosine-3'-phosphate
  modified_base 5: mod_base = OTHER; note = 2'-O-methyladenosine-3'-phosphate
  modified_base 6: mod_base = OTHER; note = 2'-fluoroadenosine-3'-phosphate
  modified_base 7: mod_base = OTHER; note = 2'-O-methyluridine-3'-phosphate
  modified_base 8: mod_base = OTHER; note = 2'-fluorouridine-3'-phosphate
  modified_base 9: mod_base = OTHER; note = 2'-fluorocytidine-3'-phosphate
  modified_base 10: mod_base = OTHER; note = 2'-O-methyluridine-3'-phosphate
  modified_base 11: mod_base = OTHER; note = 2'-O-methyluridine-3'-phosphate
  modified_base 12: mod_base = OTHER; note = 2'-O-methyluridine-3'-phosphate
  modified_base 13: mod_base = OTHER; note = 2'-O-methyluridine-3'-phosphate
  modified_base 14: mod_base = OTHER; note = 2'-fluorouridine-3'-phosphate
  modified_base 15: mod_base = OTHER; note = 2'-O-methylguanosine-3'-phosphate
  modified_base 16: mod_base = OTHER; note = 2'-fluoroguanosine-3'-phosphate
  modified_base 17: mod_base = OTHER; note = 2'-O-methyladenosine-3'-phosphate
  modified_base 18: mod_base = OTHER; note = 2'-O-methyladenosine-3'-phosphate
  modified_base 19: mod_base = OTHER; note = 2'-O-methylcytidine-3'-phosphate
  modified_base 20: mod_base = OTHER; note = 2'-O-methyladenosine-3'-phosphate
  modified_base 21: mod_base = OTHER; note = 2'-O-methylguanosine-3'-phosphorothioate
  modified_base 22: mod_base = OTHER; note = 2'-O-methyluridine-3'-phosphorothioate
  modified_base 23: mod_base = OTHER; note = 2'-O-methyladenosine-3'-phosphate
atggaattctttttggaacagta

SEQ ID NO: 1118 - RNA, 23 nt, synthetic construct
  source 1..23: mol_type = other RNA
  modified_base 1: mod_base = OTHER; note = 2'-O-methyladenosine-3'-phosphorothioate
  modified_base 2: mod_base = OTHER; note = 2'-fluoroguanosine-3'-phosphorothioate
  modified_base 3: mod_base = OTHER; note = 2'-O-methyluridine-3'-phosphate
  modified_base 4: mod_base = OTHER; note = 2'-O-methylcytidine-3'-phosphate
  modified_base 5: mod_base = OTHER; note = 2'-O-methylguanosine-3'-phosphate
  modified_base 6: mod_base = OTHER; note = 2'-fluoroguanosine-3'-phosphate
  modified_base 7: mod_base = OTHER; note = 2'-O-methyluridine-3'-phosphate
  modified_base 8: mod_base = OTHER; note = 2'-fluorouridine-3'-phosphate
  modified_base 9: mod_base = OTHER; note = 2'-fluoroguanosine-3'-phosphate
  modified_base 10: mod_base = OTHER; note = 2'-O-methylguanosine-3'-phosphate
  modified_base 11: mod_base = OTHER; note = 2'-O-methyladenosine-3'-phosphate
  modified_base 12: mod_base = OTHER; note = 2'-O-methyladenosine-3'-phosphate
  modified_base 13: mod_base = OTHER; note = 2'-O-methyluridine-3'-phosphate
  modified_base 14: mod_base = OTHER; note = 2'-fluorouridine-3'-phosphate
  modified_base 15: mod_base = OTHER; note = 2'-O-methylcytidine-3'-phosphate
  modified_base 16: mod_base = OTHER; note = 2'-fluorouridine-3'-phosphate
  modified_base 17: mod_base = OTHER; note = 2'-O-methyluridine-3'-phosphate
  modified_base 18: mod_base = OTHER; note = 2'-O-methyluridine-3'-phosphate
  modified_base 19: mod_base = OTHER; note = 2'-O-methyluridine-3'-phosphate
  modified_base 20: mod_base = OTHER; note = 2'-O-methyluridine-3'-phosphate
  modified_base 21: mod_base = OTHER; note = 2'-O-methylguanosine-3'-phosphorothioate
  modified_base 22: mod_base = OTHER; note = 2'-O-methylguanosine-3'-phosphorothioate
  modified_base 23: mod_base = OTHER; note = 2'-O-methyladenosine-3'-phosphate
agtcggttggaattctttttgga

SEQ ID NO: 1119 - RNA, 23 nt, synthetic construct
  source 1..23: mol_type = other RNA
  modified_base 1: mod_base = OTHER; note = 2'-O-methyladenosine-3'-phosphorothioate
  modified_base 2: mod_base = OTHER; note = 2'-fluorouridine -3'-phosphorothioate
  modified_base 3: mod_base = OTHER; note = 2'-O-methylcytidine-3'-phosphate
  modified_base 4: mod_base = OTHER; note = 2'-O-methyladenosine-3'-phosphate
  modified_base 5: mod_base = OTHER; note = 2'-O-methylcytidine-3'-phosphate
  modified_base 6: mod_base = OTHER; note = 2'-fluoroadenosine-3'-phosphate
  modified_base 7: mod_base = OTHER; note = 2'-O-methyladenosine-3'-phosphate
  modified_base 8: mod_base = OTHER; note = 2'-fluoroadenosine-3'-phosphate
  modified_base 9: mod_base = OTHER; note = 2'-fluorocytidine-3'-phosphate
  modified_base 10: mod_base = OTHER; note = 2'-O-methyladenosine-3'-phosphate
  modified_base 11: mod_base = OTHER; note = 2'-O-methyladenosine-3'-phosphate
  modified_base 12: mod_base = OTHER; note = 2'-O-methylguanosine-3'-phosphate
  modified_base 13: mod_base = OTHER; note = 2'-O-methylcytidine-3'-phosphate
  modified_base 14: mod_base = OTHER; note = 2'-fluorouridine-3'-phosphate
  modified_base 15: mod_base = OTHER; note = 2'-O-methylguanosine-3'-phosphate
  modified_base 16: mod_base = OTHER; note = 2'-fluoroguanosine-3'-phosphate
  modified_base 17: mod_base = OTHER; note = 2'-O-methyluridine-3'-phosphate
  modified_base 18: mod_base = OTHER; note = 2'-O-methylcytidine-3'-phosphate
  modified_base 19: mod_base = OTHER; note = 2'-O-methylguanosine-3'-phosphate
  modified_base 20: mod_base = OTHER; note = 2'-O-methylguanosine-3'-phosphate
  modified_base 21: mod_base = OTHER; note = 2'-O-methyluridine-3'-phosphorothioate
  modified_base 22: mod_base = OTHER; note = 2'-O-methyluridine-3'-phosphorothioate
  modified_base 23: mod_base = OTHER; note = 2'-O-methylguanosine-3'-phosphate
atcacaaacaagctggtcggttg

SEQ ID NO: 1120 - RNA, 23 nt, synthetic construct
  source 1..23: mol_type = other RNA
  modified_base 1: mod_base = OTHER; note = 2'-O-methyladenosine-3'-phosphorothioate
  modified_base 2: mod_base = OTHER; note = 2'-fluoroadenosine-3'-phosphorothioate
  modified_base 3: mod_base = OTHER; note = 2'-O-methylcytidine-3'-phosphate
  modified_base 4: mod_base = OTHER; note = 2'-O-methyluridine-3'-phosphate
  modified_base 5: mod_base = OTHER; note = 2'-O-methyluridine-3'-phosphate
  modified_base 6: mod_base = OTHER; note = 2'-fluoroguanosine-3'-phosphate
  modified_base 7: mod_base = OTHER; note = 2'-O-methyladenosine-3'-phosphate
  modified_base 8: mod_base = OTHER; note = 2'-fluoroadenosine-3'-phosphate
  modified_base 9: mod_base = OTHER; note = 2'-fluoroadenosine-3'-phosphate
  modified_base 10: mod_base = OTHER; note = 2'-O-methyladenosine-3'-phosphate
  modified_base 11: mod_base = OTHER; note = 2'-O-methylguanosine-3'-phosphate
  modified_base 12: mod_base = OTHER; note = 2'-O-methylguanosine-3'-phosphate
  modified_base 13: mod_base = OTHER; note = 2'-O-methylguanosine-3'-phosphate
  modified_base 14: mod_base = OTHER; note = 2'-fluoroadenosine-3'-phosphate
  modified_base 15: mod_base = OTHER; note = 2'-O-methyladenosine-3'-phosphate
  modified_base 16: mod_base = OTHER; note = 2'-fluorocytidine-3'-phosphate
  modified_base 17: mod_base = OTHER; note = 2'-O-methyladenosine-3'-phosphate
  modified_base 18: mod_base = OTHER; note = 2'-O-methylcytidine-3'-phosphate
  modified_base 19: mod_base = OTHER; note = 2'-O-methyluridine-3'-phosphate
  modified_base 20: mod_base = OTHER; note = 2'-O-methyluridine-3'-phosphate
  modified_base 21: mod_base = OTHER; note = 2'-O-methyluridine-3'-phosphorothioate
  modified_base 22: mod_base = OTHER; note = 2'-O-methyluridine-3'-phosphorothioate
  modified_base 23: mod_base = OTHER; note = 2'-O-methyluridine-3'-phosphate
aacttgaaaagggaacacttttt

SEQ ID NO: 1121 - RNA, 23 nt, synthetic construct
  source 1..23: mol_type = other RNA
  modified_base 1: mod_base = OTHER; note = 2'-O-methyladenosine-3'-phosphorothioate
  modified_base 2: mod_base = OTHER; note = 2'-fluorocytidine-3'-phosphorothioate
  modified_base 3: mod_base = OTHER; note = 2'-O-methyladenosine-3'-phosphate
  modified_base 4: mod_base = OTHER; note = 2'-O-methyladenosine-3'-phosphate
  modified_base 5: mod_base = OTHER; note = 2'-O-methylcytidine-3'-phosphate
  modified_base 6: mod_base = OTHER; note = 2'-fluorouridine-3'-phosphate
  modified_base 7: mod_base = OTHER; note = 2'-O-methyluridine-3'-phosphate
  modified_base 8: mod_base = OTHER; note = 2'-fluoroguanosine-3'-phosphate
  modified_base 9: mod_base = OTHER; note = 2'-fluoroadenosine-3'-phosphate
  modified_base 10: mod_base = OTHER; note = 2'-O-methyladenosine-3'-phosphate
  modified_base 11: mod_base = OTHER; note = 2'-O-methyladenosine-3'-phosphate
  modified_base 12: mod_base = OTHER; note = 2'-O-methyladenosine-3'-phosphate
  modified_base 13: mod_base = OTHER; note = 2'-O-methylguanosine-3'-phosphate
  modified_base 14: mod_base = OTHER; note = 2'-fluoroguanosine-3'-phosphate
  modified_base 15: mod_base = OTHER; note = 2'-O-methylguanosine-3'-phosphate
  modified_base 16: mod_base = OTHER; note = 2'-fluoroadenosine-3'-phosphate
  modified_base 17: mod_base = OTHER; note = 2'-O-methyladenosine-3'-phosphate
  modified_base 18: mod_base = OTHER; note = 2'-O-methylcytidine-3'-phosphate
  modified_base 19: mod_base = OTHER; note = 2'-O-methyladenosine-3'-phosphate
  modified_base 20: mod_base = OTHER; note = 2'-O-methylcytidine-3'-phosphate
  modified_base 21: mod_base = OTHER; note = 2'-O-methyluridine-3'-phosphorothioate
  modified_base 22: mod_base = OTHER; note = 2'-O-methyluridine-3'-phosphorothioate
  modified_base 23: mod_base = OTHER; note = 2'-O-methyluridine-3'-phosphate
acaacttgaaaagggaacacttt

SEQ ID NO: 1122 - RNA, 23 nt, synthetic construct
  source 1..23: mol_type = other RNA
  modified_base 1: mod_base = OTHER; note = 2'-O-methyladenosine-3'-phosphorothioate
  modified_base 2: mod_base = OTHER; note = 2'-fluorouridine -3'-phosphorothioate
  modified_base 3: mod_base = OTHER; note = 2'-O-methylcytidine-3'-phosphate
  modified_base 4: mod_base = OTHER; note = 2'-O-methyladenosine-3'-phosphate
  modified_base 5: mod_base = OTHER; note = 2'-O-methyladenosine-3'-phosphate
  modified_base 6: mod_base = OTHER; note = 2'-fluorocytidine-3'-phosphate
  modified_base 7: mod_base = OTHER; note = 2'-O-methyluridine-3'-phosphate
  modified_base 8: mod_base = OTHER; note = 2'-fluorouridine-3'-phosphate
  modified_base 9: mod_base = OTHER; note = 2'-fluoroguanosine-3'-phosphate
  modified_base 10: mod_base = OTHER; note = 2'-O-methyladenosine-3'-phosphate
  modified_base 11: mod_base = OTHER; note = 2'-O-methyladenosine-3'-phosphate
  modified_base 12: mod_base = OTHER; note = 2'-O-methyladenosine-3'-phosphate
  modified_base 13: mod_base = OTHER; note = 2'-O-methyladenosine-3'-phosphate
  modified_base 14: mod_base = OTHER; note = 2'-fluoroguanosine-3'-phosphate
  modified_base 15: mod_base = OTHER; note = 2'-O-methylguanosine-3'-phosphate
  modified_base 16: mod_base = OTHER; note = 2'-fluoroguanosine-3'-phosphate
  modified_base 17: mod_base = OTHER; note = 2'-O-methyladenosine-3'-phosphate
  modified_base 18: mod_base = OTHER; note = 2'-O-methyladenosine-3'-phosphate
  modified_base 19: mod_base = OTHER; note = 2'-O-methylcytidine-3'-phosphate
  modified_base 20: mod_base = OTHER; note = 2'-O-methyladenosine-3'-phosphate
  modified_base 21: mod_base = OTHER; note = 2'-O-methylcytidine-3'-phosphorothioate
  modified_base 22: mod_base = OTHER; note = 2'-O-methyluridine-3'-phosphorothioate
  modified_base 23: mod_base = OTHER; note = 2'-O-methyluridine-3'-phosphate
atcaacttgaaaagggaacactt

SEQ ID NO: 1123 - RNA, 23 nt, synthetic construct
  source 1..23: mol_type = other RNA
  modified_base 1: mod_base = OTHER; note = 2'-O-methyladenosine-3'-phosphorothioate
  modified_base 2: mod_base = OTHER; note = 2'-fluorocytidine-3'-phosphorothioate
  modified_base 3: mod_base = OTHER; note = 2'-O-methyluridine-3'-phosphate
  modified_base 4: mod_base = OTHER; note = 2'-O-methylcytidine-3'-phosphate
  modified_base 5: mod_base = OTHER; note = 2'-O-methyladenosine-3'-phosphate
  modified_base 6: mod_base = OTHER; note = 2'-fluoroadenosine-3'-phosphate
  modified_base 7: mod_base = OTHER; note = 2'-O-methylcytidine-3'-phosphate
  modified_base 8: mod_base = OTHER; note = 2'-fluorouridine-3'-phosphate
  modified_base 9: mod_base = OTHER; note = 2'-fluorouridine-3'-phosphate
  modified_base 10: mod_base = OTHER; note = 2'-O-methylguanosine-3'-phosphate
  modified_base 11: mod_base = OTHER; note = 2'-O-methyladenosine-3'-phosphate
  modified_base 12: mod_base = OTHER; note = 2'-O-methyladenosine-3'-phosphate
  modified_base 13: mod_base = OTHER; note = 2'-O-methyladenosine-3'-phosphate
  modified_base 14: mod_base = OTHER; note = 2'-fluoroadenosine-3'-phosphate
  modified_base 15: mod_base = OTHER; note = 2'-O-methylguanosine-3'-phosphate
  modified_base 16: mod_base = OTHER; note = 2'-fluoroguanosine-3'-phosphate
  modified_base 17: mod_base = OTHER; note = 2'-O-methylguanosine-3'-phosphate
  modified_base 18: mod_base = OTHER; note = 2'-O-methyladenosine-3'-phosphate
  modified_base 19: mod_base = OTHER; note = 2'-O-methyladenosine-3'-phosphate
  modified_base 20: mod_base = OTHER; note = 2'-O-methylcytidine-3'-phosphate
  modified_base 21: mod_base = OTHER; note = 2'-O-methyladenosine-3'-phosphorothioate
  modified_base 22: mod_base = OTHER; note = 2'-O-methylcytidine-3'-phosphorothioate
  modified_base 23: mod_base = OTHER; note = 2'-O-methyluridine-3'-phosphate
actcaacttgaaaagggaacact

SEQ ID NO: 1124 - RNA, 23 nt, synthetic construct
  source 1..23: mol_type = other RNA
  modified_base 1: mod_base = OTHER; note = 2'-O-methyladenosine-3'-phosphorothioate
  modified_base 2: mod_base = OTHER; note = 2'-fluorouridine -3'-phosphorothioate
  modified_base 3: mod_base = OTHER; note = 2'-O-methylcytidine-3'-phosphate
  modified_base 4: mod_base = OTHER; note = 2'-O-methyluridine-3'-phosphate
  modified_base 5: mod_base = OTHER; note = 2'-O-methylcytidine-3'-phosphate
  modified_base 6: mod_base = OTHER; note = 2'-fluoroadenosine-3'-phosphate
  modified_base 7: mod_base = OTHER; note = 2'-O-methyladenosine-3'-phosphate
  modified_base 8: mod_base = OTHER; note = 2'-fluorocytidine-3'-phosphate
  modified_base 9: mod_base = OTHER; note = 2'-fluorouridine-3'-phosphate
  modified_base 10: mod_base = OTHER; note = 2'-O-methyluridine-3'-phosphate
  modified_base 11: mod_base = OTHER; note = 2'-O-methylguanosine-3'-phosphate
  modified_base 12: mod_base = OTHER; note = 2'-O-methyladenosine-3'-phosphate
  modified_base 13: mod_base = OTHER; note = 2'-O-methyladenosine-3'-phosphate
  modified_base 14: mod_base = OTHER; note = 2'-fluoroadenosine-3'-phosphate
  modified_base 15: mod_base = OTHER; note = 2'-O-methyladenosine-3'-phosphate
  modified_base 16: mod_base = OTHER; note = 2'-fluoroguanosine-3'-phosphate
  modified_base 17: mod_base = OTHER; note = 2'-O-methylguanosine-3'-phosphate
  modified_base 18: mod_base = OTHER; note = 2'-O-methylguanosine-3'-phosphate
  modified_base 19: mod_base = OTHER; note = 2'-O-methyladenosine-3'-phosphate
  modified_base 20: mod_base = OTHER; note = 2'-O-methyladenosine-3'-phosphate
  modified_base 21: mod_base = OTHER; note = 2'-O-methylcytidine-3'-phosphorothioate
  modified_base 22: mod_base = OTHER; note = 2'-O-methyladenosine-3'-phosphorothioate
  modified_base 23: mod_base = OTHER; note = 2'-O-methylcytidine-3'-phosphate
atctcaacttgaaaagggaacac

SEQ ID NO: 1125 - RNA, 23 nt, synthetic construct
  source 1..23: mol_type = other RNA
  modified_base 1: mod_base = OTHER; note = 2'-O-methyladenosine-3'-phosphorothioate
  modified_base 2: mod_base = OTHER; note = 2'-fluorocytidine-3'-phosphorothioate
  modified_base 3: mod_base = OTHER; note = 2'-O-methyladenosine-3'-phosphate
  modified_base 4: mod_base = OTHER; note = 2'-O-methyladenosine-3'-phosphate
  modified_base 5: mod_base = OTHER; note = 2'-O-methyluridine-3'-phosphate
  modified_base 6: mod_base = OTHER; note = 2'-fluorouridine-3'-phosphate
  modified_base 7: mod_base = OTHER; note = 2'-O-methyluridine-3'-phosphate
  modified_base 8: mod_base = OTHER; note = 2'-fluorouridine-3'-phosphate
  modified_base 9: mod_base = OTHER; note = 2'-fluorouridine-3'-phosphate
  modified_base 10: mod_base = OTHER; note = 2'-O-methylguanosine-3'-phosphate
  modified_base 11: mod_base = OTHER; note = 2'-O-methyluridine-3'-phosphate
  modified_base 12: mod_base = OTHER; note = 2'-O-methyluridine-3'-phosphate
  modified_base 13: mod_base = OTHER; note = 2'-O-methylcytidine-3'-phosphate
  modified_base 14: mod_base = OTHER; note = 2'-fluorouridine-3'-phosphate
  modified_base 15: mod_base = OTHER; note = 2'-O-methylcytidine-3'-phosphate
  modified_base 16: mod_base = OTHER; note = 2'-fluoroadenosine-3'-phosphate
  modified_base 17: mod_base = OTHER; note = 2'-O-methyladenosine-3'-phosphate
  modified_base 18: mod_base = OTHER; note = 2'-O-methylcytidine-3'-phosphate
  modified_base 19: mod_base = OTHER; note = 2'-O-methyluridine-3'-phosphate
  modified_base 20: mod_base = OTHER; note = 2'-O-methyluridine-3'-phosphate
  modified_base 21: mod_base = OTHER; note = 2'-O-methylguanosine-3'-phosphorothioate
  modified_base 22: mod_base = OTHER; note = 2'-O-methyladenosine-3'-phosphorothioate
  modified_base 23: mod_base = OTHER; note = 2'-O-methyladenosine-3'-phosphate
acaatttttgttctcaacttgaa

SEQ ID NO: 1126 - RNA, 23 nt, synthetic construct
  source 1..23: mol_type = other RNA
  modified_base 1: mod_base = OTHER; note = 2'-O-methyladenosine-3'-phosphorothioate
  modified_base 2: mod_base = OTHER; note = 2'-fluorocytidine-3'-phosphorothioate
  modified_base 3: mod_base = OTHER; note = 2'-O-methylcytidine-3'-phosphate
  modified_base 4: mod_base = OTHER; note = 2'-O-methyladenosine-3'-phosphate
  modified_base 5: mod_base = OTHER; note = 2'-O-methyladenosine-3'-phosphate
  modified_base 6: mod_base = OTHER; note = 2'-fluorouridine-3'-phosphate
  modified_base 7: mod_base = OTHER; note = 2'-O-methyluridine-3'-phosphate
  modified_base 8: mod_base = OTHER; note = 2'-fluorouridine-3'-phosphate
  modified_base 9: mod_base = OTHER; note = 2'-fluorouridine-3'-phosphate
  modified_base 10: mod_base = OTHER; note = 2'-O-methyluridine-3'-phosphate
  modified_base 11: mod_base = OTHER; note = 2'-O-methylguanosine-3'-phosphate
  modified_base 12: mod_base = OTHER; note = 2'-O-methyluridine-3'-phosphate
  modified_base 13: mod_base = OTHER; note = 2'-O-methyluridine-3'-phosphate
  modified_base 14: mod_base = OTHER; note = 2'-fluorocytidine-3'-phosphate
  modified_base 15: mod_base = OTHER; note = 2'-O-methyluridine-3'-phosphate
  modified_base 16: mod_base = OTHER; note = 2'-fluorocytidine-3'-phosphate
  modified_base 17: mod_base = OTHER; note = 2'-O-methyladenosine-3'-phosphate
  modified_base 18: mod_base = OTHER; note = 2'-O-methyladenosine-3'-phosphate
  modified_base 19: mod_base = OTHER; note = 2'-O-methylcytidine-3'-phosphate
  modified_base 20: mod_base = OTHER; note = 2'-O-methyluridine-3'-phosphate
  modified_base 21: mod_base = OTHER; note = 2'-O-methyluridine-3'-phosphorothioate
  modified_base 22: mod_base = OTHER; note = 2'-O-methylguanosine-3'-phosphorothioate
  modified_base 23: mod_base = OTHER; note = 2'-O-methyladenosine-3'-phosphate
accaatttttgttctcaacttga

SEQ ID NO: 1127 - RNA, 23 nt, synthetic construct
  source 1..23: mol_type = other RNA
  modified_base 1: mod_base = OTHER; note = 2'-O-methyladenosine-3'-phosphorothioate
  modified_base 2: mod_base = OTHER; note = 2'-fluoroadenosine-3'-phosphorothioate
  modified_base 3: mod_base = OTHER; note = 2'-O-methylcytidine-3'-phosphate
  modified_base 4: mod_base = OTHER; note = 2'-O-methylcytidine-3'-phosphate
  modified_base 5: mod_base = OTHER; note = 2'-O-methylcytidine-3'-phosphate
  modified_base 6: mod_base = OTHER; note = 2'-fluoroadenosine-3'-phosphate
  modified_base 7: mod_base = OTHER; note = 2'-O-methyladenosine-3'-phosphate
  modified_base 8: mod_base = OTHER; note = 2'-fluorouridine-3'-phosphate
  modified_base 9: mod_base = OTHER; note = 2'-fluorouridine-3'-phosphate
  modified_base 10: mod_base = OTHER; note = 2'-O-methyluridine-3'-phosphate
  modified_base 11: mod_base = OTHER; note = 2'-O-methyluridine-3'-phosphate
  modified_base 12: mod_base = OTHER; note = 2'-O-methyluridine-3'-phosphate
  modified_base 13: mod_base = OTHER; note = 2'-O-methylguanosine-3'-phosphate
  modified_base 14: mod_base = OTHER; note = 2'-fluorouridine-3'-phosphate
  modified_base 15: mod_base = OTHER; note = 2'-O-methyluridine-3'-phosphate
  modified_base 16: mod_base = OTHER; note = 2'-fluorocytidine-3'-phosphate
  modified_base 17: mod_base = OTHER; note = 2'-O-methyluridine-3'-phosphate
  modified_base 18: mod_base = OTHER; note = 2'-O-methylcytidine-3'-phosphate
  modified_base 19: mod_base = OTHER; note = 2'-O-methyladenosine-3'-phosphate
  modified_base 20: mod_base = OTHER; note = 2'-O-methyladenosine-3'-phosphate
  modified_base 21: mod_base = OTHER; note = 2'-O-methylcytidine-3'-phosphorothioate
  modified_base 22: mod_base = OTHER; note = 2'-O-methyluridine-3'-phosphorothioate
  modified_base 23: mod_base = OTHER; note = 2'-O-methyluridine-3'-phosphate
aacccaatttttgttctcaactt

SEQ ID NO: 1128 - RNA, 23 nt, synthetic construct
  source 1..23: mol_type = other RNA
  modified_base 1: mod_base = OTHER; note = 2'-O-methyladenosine-3'-phosphorothioate
  modified_base 2: mod_base = OTHER; note = 2'-fluoroadenosine-3'-phosphorothioate
  modified_base 3: mod_base = OTHER; note = 2'-O-methyladenosine-3'-phosphate
  modified_base 4: mod_base = OTHER; note = 2'-O-methylcytidine-3'-phosphate
  modified_base 5: mod_base = OTHER; note = 2'-O-methylcytidine-3'-phosphate
  modified_base 6: mod_base = OTHER; note = 2'-fluorocytidine-3'-phosphate
  modified_base 7: mod_base = OTHER; note = 2'-O-methyladenosine-3'-phosphate
  modified_base 8: mod_base = OTHER; note = 2'-fluoroadenosine-3'-phosphate
  modified_base 9: mod_base = OTHER; note = 2'-fluorouridine-3'-phosphate
  modified_base 10: mod_base = OTHER; note = 2'-O-methyluridine-3'-phosphate
  modified_base 11: mod_base = OTHER; note = 2'-O-methyluridine-3'-phosphate
  modified_base 12: mod_base = OTHER; note = 2'-O-methyluridine-3'-phosphate
  modified_base 13: mod_base = OTHER; note = 2'-O-methyluridine-3'-phosphate
  modified_base 14: mod_base = OTHER; note = 2'-fluoroguanosine-3'-phosphate
  modified_base 15: mod_base = OTHER; note = 2'-O-methyluridine-3'-phosphate
  modified_base 16: mod_base = OTHER; note = 2'-fluorouridine-3'-phosphate
  modified_base 17: mod_base = OTHER; note = 2'-O-methylcytidine-3'-phosphate
  modified_base 18: mod_base = OTHER; note = 2'-O-methyluridine-3'-phosphate
  modified_base 19: mod_base = OTHER; note = 2'-O-methylcytidine-3'-phosphate
  modified_base 20: mod_base = OTHER; note = 2'-O-methyladenosine-3'-phosphate
  modified_base 21: mod_base = OTHER; note = 2'-O-methyladenosine-3'-phosphorothioate
  modified_base 22: mod_base = OTHER; note = 2'-O-methylcytidine-3'-phosphorothioate
  modified_base 23: mod_base = OTHER; note = 2'-O-methyluridine-3'-phosphate
aaacccaatttttgttctcaact

SEQ ID NO: 1129 - RNA, 23 nt, synthetic construct
  source 1..23: mol_type = other RNA
  modified_base 1: mod_base = OTHER; note = 2'-O-methyladenosine-3'-phosphorothioate
  modified_base 2: mod_base = OTHER; note = 2'-fluoroadenosine-3'-phosphorothioate
  modified_base 3: mod_base = OTHER; note = 2'-O-methyladenosine-3'-phosphate
  modified_base 4: mod_base = OTHER; note = 2'-O-methyladenosine-3'-phosphate
  modified_base 5: mod_base = OTHER; note = 2'-O-methylcytidine-3'-phosphate
  modified_base 6: mod_base = OTHER; note = 2'-fluorocytidine-3'-phosphate
  modified_base 7: mod_base = OTHER; note = 2'-O-methylcytidine-3'-phosphate
  modified_base 8: mod_base = OTHER; note = 2'-fluoroadenosine-3'-phosphate
  modified_base 9: mod_base = OTHER; note = 2'-fluoroadenosine-3'-phosphate
  modified_base 10: mod_base = OTHER; note = 2'-O-methyluridine-3'-phosphate
  modified_base 11: mod_base = OTHER; note = 2'-O-methyluridine-3'-phosphate
  modified_base 12: mod_base = OTHER; note = 2'-O-methyluridine-3'-phosphate
  modified_base 13: mod_base = OTHER; note = 2'-O-methyluridine-3'-phosphate
  modified_base 14: mod_base = OTHER; note = 2'-fluorouridine-3'-phosphate
  modified_base 15: mod_base = OTHER; note = 2'-O-methylguanosine-3'-phosphate
  modified_base 16: mod_base = OTHER; note = 2'-fluorouridine-3'-phosphate
  modified_base 17: mod_base = OTHER; note = 2'-O-methyluridine-3'-phosphate
  modified_base 18: mod_base = OTHER; note = 2'-O-methylcytidine-3'-phosphate
  modified_base 19: mod_base = OTHER; note = 2'-O-methyluridine-3'-phosphate
  modified_base 20: mod_base = OTHER; note = 2'-O-methylcytidine-3'-phosphate
  modified_base 21: mod_base = OTHER; note = 2'-O-methyladenosine-3'-phosphorothioate
  modified_base 22: mod_base = OTHER; note = 2'-O-methyladenosine-3'-phosphorothioate
  modified_base 23: mod_base = OTHER; note = 2'-O-methylcytidine-3'-phosphate
aaaacccaatttttgttctcaac

SEQ ID NO: 1130 - RNA, 23 nt, synthetic construct
  source 1..23: mol_type = other RNA
  modified_base 1: mod_base = OTHER; note = 2'-O-methyladenosine-3'-phosphorothioate
  modified_base 2: mod_base = OTHER; note = 2'-fluoroadenosine-3'-phosphorothioate
  modified_base 3: mod_base = OTHER; note = 2'-O-methyladenosine-3'-phosphate
  modified_base 4: mod_base = OTHER; note = 2'-O-methyladenosine-3'-phosphate
  modified_base 5: mod_base = OTHER; note = 2'-O-methyladenosine-3'-phosphate
  modified_base 6: mod_base = OTHER; note = 2'-fluorocytidine-3'-phosphate
  modified_base 7: mod_base = OTHER; note = 2'-O-methylcytidine-3'-phosphate
  modified_base 8: mod_base = OTHER; note = 2'-fluorocytidine-3'-phosphate
  modified_base 9: mod_base = OTHER; note = 2'-fluoroadenosine-3'-phosphate
  modified_base 10: mod_base = OTHER; note = 2'-O-methyladenosine-3'-phosphate
  modified_base 11: mod_base = OTHER; note = 2'-O-methyluridine-3'-phosphate
  modified_base 12: mod_base = OTHER; note = 2'-O-methyluridine-3'-phosphate
  modified_base 13: mod_base = OTHER; note = 2'-O-methyluridine-3'-phosphate
  modified_base 14: mod_base = OTHER; note = 2'-fluorouridine-3'-phosphate
  modified_base 15: mod_base = OTHER; note = 2'-O-methyluridine-3'-phosphate
  modified_base 16: mod_base = OTHER; note = 2'-fluoroguanosine-3'-phosphate
  modified_base 17: mod_base = OTHER; note = 2'-O-methyluridine-3'-phosphate
  modified_base 18: mod_base = OTHER; note = 2'-O-methyluridine-3'-phosphate
  modified_base 19: mod_base = OTHER; note = 2'-O-methylcytidine-3'-phosphate
  modified_base 20: mod_base = OTHER; note = 2'-O-methyluridine-3'-phosphate
  modified_base 21: mod_base = OTHER; note = 2'-O-methylcytidine-3'-phosphorothioate
  modified_base 22: mod_base = OTHER; note = 2'-O-methyladenosine-3'-phosphorothioate
  modified_base 23: mod_base = OTHER; note = 2'-O-methyladenosine-3'-phosphate
aaaaacccaatttttgttctcaa

SEQ ID NO: 1131 - RNA, 23 nt, synthetic construct
  source 1..23: mol_type = other RNA
  modified_base 1: mod_base = OTHER; note = 2'-O-methyladenosine-3'-phosphorothioate
  modified_base 2: mod_base = OTHER; note = 2'-fluorouridine -3'-phosphorothioate
  modified_base 3: mod_base = OTHER; note = 2'-O-methyladenosine-3'-phosphate
  modified_base 4: mod_base = OTHER; note = 2'-O-methyladenosine-3'-phosphate
  modified_base 5: mod_base = OTHER; note = 2'-O-methyladenosine-3'-phosphate
  modified_base 6: mod_base = OTHER; note = 2'-fluoroadenosine-3'-phosphate
  modified_base 7: mod_base = OTHER; note = 2'-O-methylcytidine-3'-phosphate
  modified_base 8: mod_base = OTHER; note = 2'-fluorocytidine-3'-phosphate
  modified_base 9: mod_base = OTHER; note = 2'-fluorocytidine-3'-phosphate
  modified_base 10: mod_base = OTHER; note = 2'-O-methyladenosine-3'-phosphate
  modified_base 11: mod_base = OTHER; note = 2'-O-methyladenosine-3'-phosphate
  modified_base 12: mod_base = OTHER; note = 2'-O-methyluridine-3'-phosphate
  modified_base 13: mod_base = OTHER; note = 2'-O-methyluridine-3'-phosphate
  modified_base 14: mod_base = OTHER; note = 2'-fluorouridine-3'-phosphate
  modified_base 15: mod_base = OTHER; note = 2'-O-methyluridine-3'-phosphate
  modified_base 16: mod_base = OTHER; note = 2'-fluorouridine-3'-phosphate
  modified_base 17: mod_base = OTHER; note = 2'-O-methylguanosine-3'-phosphate
  modified_base 18: mod_base = OTHER; note = 2'-O-methyluridine-3'-phosphate
  modified_base 19: mod_base = OTHER; note = 2'-O-methyluridine-3'-phosphate
  modified_base 20: mod_base = OTHER; note = 2'-O-methylcytidine-3'-phosphate
  modified_base 21: mod_base = OTHER; note = 2'-O-methyluridine-3'-phosphorothioate
  modified_base 22: mod_base = OTHER; note = 2'-O-methylcytidine-3'-phosphorothioate
  modified_base 23: mod_base = OTHER; note = 2'-O-methyladenosine-3'-phosphate
ataaaacccaatttttgttctca

SEQ ID NO: 1132 - RNA, 23 nt, synthetic construct
  source 1..23: mol_type = other RNA
  modified_base 1: mod_base = OTHER; note = 2'-O-methyladenosine-3'-phosphorothioate
  modified_base 2: mod_base = OTHER; note = 2'-fluorouridine -3'-phosphorothioate
  modified_base 3: mod_base = OTHER; note = 2'-O-methyluridine-3'-phosphate
  modified_base 4: mod_base = OTHER; note = 2'-O-methyladenosine-3'-phosphate
  modified_base 5: mod_base = OTHER; note = 2'-O-methyladenosine-3'-phosphate
  modified_base 6: mod_base = OTHER; note = 2'-fluoroadenosine-3'-phosphate
  modified_base 7: mod_base = OTHER; note = 2'-O-methyladenosine-3'-phosphate
  modified_base 8: mod_base = OTHER; note = 2'-fluorocytidine-3'-phosphate
  modified_base 9: mod_base = OTHER; note = 2'-fluorocytidine-3'-phosphate
  modified_base 10: mod_base = OTHER; note = 2'-O-methylcytidine-3'-phosphate
  modified_base 11: mod_base = OTHER; note = 2'-O-methyladenosine-3'-phosphate
  modified_base 12: mod_base = OTHER; note = 2'-O-methyladenosine-3'-phosphate
  modified_base 13: mod_base = OTHER; note = 2'-O-methyluridine-3'-phosphate
  modified_base 14: mod_base = OTHER; note = 2'-fluorouridine-3'-phosphate
  modified_base 15: mod_base = OTHER; note = 2'-O-methyluridine-3'-phosphate
  modified_base 16: mod_base = OTHER; note = 2'-fluorouridine-3'-phosphate
  modified_base 17: mod_base = OTHER; note = 2'-O-methyluridine-3'-phosphate
  modified_base 18: mod_base = OTHER; note = 2'-O-methylguanosine-3'-phosphate
  modified_base 19: mod_base = OTHER; note = 2'-O-methyluridine-3'-phosphate
  modified_base 20: mod_base = OTHER; note = 2'-O-methyluridine-3'-phosphate
  modified_base 21: mod_base = OTHER; note = 2'-O-methylcytidine-3'-phosphorothioate
  modified_base 22: mod_base = OTHER; note = 2'-O-methyluridine-3'-phosphorothioate
  modified_base 23: mod_base = OTHER; note = 2'-O-methylcytidine-3'-phosphate
attaaaacccaatttttgttctc

SEQ ID NO: 1133 - RNA, 23 nt, synthetic construct
  source 1..23: mol_type = other RNA
  modified_base 1: mod_base = OTHER; note = 2'-O-methyladenosine-3'-phosphorothioate
  modified_base 2: mod_base = OTHER; note = 2'-fluoroguanosine-3'-phosphorothioate
  modified_base 3: mod_base = OTHER; note = 2'-O-methylguanosine-3'-phosphate
  modified_base 4: mod_base = OTHER; note = 2'-O-methylcytidine-3'-phosphate
  modified_base 5: mod_base = OTHER; note = 2'-O-methyladenosine-3'-phosphate
  modified_base 6: mod_base = OTHER; note = 2'-fluoroadenosine-3'-phosphate
  modified_base 7: mod_base = OTHER; note = 2'-O-methyluridine-3'-phosphate
  modified_base 8: mod_base = OTHER; note = 2'-fluoroguanosine-3'-phosphate
  modified_base 9: mod_base = OTHER; note = 2'-fluorocytidine-3'-phosphate
  modified_base 10: mod_base = OTHER; note = 2'-O-methyladenosine-3'-phosphate
  modified_base 11: mod_base = OTHER; note = 2'-O-methyladenosine-3'-phosphate
  modified_base 12: mod_base = OTHER; note = 2'-O-methyladenosine-3'-phosphate
  modified_base 13: mod_base = OTHER; note = 2'-O-methyladenosine-3'-phosphate
  modified_base 14: mod_base = OTHER; note = 2'-fluoroadenosine-3'-phosphate
  modified_base 15: mod_base = OTHER; note = 2'-O-methyluridine-3'-phosphate
  modified_base 16: mod_base = OTHER; note = 2'-fluoroguanosine-3'-phosphate
  modified_base 17: mod_base = OTHER; note = 2'-O-methyluridine-3'-phosphate
  modified_base 18: mod_base = OTHER; note = 2'-O-methyladenosine-3'-phosphate
  modified_base 19: mod_base = OTHER; note = 2'-O-methyluridine-3'-phosphate
  modified_base 20: mod_base = OTHER; note = 2'-O-methyladenosine-3'-phosphate
  modified_base 21: mod_base = OTHER; note = 2'-O-methylcytidine-3'-phosphorothioate
  modified_base 22: mod_base = OTHER; note = 2'-O-methyluridine-3'-phosphorothioate
  modified_base 23: mod_base = OTHER; note = 2'-O-methyluridine-3'-phosphate
aggcaatgcaaaaatgtatactt

SEQ ID NO: 1134 - RNA, 23 nt, synthetic construct
  source 1..23: mol_type = other RNA
  modified_base 1: mod_base = OTHER; note = 2'-O-methyladenosine-3'-phosphorothioate
  modified_base 2: mod_base = OTHER; note = 2'-fluoroadenosine-3'-phosphorothioate
  modified_base 3: mod_base = OTHER; note = 2'-O-methyladenosine-3'-phosphate
  modified_base 4: mod_base = OTHER; note = 2'-O-methylguanosine-3'-phosphate
  modified_base 5: mod_base = OTHER; note = 2'-O-methylguanosine-3'-phosphate
  modified_base 6: mod_base = OTHER; note = 2'-fluorocytidine-3'-phosphate
  modified_base 7: mod_base = OTHER; note = 2'-O-methyladenosine-3'-phosphate
  modified_base 8: mod_base = OTHER; note = 2'-fluoroadenosine-3'-phosphate
  modified_base 9: mod_base = OTHER; note = 2'-fluorouridine-3'-phosphate
  modified_base 10: mod_base = OTHER; note = 2'-O-methylguanosine-3'-phosphate
  modified_base 11: mod_base = OTHER; note = 2'-O-methylcytidine-3'-phosphate
  modified_base 12: mod_base = OTHER; note = 2'-O-methyladenosine-3'-phosphate
  modified_base 13: mod_base = OTHER; note = 2'-O-methyladenosine-3'-phosphate
  modified_base 14: mod_base = OTHER; note = 2'-fluoroadenosine-3'-phosphate
  modified_base 15: mod_base = OTHER; note = 2'-O-methyladenosine-3'-phosphate
  modified_base 16: mod_base = OTHER; note = 2'-fluoroadenosine-3'-phosphate
  modified_base 17: mod_base = OTHER; note = 2'-O-methyluridine-3'-phosphate
  modified_base 18: mod_base = OTHER; note = 2'-O-methylguanosine-3'-phosphate
  modified_base 19: mod_base = OTHER; note = 2'-O-methyluridine-3'-phosphate
  modified_base 20: mod_base = OTHER; note = 2'-O-methyladenosine-3'-phosphate
  modified_base 21: mod_base = OTHER; note = 2'-O-methyluridine-3'-phosphorothioate
  modified_base 22: mod_base = OTHER; note = 2'-O-methyladenosine-3'-phosphorothioate
  modified_base 23: mod_base = OTHER; note = 2'-O-methylcytidine-3'-phosphate
aaaggcaatgcaaaaatgtatac

SEQ ID NO: 1135 - RNA, 23 nt, synthetic construct
  source 1..23: mol_type = other RNA
  modified_base 1: mod_base = OTHER; note = 2'-O-methyladenosine-3'-phosphorothioate
  modified_base 2: mod_base = OTHER; note = 2'-fluorocytidine-3'-phosphorothioate
  modified_base 3: mod_base = OTHER; note = 2'-O-methylcytidine-3'-phosphate
  modified_base 4: mod_base = OTHER; note = 2'-O-methylguanosine-3'-phosphate
  modified_base 5: mod_base = OTHER; note = 2'-O-methyladenosine-3'-phosphate
  modified_base 6: mod_base = OTHER; note = 2'-fluoroadenosine-3'-phosphate
  modified_base 7: mod_base = OTHER; note = 2'-O-methylguanosine-3'-phosphate
  modified_base 8: mod_base = OTHER; note = 2'-fluoroguanosine-3'-phosphate
  modified_base 9: mod_base = OTHER; note = 2'-fluorocytidine-3'-phosphate
  modified_base 10: mod_base = OTHER; note = 2'-O-methyladenosine-3'-phosphate
  modified_base 11: mod_base = OTHER; note = 2'-O-methyladenosine-3'-phosphate
  modified_base 12: mod_base = OTHER; note = 2'-O-methyluridine-3'-phosphate
  modified_base 13: mod_base = OTHER; note = 2'-O-methylguanosine-3'-phosphate
  modified_base 14: mod_base = OTHER; note = 2'-fluorocytidine-3'-phosphate
  modified_base 15: mod_base = OTHER; note = 2'-O-methyladenosine-3'-phosphate
  modified_base 16: mod_base = OTHER; note = 2'-fluoroadenosine-3'-phosphate
  modified_base 17: mod_base = OTHER; note = 2'-O-methyladenosine-3'-phosphate
  modified_base 18: mod_base = OTHER; note = 2'-O-methyladenosine-3'-phosphate
  modified_base 19: mod_base = OTHER; note = 2'-O-methyladenosine-3'-phosphate
  modified_base 20: mod_base = OTHER; note = 2'-O-methyluridine-3'-phosphate
  modified_base 21: mod_base = OTHER; note = 2'-O-methylguanosine-3'-phosphorothioate
  modified_base 22: mod_base = OTHER; note = 2'-O-methyluridine-3'-phosphorothioate
  modified_base 23: mod_base = OTHER; note = 2'-O-methyladenosine-3'-phosphate
accgaaggcaatgcaaaaatgta

SEQ ID NO: 1136 - RNA, 23 nt, synthetic construct
  source 1..23: mol_type = other RNA
  modified_base 1: mod_base = OTHER; note = 2'-O-methyladenosine-3'-phosphorothioate
  modified_base 2: mod_base = OTHER; note = 2'-fluoroadenosine-3'-phosphorothioate
  modified_base 3: mod_base = OTHER; note = 2'-O-methylcytidine-3'-phosphate
  modified_base 4: mod_base = OTHER; note = 2'-O-methylcytidine-3'-phosphate
  modified_base 5: mod_base = OTHER; note = 2'-O-methylguanosine-3'-phosphate
  modified_base 6: mod_base = OTHER; note = 2'-fluoroadenosine-3'-phosphate
  modified_base 7: mod_base = OTHER; note = 2'-O-methyladenosine-3'-phosphate
  modified_base 8: mod_base = OTHER; note = 2'-fluoroguanosine-3'-phosphate
  modified_base 9: mod_base = OTHER; note = 2'-fluoroguanosine-3'-phosphate
  modified_base 10: mod_base = OTHER; note = 2'-O-methylcytidine-3'-phosphate
  modified_base 11: mod_base = OTHER; note = 2'-O-methyladenosine-3'-phosphate
  modified_base 12: mod_base = OTHER; note = 2'-O-methyladenosine-3'-phosphate
  modified_base 13: mod_base = OTHER; note = 2'-O-methyluridine-3'-phosphate
  modified_base 14: mod_base = OTHER; note = 2'-fluoroguanosine-3'-phosphate
  modified_base 15: mod_base = OTHER; note = 2'-O-methylcytidine-3'-phosphate
  modified_base 16: mod_base = OTHER; note = 2'-fluoroadenosine-3'-phosphate
  modified_base 17: mod_base = OTHER; note = 2'-O-methyladenosine-3'-phosphate
  modified_base 18: mod_base = OTHER; note = 2'-O-methyladenosine-3'-phosphate
  modified_base 19: mod_base = OTHER; note = 2'-O-methyladenosine-3'-phosphate
  modified_base 20: mod_base = OTHER; note = 2'-O-methyladenosine-3'-phosphate
  modified_base 21: mod_base = OTHER; note = 2'-O-methyluridine-3'-phosphorothioate
  modified_base 22: mod_base = OTHER; note = 2'-O-methylguanosine-3'-phosphorothioate
  modified_base 23: mod_base = OTHER; note = 2'-O-methyluridine-3'-phosphate
aaccgaaggcaatgcaaaaatgt

SEQ ID NO: 1137 - RNA, 23 nt, synthetic construct
  source 1..23: mol_type = other RNA
  modified_base 1: mod_base = OTHER; note = 2'-O-methyladenosine-3'-phosphorothioate
  modified_base 2: mod_base = OTHER; note = 2'-fluoroadenosine-3'-phosphorothioate
  modified_base 3: mod_base = OTHER; note = 2'-O-methyladenosine-3'-phosphate
  modified_base 4: mod_base = OTHER; note = 2'-O-methylcytidine-3'-phosphate
  modified_base 5: mod_base = OTHER; note = 2'-O-methylcytidine-3'-phosphate
  modified_base 6: mod_base = OTHER; note = 2'-fluoroguanosine-3'-phosphate
  modified_base 7: mod_base = OTHER; note = 2'-O-methyladenosine-3'-phosphate
  modified_base 8: mod_base = OTHER; note = 2'-fluoroadenosine-3'-phosphate
  modified_base 9: mod_base = OTHER; note = 2'-fluoroguanosine-3'-phosphate
  modified_base 10: mod_base = OTHER; note = 2'-O-methylguanosine-3'-phosphate
  modified_base 11: mod_base = OTHER; note = 2'-O-methylcytidine-3'-phosphate
  modified_base 12: mod_base = OTHER; note = 2'-O-methyladenosine-3'-phosphate
  modified_base 13: mod_base = OTHER; note = 2'-O-methyladenosine-3'-phosphate
  modified_base 14: mod_base = OTHER; note = 2'-fluorouridine-3'-phosphate
  modified_base 15: mod_base = OTHER; note = 2'-O-methylguanosine-3'-phosphate
  modified_base 16: mod_base = OTHER; note = 2'-fluorocytidine-3'-phosphate
  modified_base 17: mod_base = OTHER; note = 2'-O-methyladenosine-3'-phosphate
  modified_base 18: mod_base = OTHER; note = 2'-O-methyladenosine-3'-phosphate
  modified_base 19: mod_base = OTHER; note = 2'-O-methyladenosine-3'-phosphate
  modified_base 20: mod_base = OTHER; note = 2'-O-methyladenosine-3'-phosphate
  modified_base 21: mod_base = OTHER; note = 2'-O-methyladenosine-3'-phosphorothioate
  modified_base 22: mod_base = OTHER; note = 2'-O-methyluridine-3'-phosphorothioate
  modified_base 23: mod_base = OTHER; note = 2'-O-methylguanosine-3'-phosphate
aaaccgaaggcaatgcaaaaatg

SEQ ID NO: 1138 - RNA, 23 nt, synthetic construct
  source 1..23: mol_type = other RNA
  modified_base 1: mod_base = OTHER; note = 2'-O-methyladenosine-3'-phosphorothioate
  modified_base 2: mod_base = OTHER; note = 2'-fluoroadenosine-3'-phosphorothioate
  modified_base 3: mod_base = OTHER; note = 2'-O-methyladenosine-3'-phosphate
  modified_base 4: mod_base = OTHER; note = 2'-O-methyladenosine-3'-phosphate
  modified_base 5: mod_base = OTHER; note = 2'-O-methylcytidine-3'-phosphate
  modified_base 6: mod_base = OTHER; note = 2'-fluorocytidine-3'-phosphate
  modified_base 7: mod_base = OTHER; note = 2'-O-methylguanosine-3'-phosphate
  modified_base 8: mod_base = OTHER; note = 2'-fluoroadenosine-3'-phosphate
  modified_base 9: mod_base = OTHER; note = 2'-fluoroadenosine-3'-phosphate
  modified_base 10: mod_base = OTHER; note = 2'-O-methylguanosine-3'-phosphate
  modified_base 11: mod_base = OTHER; note = 2'-O-methylguanosine-3'-phosphate
  modified_base 12: mod_base = OTHER; note = 2'-O-methylcytidine-3'-phosphate
  modified_base 13: mod_base = OTHER; note = 2'-O-methyladenosine-3'-phosphate
  modified_base 14: mod_base = OTHER; note = 2'-fluoroadenosine-3'-phosphate
  modified_base 15: mod_base = OTHER; note = 2'-O-methyluridine-3'-phosphate
  modified_base 16: mod_base = OTHER; note = 2'-fluoroguanosine-3'-phosphate
  modified_base 17: mod_base = OTHER; note = 2'-O-methylcytidine-3'-phosphate
  modified_base 18: mod_base = OTHER; note = 2'-O-methyladenosine-3'-phosphate
  modified_base 19: mod_base = OTHER; note = 2'-O-methyladenosine-3'-phosphate
  modified_base 20: mod_base = OTHER; note = 2'-O-methyladenosine-3'-phosphate
  modified_base 21: mod_base = OTHER; note = 2'-O-methyladenosine-3'-phosphorothioate
  modified_base 22: mod_base = OTHER; note = 2'-O-methyladenosine-3'-phosphorothioate
  modified_base 23: mod_base = OTHER; note = 2'-O-methyluridine-3'-phosphate
aaaaccgaaggcaatgcaaaaat

SEQ ID NO: 1139 - RNA, 23 nt, synthetic construct
  source 1..23: mol_type = other RNA
  modified_base 1: mod_base = OTHER; note = 2'-O-methyladenosine-3'-phosphorothioate
  modified_base 2: mod_base = OTHER; note = 2'-fluorocytidine-3'-phosphorothioate
  modified_base 3: mod_base = OTHER; note = 2'-O-methyladenosine-3'-phosphate
  modified_base 4: mod_base = OTHER; note = 2'-O-methyladenosine-3'-phosphate
  modified_base 5: mod_base = OTHER; note = 2'-O-methyladenosine-3'-phosphate
  modified_base 6: mod_base = OTHER; note = 2'-fluorocytidine-3'-phosphate
  modified_base 7: mod_base = OTHER; note = 2'-O-methylcytidine-3'-phosphate
  modified_base 8: mod_base = OTHER; note = 2'-fluoroguanosine-3'-phosphate
  modified_base 9: mod_base = OTHER; note = 2'-fluoroadenosine-3'-phosphate
  modified_base 10: mod_base = OTHER; note = 2'-O-methyladenosine-3'-phosphate
  modified_base 11: mod_base = OTHER; note = 2'-O-methylguanosine-3'-phosphate
  modified_base 12: mod_base = OTHER; note = 2'-O-methylguanosine-3'-phosphate
  modified_base 13: mod_base = OTHER; note = 2'-O-methylcytidine-3'-phosphate
  modified_base 14: mod_base = OTHER; note = 2'-fluoroadenosine-3'-phosphate
  modified_base 15: mod_base = OTHER; note = 2'-O-methyladenosine-3'-phosphate
  modified_base 16: mod_base = OTHER; note = 2'-fluorouridine-3'-phosphate
  modified_base 17: mod_base = OTHER; note = 2'-O-methylguanosine-3'-phosphate
  modified_base 18: mod_base = OTHER; note = 2'-O-methylcytidine-3'-phosphate
  modified_base 19: mod_base = OTHER; note = 2'-O-methyladenosine-3'-phosphate
  modified_base 20: mod_base = OTHER; note = 2'-O-methyladenosine-3'-phosphate
  modified_base 21: mod_base = OTHER; note = 2'-O-methyladenosine-3'-phosphorothioate
  modified_base 22: mod_base = OTHER; note = 2'-O-methyladenosine-3'-phosphorothioate
  modified_base 23: mod_base = OTHER; note = 2'-O-methyladenosine-3'-phosphate
acaaaccgaaggcaatgcaaaaa

SEQ ID NO: 1140 - RNA, 23 nt, synthetic construct
  source 1..23: mol_type = other RNA
  modified_base 1: mod_base = OTHER; note = 2'-O-methyladenosine-3'-phosphorothioate
  modified_base 2: mod_base = OTHER; note = 2'-fluoroadenosine-3'-phosphorothioate
  modified_base 3: mod_base = OTHER; note = 2'-O-methylcytidine-3'-phosphate
  modified_base 4: mod_base = OTHER; note = 2'-O-methyladenosine-3'-phosphate
  modified_base 5: mod_base = OTHER; note = 2'-O-methyladenosine-3'-phosphate
  modified_base 6: mod_base = OTHER; note = 2'-fluoroadenosine-3'-phosphate
  modified_base 7: mod_base = OTHER; note = 2'-O-methylcytidine-3'-phosphate
  modified_base 8: mod_base = OTHER; note = 2'-fluorocytidine-3'-phosphate
  modified_base 9: mod_base = OTHER; note = 2'-fluoroguanosine-3'-phosphate
  modified_base 10: mod_base = OTHER; note = 2'-O-methyladenosine-3'-phosphate
  modified_base 11: mod_base = OTHER; note = 2'-O-methyladenosine-3'-phosphate
  modified_base 12: mod_base = OTHER; note = 2'-O-methylguanosine-3'-phosphate
  modified_base 13: mod_base = OTHER; note = 2'-O-methylguanosine-3'-phosphate
  modified_base 14: mod_base = OTHER; note = 2'-fluorocytidine-3'-phosphate
  modified_base 15: mod_base = OTHER; note = 2'-O-methyladenosine-3'-phosphate
  modified_base 16: mod_base = OTHER; note = 2'-fluoroadenosine-3'-phosphate
  modified_base 17: mod_base = OTHER; note = 2'-O-methyluridine-3'-phosphate
  modified_base 18: mod_base = OTHER; note = 2'-O-methylguanosine-3'-phosphate
  modified_base 19: mod_base = OTHER; note = 2'-O-methylcytidine-3'-phosphate
  modified_base 20: mod_base = OTHER; note = 2'-O-methyladenosine-3'-phosphate
  modified_base 21: mod_base = OTHER; note = 2'-O-methyladenosine-3'-phosphorothioate
  modified_base 22: mod_base = OTHER; note = 2'-O-methyladenosine-3'-phosphorothioate
  modified_base 23: mod_base = OTHER; note = 2'-O-methyladenosine-3'-phosphate
aacaaaccgaaggcaatgcaaaa

SEQ ID NO: 1141 - RNA, 23 nt, synthetic construct
  source 1..23: mol_type = other RNA
  modified_base 1: mod_base = OTHER; note = 2'-O-methyladenosine-3'-phosphorothioate
  modified_base 2: mod_base = OTHER; note = 2'-fluorouridine -3'-phosphorothioate
  modified_base 3: mod_base = OTHER; note = 2'-O-methyladenosine-3'-phosphate
  modified_base 4: mod_base = OTHER; note = 2'-O-methylcytidine-3'-phosphate
  modified_base 5: mod_base = OTHER; note = 2'-O-methyladenosine-3'-phosphate
  modified_base 6: mod_base = OTHER; note = 2'-fluoroadenosine-3'-phosphate
  modified_base 7: mod_base = OTHER; note = 2'-O-methyladenosine-3'-phosphate
  modified_base 8: mod_base = OTHER; note = 2'-fluorocytidine-3'-phosphate
  modified_base 9: mod_base = OTHER; note = 2'-fluorocytidine-3'-phosphate
  modified_base 10: mod_base = OTHER; note = 2'-O-methylguanosine-3'-phosphate
  modified_base 11: mod_base = OTHER; note = 2'-O-methyladenosine-3'-phosphate
  modified_base 12: mod_base = OTHER; note = 2'-O-methyladenosine-3'-phosphate
  modified_base 13: mod_base = OTHER; note = 2'-O-methylguanosine-3'-phosphate
  modified_base 14: mod_base = OTHER; note = 2'-fluoroguanosine-3'-phosphate
  modified_base 15: mod_base = OTHER; note = 2'-O-methylcytidine-3'-phosphate
  modified_base 16: mod_base = OTHER; note = 2'-fluoroadenosine-3'-phosphate
  modified_base 17: mod_base = OTHER; note = 2'-O-methyladenosine-3'-phosphate
  modified_base 18: mod_base = OTHER; note = 2'-O-methyluridine-3'-phosphate
  modified_base 19: mod_base = OTHER; note = 2'-O-methylguanosine-3'-phosphate
  modified_base 20: mod_base = OTHER; note = 2'-O-methylcytidine-3'-phosphate
  modified_base 21: mod_base = OTHER; note = 2'-O-methyladenosine-3'-phosphorothioate
  modified_base 22: mod_base = OTHER; note = 2'-O-methyladenosine-3'-phosphorothioate
  modified_base 23: mod_base = OTHER; note = 2'-O-methyladenosine-3'-phosphate
atacaaaccgaaggcaatgcaaa

SEQ ID NO: 1142 - RNA, 23 nt, synthetic construct
  source 1..23: mol_type = other RNA
  modified_base 1: mod_base = OTHER; note = 2'-O-methyladenosine-3'-phosphorothioate
  modified_base 2: mod_base = OTHER; note = 2'-fluoroadenosine-3'-phosphorothioate
  modified_base 3: mod_base = OTHER; note = 2'-O-methyluridine-3'-phosphate
  modified_base 4: mod_base = OTHER; note = 2'-O-methyladenosine-3'-phosphate
  modified_base 5: mod_base = OTHER; note = 2'-O-methylcytidine-3'-phosphate
  modified_base 6: mod_base = OTHER; note = 2'-fluoroadenosine-3'-phosphate
  modified_base 7: mod_base = OTHER; note = 2'-O-methyladenosine-3'-phosphate
  modified_base 8: mod_base = OTHER; note = 2'-fluoroadenosine-3'-phosphate
  modified_base 9: mod_base = OTHER; note = 2'-fluorocytidine-3'-phosphate
  modified_base 10: mod_base = OTHER; note = 2'-O-methylcytidine-3'-phosphate
  modified_base 11: mod_base = OTHER; note = 2'-O-methylguanosine-3'-phosphate
  modified_base 12: mod_base = OTHER; note = 2'-O-methyladenosine-3'-phosphate
  modified_base 13: mod_base = OTHER; note = 2'-O-methyladenosine-3'-phosphate
  modified_base 14: mod_base = OTHER; note = 2'-fluoroguanosine-3'-phosphate
  modified_base 15: mod_base = OTHER; note = 2'-O-methylguanosine-3'-phosphate
  modified_base 16: mod_base = OTHER; note = 2'-fluorocytidine-3'-phosphate
  modified_base 17: mod_base = OTHER; note = 2'-O-methyladenosine-3'-phosphate
  modified_base 18: mod_base = OTHER; note = 2'-O-methyladenosine-3'-phosphate
  modified_base 19: mod_base = OTHER; note = 2'-O-methyluridine-3'-phosphate
  modified_base 20: mod_base = OTHER; note = 2'-O-methylguanosine-3'-phosphate
  modified_base 21: mod_base = OTHER; note = 2'-O-methylcytidine-3'-phosphorothioate
  modified_base 22: mod_base = OTHER; note = 2'-O-methyladenosine-3'-phosphorothioate
  modified_base 23: mod_base = OTHER; note = 2'-O-methyladenosine-3'-phosphate
aatacaaaccgaaggcaatgcaa

SEQ ID NO: 1143 - RNA, 23 nt, synthetic construct
  source 1..23: mol_type = other RNA
  modified_base 1: mod_base = OTHER; note = 2'-O-methyladenosine-3'-phosphorothioate
  modified_base 2: mod_base = OTHER; note = 2'-fluoroadenosine-3'-phosphorothioate
  modified_base 3: mod_base = OTHER; note = 2'-O-methyladenosine-3'-phosphate
  modified_base 4: mod_base = OTHER; note = 2'-O-methyluridine-3'-phosphate
  modified_base 5: mod_base = OTHER; note = 2'-O-methyladenosine-3'-phosphate
  modified_base 6: mod_base = OTHER; note = 2'-fluorocytidine-3'-phosphate
  modified_base 7: mod_base = OTHER; note = 2'-O-methyladenosine-3'-phosphate
  modified_base 8: mod_base = OTHER; note = 2'-fluoroadenosine-3'-phosphate
  modified_base 9: mod_base = OTHER; note = 2'-fluoroadenosine-3'-phosphate
  modified_base 10: mod_base = OTHER; note = 2'-O-methylcytidine-3'-phosphate
  modified_base 11: mod_base = OTHER; note = 2'-O-methylcytidine-3'-phosphate
  modified_base 12: mod_base = OTHER; note = 2'-O-methylguanosine-3'-phosphate
  modified_base 13: mod_base = OTHER; note = 2'-O-methyladenosine-3'-phosphate
  modified_base 14: mod_base = OTHER; note = 2'-fluoroadenosine-3'-phosphate
  modified_base 15: mod_base = OTHER; note = 2'-O-methylguanosine-3'-phosphate
  modified_base 16: mod_base = OTHER; note = 2'-fluoroguanosine-3'-phosphate
  modified_base 17: mod_base = OTHER; note = 2'-O-methylcytidine-3'-phosphate
  modified_base 18: mod_base = OTHER; note = 2'-O-methyladenosine-3'-phosphate
  modified_base 19: mod_base = OTHER; note = 2'-O-methyladenosine-3'-phosphate
  modified_base 20: mod_base = OTHER; note = 2'-O-methyluridine-3'-phosphate
  modified_base 21: mod_base = OTHER; note = 2'-O-methylguanosine-3'-phosphorothioate
  modified_base 22: mod_base = OTHER; note = 2'-O-methylcytidine-3'-phosphorothioate
  modified_base 23: mod_base = OTHER; note = 2'-O-methyladenosine-3'-phosphate
aaatacaaaccgaaggcaatgca

SEQ ID NO: 1144 - RNA, 23 nt, synthetic construct
  source 1..23: mol_type = other RNA
  modified_base 1: mod_base = OTHER; note = 2'-O-methyladenosine-3'-phosphorothioate
  modified_base 2: mod_base = OTHER; note = 2'-fluoroadenosine-3'-phosphorothioate
  modified_base 3: mod_base = OTHER; note = 2'-O-methyladenosine-3'-phosphate
  modified_base 4: mod_base = OTHER; note = 2'-O-methyladenosine-3'-phosphate
  modified_base 5: mod_base = OTHER; note = 2'-O-methyluridine-3'-phosphate
  modified_base 6: mod_base = OTHER; note = 2'-fluoroadenosine-3'-phosphate
  modified_base 7: mod_base = OTHER; note = 2'-O-methylcytidine-3'-phosphate
  modified_base 8: mod_base = OTHER; note = 2'-fluoroadenosine-3'-phosphate
  modified_base 9: mod_base = OTHER; note = 2'-fluoroadenosine-3'-phosphate
  modified_base 10: mod_base = OTHER; note = 2'-O-methyladenosine-3'-phosphate
  modified_base 11: mod_base = OTHER; note = 2'-O-methylcytidine-3'-phosphate
  modified_base 12: mod_base = OTHER; note = 2'-O-methylcytidine-3'-phosphate
  modified_base 13: mod_base = OTHER; note = 2'-O-methylguanosine-3'-phosphate
  modified_base 14: mod_base = OTHER; note = 2'-fluoroadenosine-3'-phosphate
  modified_base 15: mod_base = OTHER; note = 2'-O-methyladenosine-3'-phosphate
  modified_base 16: mod_base = OTHER; note = 2'-fluoroguanosine-3'-phosphate
  modified_base 17: mod_base = OTHER; note = 2'-O-methylguanosine-3'-phosphate
  modified_base 18: mod_base = OTHER; note = 2'-O-methylcytidine-3'-phosphate
  modified_base 19: mod_base = OTHER; note = 2'-O-methyladenosine-3'-phosphate
  modified_base 20: mod_base = OTHER; note = 2'-O-methyladenosine-3'-phosphate
  modified_base 21: mod_base = OTHER; note = 2'-O-methyluridine-3'-phosphorothioate
  modified_base 22: mod_base = OTHER; note = 2'-O-methylguanosine-3'-phosphorothioate
  modified_base 23: mod_base = OTHER; note = 2'-O-methylcytidine-3'-phosphate
aaaatacaaaccgaaggcaatgc

SEQ ID NO: 1145 - RNA, 23 nt, synthetic construct
  source 1..23: mol_type = other RNA
  modified_base 1: mod_base = OTHER; note = 2'-O-methyladenosine-3'-phosphorothioate
  modified_base 2: mod_base = OTHER; note = 2'-fluorouridine -3'-phosphorothioate
  modified_base 3: mod_base = OTHER; note = 2'-O-methyladenosine-3'-phosphate
  modified_base 4: mod_base = OTHER; note = 2'-O-methyladenosine-3'-phosphate
  modified_base 5: mod_base = OTHER; note = 2'-O-methyladenosine-3'-phosphate
  modified_base 6: mod_base = OTHER; note = 2'-fluorouridine-3'-phosphate
  modified_base 7: mod_base = OTHER; note = 2'-O-methyladenosine-3'-phosphate
  modified_base 8: mod_base = OTHER; note = 2'-fluorocytidine-3'-phosphate
  modified_base 9: mod_base = OTHER; note = 2'-fluoroadenosine-3'-phosphate
  modified_base 10: mod_base = OTHER; note = 2'-O-methyladenosine-3'-phosphate
  modified_base 11: mod_base = OTHER; note = 2'-O-methyladenosine-3'-phosphate
  modified_base 12: mod_base = OTHER; note = 2'-O-methylcytidine-3'-phosphate
  modified_base 13: mod_base = OTHER; note = 2'-O-methylcytidine-3'-phosphate
  modified_base 14: mod_base = OTHER; note = 2'-fluoroguanosine-3'-phosphate
  modified_base 15: mod_base = OTHER; note = 2'-O-methyladenosine-3'-phosphate
  modified_base 16: mod_base = OTHER; note = 2'-fluoroadenosine-3'-phosphate
  modified_base 17: mod_base = OTHER; note = 2'-O-methylguanosine-3'-phosphate
  modified_base 18: mod_base = OTHER; note = 2'-O-methylguanosine-3'-phosphate
  modified_base 19: mod_base = OTHER; note = 2'-O-methylcytidine-3'-phosphate
  modified_base 20: mod_base = OTHER; note = 2'-O-methyladenosine-3'-phosphate
  modified_base 21: mod_base = OTHER; note = 2'-O-methyladenosine-3'-phosphorothioate
  modified_base 22: mod_base = OTHER; note = 2'-O-methyluridine-3'-phosphorothioate
  modified_base 23: mod_base = OTHER; note = 2'-O-methylguanosine-3'-phosphate
ataaatacaaaccgaaggcaatg

SEQ ID NO: 1146 - RNA, 23 nt, synthetic construct
  source 1..23: mol_type = other RNA
  modified_base 1: mod_base = OTHER; note = 2'-O-methyladenosine-3'-phosphorothioate
  modified_base 2: mod_base = OTHER; note = 2'-fluorocytidine-3'-phosphorothioate
  modified_base 3: mod_base = OTHER; note = 2'-O-methyluridine-3'-phosphate
  modified_base 4: mod_base = OTHER; note = 2'-O-methyladenosine-3'-phosphate
  modified_base 5: mod_base = OTHER; note = 2'-O-methyladenosine-3'-phosphate
  modified_base 6: mod_base = OTHER; note = 2'-fluoroadenosine-3'-phosphate
  modified_base 7: mod_base = OTHER; note = 2'-O-methyluridine-3'-phosphate
  modified_base 8: mod_base = OTHER; note = 2'-fluoroadenosine-3'-phosphate
  modified_base 9: mod_base = OTHER; note = 2'-fluorocytidine-3'-phosphate
  modified_base 10: mod_base = OTHER; note = 2'-O-methyladenosine-3'-phosphate
  modified_base 11: mod_base = OTHER; note = 2'-O-methyladenosine-3'-phosphate
  modified_base 12: mod_base = OTHER; note = 2'-O-methyladenosine-3'-phosphate
  modified_base 13: mod_base = OTHER; note = 2'-O-methylcytidine-3'-phosphate
  modified_base 14: mod_base = OTHER; note = 2'-fluorocytidine-3'-phosphate
  modified_base 15: mod_base = OTHER; note = 2'-O-methylguanosine-3'-phosphate
  modified_base 16: mod_base = OTHER; note = 2'-fluoroadenosine-3'-phosphate
  modified_base 17: mod_base = OTHER; note = 2'-O-methyladenosine-3'-phosphate
  modified_base 18: mod_base = OTHER; note = 2'-O-methylguanosine-3'-phosphate
  modified_base 19: mod_base = OTHER; note = 2'-O-methylguanosine-3'-phosphate
  modified_base 20: mod_base = OTHER; note = 2'-O-methylcytidine-3'-phosphate
  modified_base 21: mod_base = OTHER; note = 2'-O-methyladenosine-3'-phosphorothioate
  modified_base 22: mod_base = OTHER; note = 2'-O-methyladenosine-3'-phosphorothioate
  modified_base 23: mod_base = OTHER; note = 2'-O-methyluridine-3'-phosphate
actaaatacaaaccgaaggcaat

SEQ ID NO: 1147 - RNA, 23 nt, synthetic construct
  source 1..23: mol_type = other RNA
  modified_base 1: mod_base = OTHER; note = 2'-O-methyladenosine-3'-phosphorothioate
  modified_base 2: mod_base = OTHER; note = 2'-fluoroadenosine-3'-phosphorothioate
  modified_base 3: mod_base = OTHER; note = 2'-O-methylcytidine-3'-phosphate
  modified_base 4: mod_base = OTHER; note = 2'-O-methyluridine-3'-phosphate
  modified_base 5: mod_base = OTHER; note = 2'-O-methyladenosine-3'-phosphate
  modified_base 6: mod_base = OTHER; note = 2'-fluoroadenosine-3'-phosphate
  modified_base 7: mod_base = OTHER; note = 2'-O-methyladenosine-3'-phosphate
  modified_base 8: mod_base = OTHER; note = 2'-fluorouridine-3'-phosphate
  modified_base 9: mod_base = OTHER; note = 2'-fluoroadenosine-3'-phosphate
  modified_base 10: mod_base = OTHER; note = 2'-O-methylcytidine-3'-phosphate
  modified_base 11: mod_base = OTHER; note = 2'-O-methyladenosine-3'-phosphate
  modified_base 12: mod_base = OTHER; note = 2'-O-methyladenosine-3'-phosphate
  modified_base 13: mod_base = OTHER; note = 2'-O-methyladenosine-3'-phosphate
  modified_base 14: mod_base = OTHER; note = 2'-fluorocytidine-3'-phosphate
  modified_base 15: mod_base = OTHER; note = 2'-O-methylcytidine-3'-phosphate
  modified_base 16: mod_base = OTHER; note = 2'-fluoroguanosine-3'-phosphate
  modified_base 17: mod_base = OTHER; note = 2'-O-methyladenosine-3'-phosphate
  modified_base 18: mod_base = OTHER; note = 2'-O-methyladenosine-3'-phosphate
  modified_base 19: mod_base = OTHER; note = 2'-O-methylguanosine-3'-phosphate
  modified_base 20: mod_base = OTHER; note = 2'-O-methylguanosine-3'-phosphate
  modified_base 21: mod_base = OTHER; note = 2'-O-methylcytidine-3'-phosphorothioate
  modified_base 22: mod_base = OTHER; note = 2'-O-methyladenosine-3'-phosphorothioate
  modified_base 23: mod_base = OTHER; note = 2'-O-methyladenosine-3'-phosphate
aactaaatacaaaccgaaggcaa

SEQ ID NO: 1148 - RNA, 23 nt, synthetic construct
  source 1..23: mol_type = other RNA
  modified_base 1: mod_base = OTHER; note = 2'-O-methyladenosine-3'-phosphorothioate
  modified_base 2: mod_base = OTHER; note = 2'-fluorocytidine-3'-phosphorothioate
  modified_base 3: mod_base = OTHER; note = 2'-O-methyladenosine-3'-phosphate
  modified_base 4: mod_base = OTHER; note = 2'-O-methylcytidine-3'-phosphate
  modified_base 5: mod_base = OTHER; note = 2'-O-methyluridine-3'-phosphate
  modified_base 6: mod_base = OTHER; note = 2'-fluoroadenosine-3'-phosphate
  modified_base 7: mod_base = OTHER; note = 2'-O-methyladenosine-3'-phosphate
  modified_base 8: mod_base = OTHER; note = 2'-fluoroadenosine-3'-phosphate
  modified_base 9: mod_base = OTHER; note = 2'-fluorouridine-3'-phosphate
  modified_base 10: mod_base = OTHER; note = 2'-O-methyladenosine-3'-phosphate
  modified_base 11: mod_base = OTHER; note = 2'-O-methylcytidine-3'-phosphate
  modified_base 12: mod_base = OTHER; note = 2'-O-methyladenosine-3'-phosphate
  modified_base 13: mod_base = OTHER; note = 2'-O-methyladenosine-3'-phosphate
  modified_base 14: mod_base = OTHER; note = 2'-fluoroadenosine-3'-phosphate
  modified_base 15: mod_base = OTHER; note = 2'-O-methylcytidine-3'-phosphate
  modified_base 16: mod_base = OTHER; note = 2'-fluorocytidine-3'-phosphate
  modified_base 17: mod_base = OTHER; note = 2'-O-methylguanosine-3'-phosphate
  modified_base 18: mod_base = OTHER; note = 2'-O-methyladenosine-3'-phosphate
  modified_base 19: mod_base = OTHER; note = 2'-O-methyladenosine-3'-phosphate
  modified_base 20: mod_base = OTHER; note = 2'-O-methylguanosine-3'-phosphate
  modified_base 21: mod_base = OTHER; note = 2'-O-methylguanosine-3'-phosphorothioate
  modified_base 22: mod_base = OTHER; note = 2'-O-methylcytidine-3'-phosphorothioate
  modified_base 23: mod_base = OTHER; note = 2'-O-methyladenosine-3'-phosphate
acactaaatacaaaccgaaggca

SEQ ID NO: 1149 - RNA, 23 nt, synthetic construct
  source 1..23: mol_type = other RNA
  modified_base 1: mod_base = OTHER; note = 2'-O-methyladenosine-3'-phosphorothioate
  modified_base 2: mod_base = OTHER; note = 2'-fluoroadenosine-3'-phosphorothioate
  modified_base 3: mod_base = OTHER; note = 2'-O-methylcytidine-3'-phosphate
  modified_base 4: mod_base = OTHER; note = 2'-O-methyladenosine-3'-phosphate
  modified_base 5: mod_base = OTHER; note = 2'-O-methylcytidine-3'-phosphate
  modified_base 6: mod_base = OTHER; note = 2'-fluorouridine-3'-phosphate
  modified_base 7: mod_base = OTHER; note = 2'-O-methyladenosine-3'-phosphate
  modified_base 8: mod_base = OTHER; note = 2'-fluoroadenosine-3'-phosphate
  modified_base 9: mod_base = OTHER; note = 2'-fluoroadenosine-3'-phosphate
  modified_base 10: mod_base = OTHER; note = 2'-O-methyluridine-3'-phosphate
  modified_base 11: mod_base = OTHER; note = 2'-O-methyladenosine-3'-phosphate
  modified_base 12: mod_base = OTHER; note = 2'-O-methylcytidine-3'-phosphate
  modified_base 13: mod_base = OTHER; note = 2'-O-methyladenosine-3'-phosphate
  modified_base 14: mod_base = OTHER; note = 2'-fluoroadenosine-3'-phosphate
  modified_base 15: mod_base = OTHER; note = 2'-O-methyladenosine-3'-phosphate
  modified_base 16: mod_base = OTHER; note = 2'-fluorocytidine-3'-phosphate
  modified_base 17: mod_base = OTHER; note = 2'-O-methylcytidine-3'-phosphate
  modified_base 18: mod_base = OTHER; note = 2'-O-methylguanosine-3'-phosphate
  modified_base 19: mod_base = OTHER; note = 2'-O-methyladenosine-3'-phosphate
  modified_base 20: mod_base = OTHER; note = 2'-O-methyladenosine-3'-phosphate
  modified_base 21: mod_base = OTHER; note = 2'-O-methylguanosine-3'-phosphorothioate
  modified_base 22: mod_base = OTHER; note = 2'-O-methylguanosine-3'-phosphorothioate
  modified_base 23: mod_base = OTHER; note = 2'-O-methylcytidine-3'-phosphate
aacactaaatacaaaccgaaggc

SEQ ID NO: 1150 - RNA, 23 nt, synthetic construct
  source 1..23: mol_type = other RNA
  modified_base 1: mod_base = OTHER; note = 2'-O-methyladenosine-3'-phosphorothioate
  modified_base 2: mod_base = OTHER; note = 2'-fluorocytidine-3'-phosphorothioate
  modified_base 3: mod_base = OTHER; note = 2'-O-methyladenosine-3'-phosphate
  modified_base 4: mod_base = OTHER; note = 2'-O-methyladenosine-3'-phosphate
  modified_base 5: mod_base = OTHER; note = 2'-O-methylguanosine-3'-phosphate
  modified_base 6: mod_base = OTHER; note = 2'-fluoroadenosine-3'-phosphate
  modified_base 7: mod_base = OTHER; note = 2'-O-methylcytidine-3'-phosphate
  modified_base 8: mod_base = OTHER; note = 2'-fluoroadenosine-3'-phosphate
  modified_base 9: mod_base = OTHER; note = 2'-fluorocytidine-3'-phosphate
  modified_base 10: mod_base = OTHER; note = 2'-O-methyluridine-3'-phosphate
  modified_base 11: mod_base = OTHER; note = 2'-O-methyladenosine-3'-phosphate
  modified_base 12: mod_base = OTHER; note = 2'-O-methyladenosine-3'-phosphate
  modified_base 13: mod_base = OTHER; note = 2'-O-methyladenosine-3'-phosphate
  modified_base 14: mod_base = OTHER; note = 2'-fluorouridine-3'-phosphate
  modified_base 15: mod_base = OTHER; note = 2'-O-methyladenosine-3'-phosphate
  modified_base 16: mod_base = OTHER; note = 2'-fluorocytidine-3'-phosphate
  modified_base 17: mod_base = OTHER; note = 2'-O-methyladenosine-3'-phosphate
  modified_base 18: mod_base = OTHER; note = 2'-O-methyladenosine-3'-phosphate
  modified_base 19: mod_base = OTHER; note = 2'-O-methyladenosine-3'-phosphate
  modified_base 20: mod_base = OTHER; note = 2'-O-methylcytidine-3'-phosphate
  modified_base 21: mod_base = OTHER; note = 2'-O-methylcytidine-3'-phosphorothioate
  modified_base 22: mod_base = OTHER; note = 2'-O-methylguanosine-3'-phosphorothioate
  modified_base 23: mod_base = OTHER; note = 2'-O-methyladenosine-3'-phosphate
acaagacactaaatacaaaccga

SEQ ID NO: 1151 - RNA, 23 nt, synthetic construct
  source 1..23: mol_type = other RNA
  modified_base 1: mod_base = OTHER; note = 2'-O-methyladenosine-3'-phosphorothioate
  modified_base 2: mod_base = OTHER; note = 2'-fluorocytidine-3'-phosphorothioate
  modified_base 3: mod_base = OTHER; note = 2'-O-methyladenosine-3'-phosphate
  modified_base 4: mod_base = OTHER; note = 2'-O-methyluridine-3'-phosphate
  modified_base 5: mod_base = OTHER; note = 2'-O-methyluridine-3'-phosphate
  modified_base 6: mod_base = OTHER; note = 2'-fluorocytidine-3'-phosphate
  modified_base 7: mod_base = OTHER; note = 2'-O-methyladenosine-3'-phosphate
  modified_base 8: mod_base = OTHER; note = 2'-fluoroadenosine-3'-phosphate
  modified_base 9: mod_base = OTHER; note = 2'-fluoroguanosine-3'-phosphate
  modified_base 10: mod_base = OTHER; note = 2'-O-methyladenosine-3'-phosphate
  modified_base 11: mod_base = OTHER; note = 2'-O-methylcytidine-3'-phosphate
  modified_base 12: mod_base = OTHER; note = 2'-O-methyladenosine-3'-phosphate
  modified_base 13: mod_base = OTHER; note = 2'-O-methylcytidine-3'-phosphate
  modified_base 14: mod_base = OTHER; note = 2'-fluorouridine-3'-phosphate
  modified_base 15: mod_base = OTHER; note = 2'-O-methyladenosine-3'-phosphate
  modified_base 16: mod_base = OTHER; note = 2'-fluoroadenosine-3'-phosphate
  modified_base 17: mod_base = OTHER; note = 2'-O-methyladenosine-3'-phosphate
  modified_base 18: mod_base = OTHER; note = 2'-O-methyluridine-3'-phosphate
  modified_base 19: mod_base = OTHER; note = 2'-O-methyladenosine-3'-phosphate
  modified_base 20: mod_base = OTHER; note = 2'-O-methylcytidine-3'-phosphate
  modified_base 21: mod_base = OTHER; note = 2'-O-methyladenosine-3'-phosphorothioate
  modified_base 22: mod_base = OTHER; note = 2'-O-methyladenosine-3'-phosphorothioate
  modified_base 23: mod_base = OTHER; note = 2'-O-methyladenosine-3'-phosphate
acattcaagacactaaatacaaa

SEQ ID NO: 1152 - RNA, 23 nt, synthetic construct
  source 1..23: mol_type = other RNA
  modified_base 1: mod_base = OTHER; note = 2'-O-methyladenosine-3'-phosphorothioate
  modified_base 2: mod_base = OTHER; note = 2'-fluorouridine -3'-phosphorothioate
  modified_base 3: mod_base = OTHER; note = 2'-O-methyladenosine-3'-phosphate
  modified_base 4: mod_base = OTHER; note = 2'-O-methylcytidine-3'-phosphate
  modified_base 5: mod_base = OTHER; note = 2'-O-methyladenosine-3'-phosphate
  modified_base 6: mod_base = OTHER; note = 2'-fluorouridine-3'-phosphate
  modified_base 7: mod_base = OTHER; note = 2'-O-methyluridine-3'-phosphate
  modified_base 8: mod_base = OTHER; note = 2'-fluorocytidine-3'-phosphate
  modified_base 9: mod_base = OTHER; note = 2'-fluoroadenosine-3'-phosphate
  modified_base 10: mod_base = OTHER; note = 2'-O-methyladenosine-3'-phosphate
  modified_base 11: mod_base = OTHER; note = 2'-O-methylguanosine-3'-phosphate
  modified_base 12: mod_base = OTHER; note = 2'-O-methyladenosine-3'-phosphate
  modified_base 13: mod_base = OTHER; note = 2'-O-methylcytidine-3'-phosphate
  modified_base 14: mod_base = OTHER; note = 2'-fluoroadenosine-3'-phosphate
  modified_base 15: mod_base = OTHER; note = 2'-O-methylcytidine-3'-phosphate
  modified_base 16: mod_base = OTHER; note = 2'-fluorouridine-3'-phosphate
  modified_base 17: mod_base = OTHER; note = 2'-O-methyladenosine-3'-phosphate
  modified_base 18: mod_base = OTHER; note = 2'-O-methyladenosine-3'-phosphate
  modified_base 19: mod_base = OTHER; note = 2'-O-methyladenosine-3'-phosphate
  modified_base 20: mod_base = OTHER; note = 2'-O-methyluridine-3'-phosphate
  modified_base 21: mod_base = OTHER; note = 2'-O-methyladenosine-3'-phosphorothioate
  modified_base 22: mod_base = OTHER; note = 2'-O-methylcytidine-3'-phosphorothioate
  modified_base 23: mod_base = OTHER; note = 2'-O-methyladenosine-3'-phosphate
atacattcaagacactaaataca

SEQ ID NO: 1153 - RNA, 23 nt, synthetic construct
  source 1..23: mol_type = other RNA
  modified_base 1: mod_base = OTHER; note = 2'-O-methyladenosine-3'-phosphorothioate
  modified_base 2: mod_base = OTHER; note = 2'-fluorocytidine-3'-phosphorothioate
  modified_base 3: mod_base = OTHER; note = 2'-O-methyluridine-3'-phosphate
  modified_base 4: mod_base = OTHER; note = 2'-O-methyluridine-3'-phosphate
  modified_base 5: mod_base = OTHER; note = 2'-O-methyladenosine-3'-phosphate
  modified_base 6: mod_base = OTHER; note = 2'-fluorocytidine-3'-phosphate
  modified_base 7: mod_base = OTHER; note = 2'-O-methyladenosine-3'-phosphate
  modified_base 8: mod_base = OTHER; note = 2'-fluorouridine-3'-phosphate
  modified_base 9: mod_base = OTHER; note = 2'-fluorouridine-3'-phosphate
  modified_base 10: mod_base = OTHER; note = 2'-O-methylcytidine-3'-phosphate
  modified_base 11: mod_base = OTHER; note = 2'-O-methyladenosine-3'-phosphate
  modified_base 12: mod_base = OTHER; note = 2'-O-methyladenosine-3'-phosphate
  modified_base 13: mod_base = OTHER; note = 2'-O-methylguanosine-3'-phosphate
  modified_base 14: mod_base = OTHER; note = 2'-fluoroadenosine-3'-phosphate
  modified_base 15: mod_base = OTHER; note = 2'-O-methylcytidine-3'-phosphate
  modified_base 16: mod_base = OTHER; note = 2'-fluoroadenosine-3'-phosphate
  modified_base 17: mod_base = OTHER; note = 2'-O-methylcytidine-3'-phosphate
  modified_base 18: mod_base = OTHER; note = 2'-O-methyluridine-3'-phosphate
  modified_base 19: mod_base = OTHER; note = 2'-O-methyladenosine-3'-phosphate
  modified_base 20: mod_base = OTHER; note = 2'-O-methyladenosine-3'-phosphate
  modified_base 21: mod_base = OTHER; note = 2'-O-methyladenosine-3'-phosphorothioate
  modified_base 22: mod_base = OTHER; note = 2'-O-methyluridine-3'-phosphorothioate
  modified_base 23: mod_base = OTHER; note = 2'-O-methyladenosine-3'-phosphate
acttacattcaagacactaaata

SEQ ID NO: 1154 - RNA, 23 nt, synthetic construct
  source 1..23: mol_type = other RNA
  modified_base 1: mod_base = OTHER; note = 2'-O-methyladenosine-3'-phosphorothioate
  modified_base 2: mod_base = OTHER; note = 2'-fluorocytidine-3'-phosphorothioate
  modified_base 3: mod_base = OTHER; note = 2'-O-methyladenosine-3'-phosphate
  modified_base 4: mod_base = OTHER; note = 2'-O-methyluridine-3'-phosphate
  modified_base 5: mod_base = OTHER; note = 2'-O-methylguanosine-3'-phosphate
  modified_base 6: mod_base = OTHER; note = 2'-fluorouridine-3'-phosphate
  modified_base 7: mod_base = OTHER; note = 2'-O-methyluridine-3'-phosphate
  modified_base 8: mod_base = OTHER; note = 2'-fluorocytidine-3'-phosphate
  modified_base 9: mod_base = OTHER; note = 2'-fluorouridine-3'-phosphate
  modified_base 10: mod_base = OTHER; note = 2'-O-methyluridine-3'-phosphate
  modified_base 11: mod_base = OTHER; note = 2'-O-methyladenosine-3'-phosphate
  modified_base 12: mod_base = OTHER; note = 2'-O-methylcytidine-3'-phosphate
  modified_base 13: mod_base = OTHER; note = 2'-O-methyladenosine-3'-phosphate
  modified_base 14: mod_base = OTHER; note = 2'-fluorouridine-3'-phosphate
  modified_base 15: mod_base = OTHER; note = 2'-O-methyluridine-3'-phosphate
  modified_base 16: mod_base = OTHER; note = 2'-fluorocytidine-3'-phosphate
  modified_base 17: mod_base = OTHER; note = 2'-O-methyladenosine-3'-phosphate
  modified_base 18: mod_base = OTHER; note = 2'-O-methyladenosine-3'-phosphate
  modified_base 19: mod_base = OTHER; note = 2'-O-methylguanosine-3'-phosphate
  modified_base 20: mod_base = OTHER; note = 2'-O-methyladenosine-3'-phosphate
  modified_base 21: mod_base = OTHER; note = 2'-O-methylcytidine-3'-phosphorothioate
  modified_base 22: mod_base = OTHER; note = 2'-O-methyladenosine-3'-phosphorothioate
  modified_base 23: mod_base = OTHER; note = 2'-O-methylcytidine-3'-phosphate
acatgttcttacattcaagacac

SEQ ID NO: 1155 - RNA, 23 nt, synthetic construct
  source 1..23: mol_type = other RNA
  modified_base 1: mod_base = OTHER; note = 2'-O-methyladenosine-3'-phosphorothioate
  modified_base 2: mod_base = OTHER; note = 2'-fluorocytidine-3'-phosphorothioate
  modified_base 3: mod_base = OTHER; note = 2'-O-methyladenosine-3'-phosphate
  modified_base 4: mod_base = OTHER; note = 2'-O-methylcytidine-3'-phosphate
  modified_base 5: mod_base = OTHER; note = 2'-O-methylguanosine-3'-phosphate
  modified_base 6: mod_base = OTHER; note = 2'-fluoroguanosine-3'-phosphate
  modified_base 7: mod_base = OTHER; note = 2'-O-methyladenosine-3'-phosphate
  modified_base 8: mod_base = OTHER; note = 2'-fluoroguanosine-3'-phosphate
  modified_base 9: mod_base = OTHER; note = 2'-fluoroguanosine-3'-phosphate
  modified_base 10: mod_base = OTHER; note = 2'-O-methyluridine-3'-phosphate
  modified_base 11: mod_base = OTHER; note = 2'-O-methylcytidine-3'-phosphate
  modified_base 12: mod_base = OTHER; note = 2'-O-methyladenosine-3'-phosphate
  modified_base 13: mod_base = OTHER; note = 2'-O-methyluridine-3'-phosphate
  modified_base 14: mod_base = OTHER; note = 2'-fluoroguanosine-3'-phosphate
  modified_base 15: mod_base = OTHER; note = 2'-O-methyluridine-3'-phosphate
  modified_base 16: mod_base = OTHER; note = 2'-fluorouridine-3'-phosphate
  modified_base 17: mod_base = OTHER; note = 2'-O-methylcytidine-3'-phosphate
  modified_base 18: mod_base = OTHER; note = 2'-O-methyluridine-3'-phosphate
  modified_base 19: mod_base = OTHER; note = 2'-O-methyluridine-3'-phosphate
  modified_base 20: mod_base = OTHER; note = 2'-O-methyladenosine-3'-phosphate
  modified_base 21: mod_base = OTHER; note = 2'-O-methylcytidine-3'-phosphorothioate
  modified_base 22: mod_base = OTHER; note = 2'-O-methyladenosine-3'-phosphorothioate
  modified_base 23: mod_base = OTHER; note = 2'-O-methyluridine-3'-phosphate
acacggaggtcatgttcttacat

SEQ ID NO: 1156 - RNA, 23 nt, synthetic construct
  source 1..23: mol_type = other RNA
  modified_base 1: mod_base = OTHER; note = 2'-O-methyladenosine-3'-phosphorothioate
  modified_base 2: mod_base = OTHER; note = 2'-fluoroadenosine-3'-phosphorothioate
  modified_base 3: mod_base = OTHER; note = 2'-O-methylcytidine-3'-phosphate
  modified_base 4: mod_base = OTHER; note = 2'-O-methyladenosine-3'-phosphate
  modified_base 5: mod_base = OTHER; note = 2'-O-methylcytidine-3'-phosphate
  modified_base 6: mod_base = OTHER; note = 2'-fluoroguanosine-3'-phosphate
  modified_base 7: mod_base = OTHER; note = 2'-O-methylguanosine-3'-phosphate
  modified_base 8: mod_base = OTHER; note = 2'-fluoroadenosine-3'-phosphate
  modified_base 9: mod_base = OTHER; note = 2'-fluoroguanosine-3'-phosphate
  modified_base 10: mod_base = OTHER; note = 2'-O-methylguanosine-3'-phosphate
  modified_base 11: mod_base = OTHER; note = 2'-O-methyluridine-3'-phosphate
  modified_base 12: mod_base = OTHER; note = 2'-O-methylcytidine-3'-phosphate
  modified_base 13: mod_base = OTHER; note = 2'-O-methyladenosine-3'-phosphate
  modified_base 14: mod_base = OTHER; note = 2'-fluorouridine-3'-phosphate
  modified_base 15: mod_base = OTHER; note = 2'-O-methylguanosine-3'-phosphate
  modified_base 16: mod_base = OTHER; note = 2'-fluorouridine-3'-phosphate
  modified_base 17: mod_base = OTHER; note = 2'-O-methyluridine-3'-phosphate
  modified_base 18: mod_base = OTHER; note = 2'-O-methylcytidine-3'-phosphate
  modified_base 19: mod_base = OTHER; note = 2'-O-methyluridine-3'-phosphate
  modified_base 20: mod_base = OTHER; note = 2'-O-methyluridine-3'-phosphate
  modified_base 21: mod_base = OTHER; note = 2'-O-methyladenosine-3'-phosphorothioate
  modified_base 22: mod_base = OTHER; note = 2'-O-methylcytidine-3'-phosphorothioate
  modified_base 23: mod_base = OTHER; note = 2'-O-methyladenosine-3'-phosphate
aacacggaggtcatgttcttaca

SEQ ID NO: 1157 - RNA, 23 nt, synthetic construct
  source 1..23: mol_type = other RNA
  modified_base 1: mod_base = OTHER; note = 2'-O-methyladenosine-3'-phosphorothioate
  modified_base 2: mod_base = OTHER; note = 2'-fluorouridine -3'-phosphorothioate
  modified_base 3: mod_base = OTHER; note = 2'-O-methyladenosine-3'-phosphate
  modified_base 4: mod_base = OTHER; note = 2'-O-methylcytidine-3'-phosphate
  modified_base 5: mod_base = OTHER; note = 2'-O-methyladenosine-3'-phosphate
  modified_base 6: mod_base = OTHER; note = 2'-fluorocytidine-3'-phosphate
  modified_base 7: mod_base = OTHER; note = 2'-O-methylguanosine-3'-phosphate
  modified_base 8: mod_base = OTHER; note = 2'-fluoroguanosine-3'-phosphate
  modified_base 9: mod_base = OTHER; note = 2'-fluoroadenosine-3'-phosphate
  modified_base 10: mod_base = OTHER; note = 2'-O-methylguanosine-3'-phosphate
  modified_base 11: mod_base = OTHER; note = 2'-O-methylguanosine-3'-phosphate
  modified_base 12: mod_base = OTHER; note = 2'-O-methyluridine-3'-phosphate
  modified_base 13: mod_base = OTHER; note = 2'-O-methylcytidine-3'-phosphate
  modified_base 14: mod_base = OTHER; note = 2'-fluoroadenosine-3'-phosphate
  modified_base 15: mod_base = OTHER; note = 2'-O-methyluridine-3'-phosphate
  modified_base 16: mod_base = OTHER; note = 2'-fluoroguanosine-3'-phosphate
  modified_base 17: mod_base = OTHER; note = 2'-O-methyluridine-3'-phosphate
  modified_base 18: mod_base = OTHER; note = 2'-O-methyluridine-3'-phosphate
  modified_base 19: mod_base = OTHER; note = 2'-O-methylcytidine-3'-phosphate
  modified_base 20: mod_base = OTHER; note = 2'-O-methyluridine-3'-phosphate
  modified_base 21: mod_base = OTHER; note = 2'-O-methyluridine-3'-phosphorothioate
  modified_base 22: mod_base = OTHER; note = 2'-O-methyladenosine-3'-phosphorothioate
  modified_base 23: mod_base = OTHER; note = 2'-O-methylcytidine-3'-phosphate
atacacggaggtcatgttcttac

SEQ ID NO: 1158 - RNA, 23 nt, synthetic construct
  source 1..23: mol_type = other RNA
  modified_base 1: mod_base = OTHER; note = 2'-O-methyladenosine-3'-phosphorothioate
  modified_base 2: mod_base = OTHER; note = 2'-fluorocytidine-3'-phosphorothioate
  modified_base 3: mod_base = OTHER; note = 2'-O-methyluridine-3'-phosphate
  modified_base 4: mod_base = OTHER; note = 2'-O-methyladenosine-3'-phosphate
  modified_base 5: mod_base = OTHER; note = 2'-O-methylcytidine-3'-phosphate
  modified_base 6: mod_base = OTHER; note = 2'-fluoroadenosine-3'-phosphate
  modified_base 7: mod_base = OTHER; note = 2'-O-methylcytidine-3'-phosphate
  modified_base 8: mod_base = OTHER; note = 2'-fluoroguanosine-3'-phosphate
  modified_base 9: mod_base = OTHER; note = 2'-fluoroguanosine-3'-phosphate
  modified_base 10: mod_base = OTHER; note = 2'-O-methyladenosine-3'-phosphate
  modified_base 11: mod_base = OTHER; note = 2'-O-methylguanosine-3'-phosphate
  modified_base 12: mod_base = OTHER; note = 2'-O-methylguanosine-3'-phosphate
  modified_base 13: mod_base = OTHER; note = 2'-O-methyluridine-3'-phosphate
  modified_base 14: mod_base = OTHER; note = 2'-fluorocytidine-3'-phosphate
  modified_base 15: mod_base = OTHER; note = 2'-O-methyladenosine-3'-phosphate
  modified_base 16: mod_base = OTHER; note = 2'-fluorouridine-3'-phosphate
  modified_base 17: mod_base = OTHER; note = 2'-O-methylguanosine-3'-phosphate
  modified_base 18: mod_base = OTHER; note = 2'-O-methyluridine-3'-phosphate
  modified_base 19: mod_base = OTHER; note = 2'-O-methyluridine-3'-phosphate
  modified_base 20: mod_base = OTHER; note = 2'-O-methylcytidine-3'-phosphate
  modified_base 21: mod_base = OTHER; note = 2'-O-methyluridine-3'-phosphorothioate
  modified_base 22: mod_base = OTHER; note = 2'-O-methyluridine-3'-phosphorothioate
  modified_base 23: mod_base = OTHER; note = 2'-O-methyladenosine-3'-phosphate
actacacggaggtcatgttctta

SEQ ID NO: 1159 - RNA, 23 nt, synthetic construct
  source 1..23: mol_type = other RNA
  modified_base 1: mod_base = OTHER; note = 2'-O-methyladenosine-3'-phosphorothioate
  modified_base 2: mod_base = OTHER; note = 2'-fluoroadenosine-3'-phosphorothioate
  modified_base 3: mod_base = OTHER; note = 2'-O-methylcytidine-3'-phosphate
  modified_base 4: mod_base = OTHER; note = 2'-O-methyluridine-3'-phosphate
  modified_base 5: mod_base = OTHER; note = 2'-O-methyladenosine-3'-phosphate
  modified_base 6: mod_base = OTHER; note = 2'-fluorocytidine-3'-phosphate
  modified_base 7: mod_base = OTHER; note = 2'-O-methyladenosine-3'-phosphate
  modified_base 8: mod_base = OTHER; note = 2'-fluorocytidine-3'-phosphate
  modified_base 9: mod_base = OTHER; note = 2'-fluoroguanosine-3'-phosphate
  modified_base 10: mod_base = OTHER; note = 2'-O-methylguanosine-3'-phosphate
  modified_base 11: mod_base = OTHER; note = 2'-O-methyladenosine-3'-phosphate
  modified_base 12: mod_base = OTHER; note = 2'-O-methylguanosine-3'-phosphate
  modified_base 13: mod_base = OTHER; note = 2'-O-methylguanosine-3'-phosphate
  modified_base 14: mod_base = OTHER; note = 2'-fluorouridine-3'-phosphate
  modified_base 15: mod_base = OTHER; note = 2'-O-methylcytidine-3'-phosphate
  modified_base 16: mod_base = OTHER; note = 2'-fluoroadenosine-3'-phosphate
  modified_base 17: mod_base = OTHER; note = 2'-O-methyluridine-3'-phosphate
  modified_base 18: mod_base = OTHER; note = 2'-O-methylguanosine-3'-phosphate
  modified_base 19: mod_base = OTHER; note = 2'-O-methyluridine-3'-phosphate
  modified_base 20: mod_base = OTHER; note = 2'-O-methyluridine-3'-phosphate
  modified_base 21: mod_base = OTHER; note = 2'-O-methylcytidine-3'-phosphorothioate
  modified_base 22: mod_base = OTHER; note = 2'-O-methyluridine-3'-phosphorothioate
  modified_base 23: mod_base = OTHER; note = 2'-O-methyluridine-3'-phosphate
aactacacggaggtcatgttctt

SEQ ID NO: 1160 - RNA, 23 nt, synthetic construct
  source 1..23: mol_type = other RNA
  modified_base 1: mod_base = OTHER; note = 2'-O-methyladenosine-3'-phosphorothioate
  modified_base 2: mod_base = OTHER; note = 2'-fluorocytidine-3'-phosphorothioate
  modified_base 3: mod_base = OTHER; note = 2'-O-methyladenosine-3'-phosphate
  modified_base 4: mod_base = OTHER; note = 2'-O-methylcytidine-3'-phosphate
  modified_base 5: mod_base = OTHER; note = 2'-O-methyluridine-3'-phosphate
  modified_base 6: mod_base = OTHER; note = 2'-fluoroadenosine-3'-phosphate
  modified_base 7: mod_base = OTHER; note = 2'-O-methylcytidine-3'-phosphate
  modified_base 8: mod_base = OTHER; note = 2'-fluoroadenosine-3'-phosphate
  modified_base 9: mod_base = OTHER; note = 2'-fluorocytidine-3'-phosphate
  modified_base 10: mod_base = OTHER; note = 2'-O-methylguanosine-3'-phosphate
  modified_base 11: mod_base = OTHER; note = 2'-O-methylguanosine-3'-phosphate
  modified_base 12: mod_base = OTHER; note = 2'-O-methyladenosine-3'-phosphate
  modified_base 13: mod_base = OTHER; note = 2'-O-methylguanosine-3'-phosphate
  modified_base 14: mod_base = OTHER; note = 2'-fluoroguanosine-3'-phosphate
  modified_base 15: mod_base = OTHER; note = 2'-O-methyluridine-3'-phosphate
  modified_base 16: mod_base = OTHER; note = 2'-fluorocytidine-3'-phosphate
  modified_base 17: mod_base = OTHER; note = 2'-O-methyladenosine-3'-phosphate
  modified_base 18: mod_base = OTHER; note = 2'-O-methyluridine-3'-phosphate
  modified_base 19: mod_base = OTHER; note = 2'-O-methylguanosine-3'-phosphate
  modified_base 20: mod_base = OTHER; note = 2'-O-methyluridine-3'-phosphate
  modified_base 21: mod_base = OTHER; note = 2'-O-methyluridine-3'-phosphorothioate
  modified_base 22: mod_base = OTHER; note = 2'-O-methylcytidine-3'-phosphorothioate
  modified_base 23: mod_base = OTHER; note = 2'-O-methyluridine-3'-phosphate
acactacacggaggtcatgttct

SEQ ID NO: 1161 - RNA, 23 nt, synthetic construct
  source 1..23: mol_type = other RNA
  modified_base 1: mod_base = OTHER; note = 2'-O-methyladenosine-3'-phosphorothioate
  modified_base 2: mod_base = OTHER; note = 2'-fluoroadenosine-3'-phosphorothioate
  modified_base 3: mod_base = OTHER; note = 2'-O-methylcytidine-3'-phosphate
  modified_base 4: mod_base = OTHER; note = 2'-O-methyladenosine-3'-phosphate
  modified_base 5: mod_base = OTHER; note = 2'-O-methylcytidine-3'-phosphate
  modified_base 6: mod_base = OTHER; note = 2'-fluorouridine-3'-phosphate
  modified_base 7: mod_base = OTHER; note = 2'-O-methyladenosine-3'-phosphate
  modified_base 8: mod_base = OTHER; note = 2'-fluorocytidine-3'-phosphate
  modified_base 9: mod_base = OTHER; note = 2'-fluoroadenosine-3'-phosphate
  modified_base 10: mod_base = OTHER; note = 2'-O-methylcytidine-3'-phosphate
  modified_base 11: mod_base = OTHER; note = 2'-O-methylguanosine-3'-phosphate
  modified_base 12: mod_base = OTHER; note = 2'-O-methylguanosine-3'-phosphate
  modified_base 13: mod_base = OTHER; note = 2'-O-methyladenosine-3'-phosphate
  modified_base 14: mod_base = OTHER; note = 2'-fluoroguanosine-3'-phosphate
  modified_base 15: mod_base = OTHER; note = 2'-O-methylguanosine-3'-phosphate
  modified_base 16: mod_base = OTHER; note = 2'-fluorouridine-3'-phosphate
  modified_base 17: mod_base = OTHER; note = 2'-O-methylcytidine-3'-phosphate
  modified_base 18: mod_base = OTHER; note = 2'-O-methyladenosine-3'-phosphate
  modified_base 19: mod_base = OTHER; note = 2'-O-methyluridine-3'-phosphate
  modified_base 20: mod_base = OTHER; note = 2'-O-methylguanosine-3'-phosphate
  modified_base 21: mod_base = OTHER; note = 2'-O-methyluridine-3'-phosphorothioate
  modified_base 22: mod_base = OTHER; note = 2'-O-methyluridine-3'-phosphorothioate
  modified_base 23: mod_base = OTHER; note = 2'-O-methylcytidine-3'-phosphate
aacactacacggaggtcatgttc

SEQ ID NO: 1162 - RNA, 23 nt, synthetic construct
  source 1..23: mol_type = other RNA
  modified_base 1: mod_base = OTHER; note = 2'-O-methyladenosine-3'-phosphorothioate
  modified_base 2: mod_base = OTHER; note = 2'-fluorocytidine-3'-phosphorothioate
  modified_base 3: mod_base = OTHER; note = 2'-O-methyladenosine-3'-phosphate
  modified_base 4: mod_base = OTHER; note = 2'-O-methylguanosine-3'-phosphate
  modified_base 5: mod_base = OTHER; note = 2'-O-methyladenosine-3'-phosphate
  modified_base 6: mod_base = OTHER; note = 2'-fluorocytidine-3'-phosphate
  modified_base 7: mod_base = OTHER; note = 2'-O-methyladenosine-3'-phosphate
  modified_base 8: mod_base = OTHER; note = 2'-fluorocytidine-3'-phosphate
  modified_base 9: mod_base = OTHER; note = 2'-fluorouridine-3'-phosphate
  modified_base 10: mod_base = OTHER; note = 2'-O-methyladenosine-3'-phosphate
  modified_base 11: mod_base = OTHER; note = 2'-O-methylcytidine-3'-phosphate
  modified_base 12: mod_base = OTHER; note = 2'-O-methyladenosine-3'-phosphate
  modified_base 13: mod_base = OTHER; note = 2'-O-methylcytidine-3'-phosphate
  modified_base 14: mod_base = OTHER; note = 2'-fluoroguanosine-3'-phosphate
  modified_base 15: mod_base = OTHER; note = 2'-O-methylguanosine-3'-phosphate
  modified_base 16: mod_base = OTHER; note = 2'-fluoroadenosine-3'-phosphate
  modified_base 17: mod_base = OTHER; note = 2'-O-methylguanosine-3'-phosphate
  modified_base 18: mod_base = OTHER; note = 2'-O-methylguanosine-3'-phosphate
  modified_base 19: mod_base = OTHER; note = 2'-O-methyluridine-3'-phosphate
  modified_base 20: mod_base = OTHER; note = 2'-O-methylcytidine-3'-phosphate
  modified_base 21: mod_base = OTHER; note = 2'-O-methyladenosine-3'-phosphorothioate
  modified_base 22: mod_base = OTHER; note = 2'-O-methyluridine-3'-phosphorothioate
  modified_base 23: mod_base = OTHER; note = 2'-O-methylguanosine-3'-phosphate
acagacactacacggaggtcatg

SEQ ID NO: 1163 - RNA, 23 nt, synthetic construct
  source 1..23: mol_type = other RNA
  modified_base 1: mod_base = OTHER; note = 2'-O-methyladenosine-3'-phosphorothioate
  modified_base 2: mod_base = OTHER; note = 2'-fluoroguanosine-3'-phosphorothioate
  modified_base 3: mod_base = OTHER; note = 2'-O-methyluridine-3'-phosphate
  modified_base 4: mod_base = OTHER; note = 2'-O-methyladenosine-3'-phosphate
  modified_base 5: mod_base = OTHER; note = 2'-O-methyluridine-3'-phosphate
  modified_base 6: mod_base = OTHER; note = 2'-fluorouridine-3'-phosphate
  modified_base 7: mod_base = OTHER; note = 2'-O-methyladenosine-3'-phosphate
  modified_base 8: mod_base = OTHER; note = 2'-fluorocytidine-3'-phosphate
  modified_base 9: mod_base = OTHER; note = 2'-fluoroadenosine-3'-phosphate
  modified_base 10: mod_base = OTHER; note = 2'-O-methylguanosine-3'-phosphate
  modified_base 11: mod_base = OTHER; note = 2'-O-methyladenosine-3'-phosphate
  modified_base 12: mod_base = OTHER; note = 2'-O-methylcytidine-3'-phosphate
  modified_base 13: mod_base = OTHER; note = 2'-O-methyladenosine-3'-phosphate
  modified_base 14: mod_base = OTHER; note = 2'-fluorocytidine-3'-phosphate
  modified_base 15: mod_base = OTHER; note = 2'-O-methyluridine-3'-phosphate
  modified_base 16: mod_base = OTHER; note = 2'-fluoroadenosine-3'-phosphate
  modified_base 17: mod_base = OTHER; note = 2'-O-methylcytidine-3'-phosphate
  modified_base 18: mod_base = OTHER; note = 2'-O-methyladenosine-3'-phosphate
  modified_base 19: mod_base = OTHER; note = 2'-O-methylcytidine-3'-phosphate
  modified_base 20: mod_base = OTHER; note = 2'-O-methylguanosine-3'-phosphate
  modified_base 21: mod_base = OTHER; note = 2'-O-methylguanosine-3'-phosphorothioate
  modified_base 22: mod_base = OTHER; note = 2'-O-methyladenosine-3'-phosphorothioate
  modified_base 23: mod_base = OTHER; note = 2'-O-methylguanosine-3'-phosphate
agtattacagacactacacggag

SEQ ID NO: 1164 - RNA, 23 nt, synthetic construct
  source 1..23: mol_type = other RNA
  modified_base 1: mod_base = OTHER; note = 2'-O-methyladenosine-3'-phosphorothioate
  modified_base 2: mod_base = OTHER; note = 2'-fluoroguanosine-3'-phosphorothioate
  modified_base 3: mod_base = OTHER; note = 2'-O-methylguanosine-3'-phosphate
  modified_base 4: mod_base = OTHER; note = 2'-O-methyluridine-3'-phosphate
  modified_base 5: mod_base = OTHER; note = 2'-O-methyladenosine-3'-phosphate
  modified_base 6: mod_base = OTHER; note = 2'-fluorouridine-3'-phosphate
  modified_base 7: mod_base = OTHER; note = 2'-O-methyluridine-3'-phosphate
  modified_base 8: mod_base = OTHER; note = 2'-fluoroadenosine-3'-phosphate
  modified_base 9: mod_base = OTHER; note = 2'-fluorocytidine-3'-phosphate
  modified_base 10: mod_base = OTHER; note = 2'-O-methyladenosine-3'-phosphate
  modified_base 11: mod_base = OTHER; note = 2'-O-methylguanosine-3'-phosphate
  modified_base 12: mod_base = OTHER; note = 2'-O-methyladenosine-3'-phosphate
  modified_base 13: mod_base = OTHER; note = 2'-O-methylcytidine-3'-phosphate
  modified_base 14: mod_base = OTHER; note = 2'-fluoroadenosine-3'-phosphate
  modified_base 15: mod_base = OTHER; note = 2'-O-methylcytidine-3'-phosphate
  modified_base 16: mod_base = OTHER; note = 2'-fluorouridine-3'-phosphate
  modified_base 17: mod_base = OTHER; note = 2'-O-methyladenosine-3'-phosphate
  modified_base 18: mod_base = OTHER; note = 2'-O-methylcytidine-3'-phosphate
  modified_base 19: mod_base = OTHER; note = 2'-O-methyladenosine-3'-phosphate
  modified_base 20: mod_base = OTHER; note = 2'-O-methylcytidine-3'-phosphate
  modified_base 21: mod_base = OTHER; note = 2'-O-methylguanosine-3'-phosphorothioate
  modified_base 22: mod_base = OTHER; note = 2'-O-methylguanosine-3'-phosphorothioate
  modified_base 23: mod_base = OTHER; note = 2'-O-methyladenosine-3'-phosphate
aggtattacagacactacacgga

SEQ ID NO: 1165 - RNA, 23 nt, synthetic construct
  source 1..23: mol_type = other RNA
  modified_base 1: mod_base = OTHER; note = 2'-O-methyladenosine-3'-phosphorothioate
  modified_base 2: mod_base = OTHER; note = 2'-fluoroadenosine-3'-phosphorothioate
  modified_base 3: mod_base = OTHER; note = 2'-O-methylguanosine-3'-phosphate
  modified_base 4: mod_base = OTHER; note = 2'-O-methylguanosine-3'-phosphate
  modified_base 5: mod_base = OTHER; note = 2'-O-methyluridine-3'-phosphate
  modified_base 6: mod_base = OTHER; note = 2'-fluoroadenosine-3'-phosphate
  modified_base 7: mod_base = OTHER; note = 2'-O-methyluridine-3'-phosphate
  modified_base 8: mod_base = OTHER; note = 2'-fluorouridine-3'-phosphate
  modified_base 9: mod_base = OTHER; note = 2'-fluoroadenosine-3'-phosphate
  modified_base 10: mod_base = OTHER; note = 2'-O-methylcytidine-3'-phosphate
  modified_base 11: mod_base = OTHER; note = 2'-O-methyladenosine-3'-phosphate
  modified_base 12: mod_base = OTHER; note = 2'-O-methylguanosine-3'-phosphate
  modified_base 13: mod_base = OTHER; note = 2'-O-methyladenosine-3'-phosphate
  modified_base 14: mod_base = OTHER; note = 2'-fluorocytidine-3'-phosphate
  modified_base 15: mod_base = OTHER; note = 2'-O-methyladenosine-3'-phosphate
  modified_base 16: mod_base = OTHER; note = 2'-fluorocytidine-3'-phosphate
  modified_base 17: mod_base = OTHER; note = 2'-O-methyluridine-3'-phosphate
  modified_base 18: mod_base = OTHER; note = 2'-O-methyladenosine-3'-phosphate
  modified_base 19: mod_base = OTHER; note = 2'-O-methylcytidine-3'-phosphate
  modified_base 20: mod_base = OTHER; note = 2'-O-methyladenosine-3'-phosphate
  modified_base 21: mod_base = OTHER; note = 2'-O-methylcytidine-3'-phosphorothioate
  modified_base 22: mod_base = OTHER; note = 2'-O-methylguanosine-3'-phosphorothioate
  modified_base 23: mod_base = OTHER; note = 2'-O-methylguanosine-3'-phosphate
aaggtattacagacactacacgg

SEQ ID NO: 1166 - RNA, 23 nt, synthetic construct
  source 1..23: mol_type = other RNA
  modified_base 1: mod_base = OTHER; note = 2'-O-methyladenosine-3'-phosphorothioate
  modified_base 2: mod_base = OTHER; note = 2'-fluoroadenosine-3'-phosphorothioate
  modified_base 3: mod_base = OTHER; note = 2'-O-methyladenosine-3'-phosphate
  modified_base 4: mod_base = OTHER; note = 2'-O-methylguanosine-3'-phosphate
  modified_base 5: mod_base = OTHER; note = 2'-O-methylguanosine-3'-phosphate
  modified_base 6: mod_base = OTHER; note = 2'-fluorouridine-3'-phosphate
  modified_base 7: mod_base = OTHER; note = 2'-O-methyladenosine-3'-phosphate
  modified_base 8: mod_base = OTHER; note = 2'-fluorouridine-3'-phosphate
  modified_base 9: mod_base = OTHER; note = 2'-fluorouridine-3'-phosphate
  modified_base 10: mod_base = OTHER; note = 2'-O-methyladenosine-3'-phosphate
  modified_base 11: mod_base = OTHER; note = 2'-O-methylcytidine-3'-phosphate
  modified_base 12: mod_base = OTHER; note = 2'-O-methyladenosine-3'-phosphate
  modified_base 13: mod_base = OTHER; note = 2'-O-methylguanosine-3'-phosphate
  modified_base 14: mod_base = OTHER; note = 2'-fluoroadenosine-3'-phosphate
  modified_base 15: mod_base = OTHER; note = 2'-O-methylcytidine-3'-phosphate
  modified_base 16: mod_base = OTHER; note = 2'-fluoroadenosine-3'-phosphate
  modified_base 17: mod_base = OTHER; note = 2'-O-methylcytidine-3'-phosphate
  modified_base 18: mod_base = OTHER; note = 2'-O-methyluridine-3'-phosphate
  modified_base 19: mod_base = OTHER; note = 2'-O-methyladenosine-3'-phosphate
  modified_base 20: mod_base = OTHER; note = 2'-O-methylcytidine-3'-phosphate
  modified_base 21: mod_base = OTHER; note = 2'-O-methyladenosine-3'-phosphorothioate
  modified_base 22: mod_base = OTHER; note = 2'-O-methylcytidine-3'-phosphorothioate
  modified_base 23: mod_base = OTHER; note = 2'-O-methylguanosine-3'-phosphate
aaaggtattacagacactacacg

SEQ ID NO: 1167 - RNA, 23 nt, synthetic construct
  source 1..23: mol_type = other RNA
  modified_base 1: mod_base = OTHER; note = 2'-O-methyladenosine-3'-phosphorothioate
  modified_base 2: mod_base = OTHER; note = 2'-fluoroadenosine-3'-phosphorothioate
  modified_base 3: mod_base = OTHER; note = 2'-O-methylcytidine-3'-phosphate
  modified_base 4: mod_base = OTHER; note = 2'-O-methyluridine-3'-phosphate
  modified_base 5: mod_base = OTHER; note = 2'-O-methyladenosine-3'-phosphate
  modified_base 6: mod_base = OTHER; note = 2'-fluoroadenosine-3'-phosphate
  modified_base 7: mod_base = OTHER; note = 2'-O-methylguanosine-3'-phosphate
  modified_base 8: mod_base = OTHER; note = 2'-fluoroguanosine-3'-phosphate
  modified_base 9: mod_base = OTHER; note = 2'-fluorouridine-3'-phosphate
  modified_base 10: mod_base = OTHER; note = 2'-O-methyladenosine-3'-phosphate
  modified_base 11: mod_base = OTHER; note = 2'-O-methyluridine-3'-phosphate
  modified_base 12: mod_base = OTHER; note = 2'-O-methyluridine-3'-phosphate
  modified_base 13: mod_base = OTHER; note = 2'-O-methyladenosine-3'-phosphate
  modified_base 14: mod_base = OTHER; note = 2'-fluorocytidine-3'-phosphate
  modified_base 15: mod_base = OTHER; note = 2'-O-methyladenosine-3'-phosphate
  modified_base 16: mod_base = OTHER; note = 2'-fluoroguanosine-3'-phosphate
  modified_base 17: mod_base = OTHER; note = 2'-O-methyladenosine-3'-phosphate
  modified_base 18: mod_base = OTHER; note = 2'-O-methylcytidine-3'-phosphate
  modified_base 19: mod_base = OTHER; note = 2'-O-methyladenosine-3'-phosphate
  modified_base 20: mod_base = OTHER; note = 2'-O-methylcytidine-3'-phosphate
  modified_base 21: mod_base = OTHER; note = 2'-O-methyluridine-3'-phosphorothioate
  modified_base 22: mod_base = OTHER; note = 2'-O-methyladenosine-3'-phosphorothioate
  modified_base 23: mod_base = OTHER; note = 2'-O-methylcytidine-3'-phosphate
aactaaggtattacagacactac

SEQ ID NO: 1168 - RNA, 23 nt, synthetic construct
  source 1..23: mol_type = other RNA
  modified_base 1: mod_base = OTHER; note = 2'-O-methyladenosine-3'-phosphorothioate
  modified_base 2: mod_base = OTHER; note = 2'-fluoroadenosine-3'-phosphorothioate
  modified_base 3: mod_base = OTHER; note = 2'-O-methyladenosine-3'-phosphate
  modified_base 4: mod_base = OTHER; note = 2'-O-methylcytidine-3'-phosphate
  modified_base 5: mod_base = OTHER; note = 2'-O-methyluridine-3'-phosphate
  modified_base 6: mod_base = OTHER; note = 2'-fluoroadenosine-3'-phosphate
  modified_base 7: mod_base = OTHER; note = 2'-O-methyladenosine-3'-phosphate
  modified_base 8: mod_base = OTHER; note = 2'-fluoroguanosine-3'-phosphate
  modified_base 9: mod_base = OTHER; note = 2'-fluoroguanosine-3'-phosphate
  modified_base 10: mod_base = OTHER; note = 2'-O-methyluridine-3'-phosphate
  modified_base 11: mod_base = OTHER; note = 2'-O-methyladenosine-3'-phosphate
  modified_base 12: mod_base = OTHER; note = 2'-O-methyluridine-3'-phosphate
  modified_base 13: mod_base = OTHER; note = 2'-O-methyluridine-3'-phosphate
  modified_base 14: mod_base = OTHER; note = 2'-fluoroadenosine-3'-phosphate
  modified_base 15: mod_base = OTHER; note = 2'-O-methylcytidine-3'-phosphate
  modified_base 16: mod_base = OTHER; note = 2'-fluoroadenosine-3'-phosphate
  modified_base 17: mod_base = OTHER; note = 2'-O-methylguanosine-3'-phosphate
  modified_base 18: mod_base = OTHER; note = 2'-O-methyladenosine-3'-phosphate
  modified_base 19: mod_base = OTHER; note = 2'-O-methylcytidine-3'-phosphate
  modified_base 20: mod_base = OTHER; note = 2'-O-methyladenosine-3'-phosphate
  modified_base 21: mod_base = OTHER; note = 2'-O-methylcytidine-3'-phosphorothioate
  modified_base 22: mod_base = OTHER; note = 2'-O-methyluridine-3'-phosphorothioate
  modified_base 23: mod_base = OTHER; note = 2'-O-methyladenosine-3'-phosphate
aaactaaggtattacagacacta

SEQ ID NO: 1169 - RNA, 23 nt, synthetic construct
  source 1..23: mol_type = other RNA
  modified_base 1: mod_base = OTHER; note = 2'-O-methyladenosine-3'-phosphorothioate
  modified_base 2: mod_base = OTHER; note = 2'-fluoroadenosine-3'-phosphorothioate
  modified_base 3: mod_base = OTHER; note = 2'-O-methyladenosine-3'-phosphate
  modified_base 4: mod_base = OTHER; note = 2'-O-methyladenosine-3'-phosphate
  modified_base 5: mod_base = OTHER; note = 2'-O-methylcytidine-3'-phosphate
  modified_base 6: mod_base = OTHER; note = 2'-fluorouridine-3'-phosphate
  modified_base 7: mod_base = OTHER; note = 2'-O-methyladenosine-3'-phosphate
  modified_base 8: mod_base = OTHER; note = 2'-fluoroadenosine-3'-phosphate
  modified_base 9: mod_base = OTHER; note = 2'-fluoroguanosine-3'-phosphate
  modified_base 10: mod_base = OTHER; note = 2'-O-methylguanosine-3'-phosphate
  modified_base 11: mod_base = OTHER; note = 2'-O-methyluridine-3'-phosphate
  modified_base 12: mod_base = OTHER; note = 2'-O-methyladenosine-3'-phosphate
  modified_base 13: mod_base = OTHER; note = 2'-O-methyluridine-3'-phosphate
  modified_base 14: mod_base = OTHER; note = 2'-fluorouridine-3'-phosphate
  modified_base 15: mod_base = OTHER; note = 2'-O-methyladenosine-3'-phosphate
  modified_base 16: mod_base = OTHER; note = 2'-fluorocytidine-3'-phosphate
  modified_base 17: mod_base = OTHER; note = 2'-O-methyladenosine-3'-phosphate
  modified_base 18: mod_base = OTHER; note = 2'-O-methylguanosine-3'-phosphate
  modified_base 19: mod_base = OTHER; note = 2'-O-methyladenosine-3'-phosphate
  modified_base 20: mod_base = OTHER; note = 2'-O-methylcytidine-3'-phosphate
  modified_base 21: mod_base = OTHER; note = 2'-O-methyladenosine-3'-phosphorothioate
  modified_base 22: mod_base = OTHER; note = 2'-O-methylcytidine-3'-phosphorothioate
  modified_base 23: mod_base = OTHER; note = 2'-O-methyluridine-3'-phosphate
aaaactaaggtattacagacact

SEQ ID NO: 1170 - RNA, 23 nt, synthetic construct
  source 1..23: mol_type = other RNA
  modified_base 1: mod_base = OTHER; note = 2'-O-methyladenosine-3'-phosphorothioate
  modified_base 2: mod_base = OTHER; note = 2'-fluoroadenosine-3'-phosphorothioate
  modified_base 3: mod_base = OTHER; note = 2'-O-methyladenosine-3'-phosphate
  modified_base 4: mod_base = OTHER; note = 2'-O-methyladenosine-3'-phosphate
  modified_base 5: mod_base = OTHER; note = 2'-O-methyladenosine-3'-phosphate
  modified_base 6: mod_base = OTHER; note = 2'-fluorocytidine-3'-phosphate
  modified_base 7: mod_base = OTHER; note = 2'-O-methyluridine-3'-phosphate
  modified_base 8: mod_base = OTHER; note = 2'-fluoroadenosine-3'-phosphate
  modified_base 9: mod_base = OTHER; note = 2'-fluoroadenosine-3'-phosphate
  modified_base 10: mod_base = OTHER; note = 2'-O-methylguanosine-3'-phosphate
  modified_base 11: mod_base = OTHER; note = 2'-O-methylguanosine-3'-phosphate
  modified_base 12: mod_base = OTHER; note = 2'-O-methyluridine-3'-phosphate
  modified_base 13: mod_base = OTHER; note = 2'-O-methyladenosine-3'-phosphate
  modified_base 14: mod_base = OTHER; note = 2'-fluorouridine-3'-phosphate
  modified_base 15: mod_base = OTHER; note = 2'-O-methyluridine-3'-phosphate
  modified_base 16: mod_base = OTHER; note = 2'-fluoroadenosine-3'-phosphate
  modified_base 17: mod_base = OTHER; note = 2'-O-methylcytidine-3'-phosphate
  modified_base 18: mod_base = OTHER; note = 2'-O-methyladenosine-3'-phosphate
  modified_base 19: mod_base = OTHER; note = 2'-O-methylguanosine-3'-phosphate
  modified_base 20: mod_base = OTHER; note = 2'-O-methyladenosine-3'-phosphate
  modified_base 21: mod_base = OTHER; note = 2'-O-methylcytidine-3'-phosphorothioate
  modified_base 22: mod_base = OTHER; note = 2'-O-methyladenosine-3'-phosphorothioate
  modified_base 23: mod_base = OTHER; note = 2'-O-methylcytidine-3'-phosphate
aaaaactaaggtattacagacac

SEQ ID NO: 1171 - RNA, 23 nt, synthetic construct
  source 1..23: mol_type = other RNA
  modified_base 1: mod_base = OTHER; note = 2'-O-methyladenosine-3'-phosphorothioate
  modified_base 2: mod_base = OTHER; note = 2'-fluoroadenosine-3'-phosphorothioate
  modified_base 3: mod_base = OTHER; note = 2'-O-methyluridine-3'-phosphate
  modified_base 4: mod_base = OTHER; note = 2'-O-methylcytidine-3'-phosphate
  modified_base 5: mod_base = OTHER; note = 2'-O-methyladenosine-3'-phosphate
  modified_base 6: mod_base = OTHER; note = 2'-fluorocytidine-3'-phosphate
  modified_base 7: mod_base = OTHER; note = 2'-O-methyladenosine-3'-phosphate
  modified_base 8: mod_base = OTHER; note = 2'-fluoroadenosine-3'-phosphate
  modified_base 9: mod_base = OTHER; note = 2'-fluoroguanosine-3'-phosphate
  modified_base 10: mod_base = OTHER; note = 2'-O-methylcytidine-3'-phosphate
  modified_base 11: mod_base = OTHER; note = 2'-O-methyladenosine-3'-phosphate
  modified_base 12: mod_base = OTHER; note = 2'-O-methyluridine-3'-phosphate
  modified_base 13: mod_base = OTHER; note = 2'-O-methylcytidine-3'-phosphate
  modified_base 14: mod_base = OTHER; note = 2'-fluorouridine-3'-phosphate
  modified_base 15: mod_base = OTHER; note = 2'-O-methylguanosine-3'-phosphate
  modified_base 16: mod_base = OTHER; note = 2'-fluorouridine-3'-phosphate
  modified_base 17: mod_base = OTHER; note = 2'-O-methylguanosine-3'-phosphate
  modified_base 18: mod_base = OTHER; note = 2'-O-methylguanosine-3'-phosphate
  modified_base 19: mod_base = OTHER; note = 2'-O-methyladenosine-3'-phosphate
  modified_base 20: mod_base = OTHER; note = 2'-O-methyladenosine-3'-phosphate
  modified_base 21: mod_base = OTHER; note = 2'-O-methyladenosine-3'-phosphorothioate
  modified_base 22: mod_base = OTHER; note = 2'-O-methyladenosine-3'-phosphorothioate
  modified_base 23: mod_base = OTHER; note = 2'-O-methyladenosine-3'-phosphate
aatcacaagcatctgtggaaaaa

SEQ ID NO: 1172 - RNA, 23 nt, synthetic construct
  source 1..23: mol_type = other RNA
  modified_base 1: mod_base = OTHER; note = 2'-O-methyladenosine-3'-phosphorothioate
  modified_base 2: mod_base = OTHER; note = 2'-fluoroadenosine-3'-phosphorothioate
  modified_base 3: mod_base = OTHER; note = 2'-O-methyladenosine-3'-phosphate
  modified_base 4: mod_base = OTHER; note = 2'-O-methyladenosine-3'-phosphate
  modified_base 5: mod_base = OTHER; note = 2'-O-methyladenosine-3'-phosphate
  modified_base 6: mod_base = OTHER; note = 2'-fluoroadenosine-3'-phosphate
  modified_base 7: mod_base = OTHER; note = 2'-O-methyluridine-3'-phosphate
  modified_base 8: mod_base = OTHER; note = 2'-fluorocytidine-3'-phosphate
  modified_base 9: mod_base = OTHER; note = 2'-fluoroadenosine-3'-phosphate
  modified_base 10: mod_base = OTHER; note = 2'-O-methylcytidine-3'-phosphate
  modified_base 11: mod_base = OTHER; note = 2'-O-methyladenosine-3'-phosphate
  modified_base 12: mod_base = OTHER; note = 2'-O-methyladenosine-3'-phosphate
  modified_base 13: mod_base = OTHER; note = 2'-O-methylguanosine-3'-phosphate
  modified_base 14: mod_base = OTHER; note = 2'-fluorocytidine-3'-phosphate
  modified_base 15: mod_base = OTHER; note = 2'-O-methyladenosine-3'-phosphate
  modified_base 16: mod_base = OTHER; note = 2'-fluorouridine-3'-phosphate
  modified_base 17: mod_base = OTHER; note = 2'-O-methylcytidine-3'-phosphate
  modified_base 18: mod_base = OTHER; note = 2'-O-methyluridine-3'-phosphate
  modified_base 19: mod_base = OTHER; note = 2'-O-methylguanosine-3'-phosphate
  modified_base 20: mod_base = OTHER; note = 2'-O-methyluridine-3'-phosphate
  modified_base 21: mod_base = OTHER; note = 2'-O-methylguanosine-3'-phosphorothioate
  modified_base 22: mod_base = OTHER; note = 2'-O-methylguanosine-3'-phosphorothioate
  modified_base 23: mod_base = OTHER; note = 2'-O-methyladenosine-3'-phosphate
aaaaaatcacaagcatctgtgga

SEQ ID NO: 1173 - RNA, 23 nt, synthetic construct
  source 1..23: mol_type = other RNA
  modified_base 1: mod_base = OTHER; note = 2'-O-methyladenosine-3'-phosphorothioate
  modified_base 2: mod_base = OTHER; note = 2'-fluorocytidine-3'-phosphorothioate
  modified_base 3: mod_base = OTHER; note = 2'-O-methyladenosine-3'-phosphate
  modified_base 4: mod_base = OTHER; note = 2'-O-methyladenosine-3'-phosphate
  modified_base 5: mod_base = OTHER; note = 2'-O-methyladenosine-3'-phosphate
  modified_base 6: mod_base = OTHER; note = 2'-fluoroadenosine-3'-phosphate
  modified_base 7: mod_base = OTHER; note = 2'-O-methyladenosine-3'-phosphate
  modified_base 8: mod_base = OTHER; note = 2'-fluorouridine-3'-phosphate
  modified_base 9: mod_base = OTHER; note = 2'-fluorocytidine-3'-phosphate
  modified_base 10: mod_base = OTHER; note = 2'-O-methyladenosine-3'-phosphate
  modified_base 11: mod_base = OTHER; note = 2'-O-methylcytidine-3'-phosphate
  modified_base 12: mod_base = OTHER; note = 2'-O-methyladenosine-3'-phosphate
  modified_base 13: mod_base = OTHER; note = 2'-O-methyladenosine-3'-phosphate
  modified_base 14: mod_base = OTHER; note = 2'-fluoroguanosine-3'-phosphate
  modified_base 15: mod_base = OTHER; note = 2'-O-methylcytidine-3'-phosphate
  modified_base 16: mod_base = OTHER; note = 2'-fluoroadenosine-3'-phosphate
  modified_base 17: mod_base = OTHER; note = 2'-O-methyluridine-3'-phosphate
  modified_base 18: mod_base = OTHER; note = 2'-O-methylcytidine-3'-phosphate
  modified_base 19: mod_base = OTHER; note = 2'-O-methyluridine-3'-phosphate
  modified_base 20: mod_base = OTHER; note = 2'-O-methylguanosine-3'-phosphate
  modified_base 21: mod_base = OTHER; note = 2'-O-methyluridine-3'-phosphorothioate
  modified_base 22: mod_base = OTHER; note = 2'-O-methylguanosine-3'-phosphorothioate
  modified_base 23: mod_base = OTHER; note = 2'-O-methylguanosine-3'-phosphate
acaaaaatcacaagcatctgtgg

SEQ ID NO: 1174 - RNA, 23 nt, synthetic construct
  source 1..23: mol_type = other RNA
  modified_base 1: mod_base = OTHER; note = 2'-O-methyladenosine-3'-phosphorothioate
  modified_base 2: mod_base = OTHER; note = 2'-fluorouridine -3'-phosphorothioate
  modified_base 3: mod_base = OTHER; note = 2'-O-methylcytidine-3'-phosphate
  modified_base 4: mod_base = OTHER; note = 2'-O-methyladenosine-3'-phosphate
  modified_base 5: mod_base = OTHER; note = 2'-O-methyladenosine-3'-phosphate
  modified_base 6: mod_base = OTHER; note = 2'-fluoroadenosine-3'-phosphate
  modified_base 7: mod_base = OTHER; note = 2'-O-methyladenosine-3'-phosphate
  modified_base 8: mod_base = OTHER; note = 2'-fluoroadenosine-3'-phosphate
  modified_base 9: mod_base = OTHER; note = 2'-fluorouridine-3'-phosphate
  modified_base 10: mod_base = OTHER; note = 2'-O-methylcytidine-3'-phosphate
  modified_base 11: mod_base = OTHER; note = 2'-O-methyladenosine-3'-phosphate
  modified_base 12: mod_base = OTHER; note = 2'-O-methylcytidine-3'-phosphate
  modified_base 13: mod_base = OTHER; note = 2'-O-methyladenosine-3'-phosphate
  modified_base 14: mod_base = OTHER; note = 2'-fluoroadenosine-3'-phosphate
  modified_base 15: mod_base = OTHER; note = 2'-O-methylguanosine-3'-phosphate
  modified_base 16: mod_base = OTHER; note = 2'-fluorocytidine-3'-phosphate
  modified_base 17: mod_base = OTHER; note = 2'-O-methyladenosine-3'-phosphate
  modified_base 18: mod_base = OTHER; note = 2'-O-methyluridine-3'-phosphate
  modified_base 19: mod_base = OTHER; note = 2'-O-methylcytidine-3'-phosphate
  modified_base 20: mod_base = OTHER; note = 2'-O-methyluridine-3'-phosphate
  modified_base 21: mod_base = OTHER; note = 2'-O-methylguanosine-3'-phosphorothioate
  modified_base 22: mod_base = OTHER; note = 2'-O-methyluridine-3'-phosphorothioate
  modified_base 23: mod_base = OTHER; note = 2'-O-methylguanosine-3'-phosphate
atcaaaaatcacaagcatctgtg

SEQ ID NO: 1175 - RNA, 23 nt, synthetic construct
  source 1..23: mol_type = other RNA
  modified_base 1: mod_base = OTHER; note = 2'-O-methyladenosine-3'-phosphorothioate
  modified_base 2: mod_base = OTHER; note = 2'-fluorouridine -3'-phosphorothioate
  modified_base 3: mod_base = OTHER; note = 2'-O-methyluridine-3'-phosphate
  modified_base 4: mod_base = OTHER; note = 2'-O-methylcytidine-3'-phosphate
  modified_base 5: mod_base = OTHER; note = 2'-O-methyladenosine-3'-phosphate
  modified_base 6: mod_base = OTHER; note = 2'-fluoroadenosine-3'-phosphate
  modified_base 7: mod_base = OTHER; note = 2'-O-methyladenosine-3'-phosphate
  modified_base 8: mod_base = OTHER; note = 2'-fluoroadenosine-3'-phosphate
  modified_base 9: mod_base = OTHER; note = 2'-fluoroadenosine-3'-phosphate
  modified_base 10: mod_base = OTHER; note = 2'-O-methyluridine-3'-phosphate
  modified_base 11: mod_base = OTHER; note = 2'-O-methylcytidine-3'-phosphate
  modified_base 12: mod_base = OTHER; note = 2'-O-methyladenosine-3'-phosphate
  modified_base 13: mod_base = OTHER; note = 2'-O-methylcytidine-3'-phosphate
  modified_base 14: mod_base = OTHER; note = 2'-fluoroadenosine-3'-phosphate
  modified_base 15: mod_base = OTHER; note = 2'-O-methyladenosine-3'-phosphate
  modified_base 16: mod_base = OTHER; note = 2'-fluoroguanosine-3'-phosphate
  modified_base 17: mod_base = OTHER; note = 2'-O-methylcytidine-3'-phosphate
  modified_base 18: mod_base = OTHER; note = 2'-O-methyladenosine-3'-phosphate
  modified_base 19: mod_base = OTHER; note = 2'-O-methyluridine-3'-phosphate
  modified_base 20: mod_base = OTHER; note = 2'-O-methylcytidine-3'-phosphate
  modified_base 21: mod_base = OTHER; note = 2'-O-methyluridine-3'-phosphorothioate
  modified_base 22: mod_base = OTHER; note = 2'-O-methylguanosine-3'-phosphorothioate
  modified_base 23: mod_base = OTHER; note = 2'-O-methyluridine-3'-phosphate
attcaaaaatcacaagcatctgt

SEQ ID NO: 1176 - RNA, 23 nt, synthetic construct
  source 1..23: mol_type = other RNA
  modified_base 1: mod_base = OTHER; note = 2'-O-methyladenosine-3'-phosphorothioate
  modified_base 2: mod_base = OTHER; note = 2'-fluoroguanosine-3'-phosphorothioate
  modified_base 3: mod_base = OTHER; note = 2'-O-methyluridine-3'-phosphate
  modified_base 4: mod_base = OTHER; note = 2'-O-methyluridine-3'-phosphate
  modified_base 5: mod_base = OTHER; note = 2'-O-methylcytidine-3'-phosphate
  modified_base 6: mod_base = OTHER; note = 2'-fluoroadenosine-3'-phosphate
  modified_base 7: mod_base = OTHER; note = 2'-O-methyladenosine-3'-phosphate
  modified_base 8: mod_base = OTHER; note = 2'-fluoroadenosine-3'-phosphate
  modified_base 9: mod_base = OTHER; note = 2'-fluoroadenosine-3'-phosphate
  modified_base 10: mod_base = OTHER; note = 2'-O-methyladenosine-3'-phosphate
  modified_base 11: mod_base = OTHER; note = 2'-O-methyluridine-3'-phosphate
  modified_base 12: mod_base = OTHER; note = 2'-O-methylcytidine-3'-phosphate
  modified_base 13: mod_base = OTHER; note = 2'-O-methyladenosine-3'-phosphate
  modified_base 14: mod_base = OTHER; note = 2'-fluorocytidine-3'-phosphate
  modified_base 15: mod_base = OTHER; note = 2'-O-methyladenosine-3'-phosphate
  modified_base 16: mod_base = OTHER; note = 2'-fluoroadenosine-3'-phosphate
  modified_base 17: mod_base = OTHER; note = 2'-O-methylguanosine-3'-phosphate
  modified_base 18: mod_base = OTHER; note = 2'-O-methylcytidine-3'-phosphate
  modified_base 19: mod_base = OTHER; note = 2'-O-methyladenosine-3'-phosphate
  modified_base 20: mod_base = OTHER; note = 2'-O-methyluridine-3'-phosphate
  modified_base 21: mod_base = OTHER; note = 2'-O-methylcytidine-3'-phosphorothioate
  modified_base 22: mod_base = OTHER; note = 2'-O-methyluridine-3'-phosphorothioate
  modified_base 23: mod_base = OTHER; note = 2'-O-methylguanosine-3'-phosphate
agttcaaaaatcacaagcatctg

SEQ ID NO: 1177 - RNA, 23 nt, synthetic construct
  source 1..23: mol_type = other RNA
  modified_base 1: mod_base = OTHER; note = 2'-O-methyladenosine-3'-phosphorothioate
  modified_base 2: mod_base = OTHER; note = 2'-fluorocytidine-3'-phosphorothioate
  modified_base 3: mod_base = OTHER; note = 2'-O-methylguanosine-3'-phosphate
  modified_base 4: mod_base = OTHER; note = 2'-O-methyluridine-3'-phosphate
  modified_base 5: mod_base = OTHER; note = 2'-O-methyladenosine-3'-phosphate
  modified_base 6: mod_base = OTHER; note = 2'-fluorouridine-3'-phosphate
  modified_base 7: mod_base = OTHER; note = 2'-O-methyluridine-3'-phosphate
  modified_base 8: mod_base = OTHER; note = 2'-fluoroguanosine-3'-phosphate
  modified_base 9: mod_base = OTHER; note = 2'-fluorouridine-3'-phosphate
  modified_base 10: mod_base = OTHER; note = 2'-O-methyluridine-3'-phosphate
  modified_base 11: mod_base = OTHER; note = 2'-O-methylcytidine-3'-phosphate
  modified_base 12: mod_base = OTHER; note = 2'-O-methyladenosine-3'-phosphate
  modified_base 13: mod_base = OTHER; note = 2'-O-methyladenosine-3'-phosphate
  modified_base 14: mod_base = OTHER; note = 2'-fluoroadenosine-3'-phosphate
  modified_base 15: mod_base = OTHER; note = 2'-O-methyladenosine-3'-phosphate
  modified_base 16: mod_base = OTHER; note = 2'-fluoroadenosine-3'-phosphate
  modified_base 17: mod_base = OTHER; note = 2'-O-methyluridine-3'-phosphate
  modified_base 18: mod_base = OTHER; note = 2'-O-methylcytidine-3'-phosphate
  modified_base 19: mod_base = OTHER; note = 2'-O-methyladenosine-3'-phosphate
  modified_base 20: mod_base = OTHER; note = 2'-O-methylcytidine-3'-phosphate
  modified_base 21: mod_base = OTHER; note = 2'-O-methyladenosine-3'-phosphorothioate
  modified_base 22: mod_base = OTHER; note = 2'-O-methyladenosine-3'-phosphorothioate
  modified_base 23: mod_base = OTHER; note = 2'-O-methylguanosine-3'-phosphate
acgtattgttcaaaaatcacaag

SEQ ID NO: 1178 - RNA, 23 nt, synthetic construct
  source 1..23: mol_type = other RNA
  modified_base 1: mod_base = OTHER; note = 2'-O-methyladenosine-3'-phosphorothioate
  modified_base 2: mod_base = OTHER; note = 2'-fluoroadenosine-3'-phosphorothioate
  modified_base 3: mod_base = OTHER; note = 2'-O-methylcytidine-3'-phosphate
  modified_base 4: mod_base = OTHER; note = 2'-O-methylguanosine-3'-phosphate
  modified_base 5: mod_base = OTHER; note = 2'-O-methyluridine-3'-phosphate
  modified_base 6: mod_base = OTHER; note = 2'-fluoroadenosine-3'-phosphate
  modified_base 7: mod_base = OTHER; note = 2'-O-methyluridine-3'-phosphate
  modified_base 8: mod_base = OTHER; note = 2'-fluorouridine-3'-phosphate
  modified_base 9: mod_base = OTHER; note = 2'-fluoroguanosine-3'-phosphate
  modified_base 10: mod_base = OTHER; note = 2'-O-methyluridine-3'-phosphate
  modified_base 11: mod_base = OTHER; note = 2'-O-methyluridine-3'-phosphate
  modified_base 12: mod_base = OTHER; note = 2'-O-methylcytidine-3'-phosphate
  modified_base 13: mod_base = OTHER; note = 2'-O-methyladenosine-3'-phosphate
  modified_base 14: mod_base = OTHER; note = 2'-fluoroadenosine-3'-phosphate
  modified_base 15: mod_base = OTHER; note = 2'-O-methyladenosine-3'-phosphate
  modified_base 16: mod_base = OTHER; note = 2'-fluoroadenosine-3'-phosphate
  modified_base 17: mod_base = OTHER; note = 2'-O-methyladenosine-3'-phosphate
  modified_base 18: mod_base = OTHER; note = 2'-O-methyluridine-3'-phosphate
  modified_base 19: mod_base = OTHER; note = 2'-O-methylcytidine-3'-phosphate
  modified_base 20: mod_base = OTHER; note = 2'-O-methyladenosine-3'-phosphate
  modified_base 21: mod_base = OTHER; note = 2'-O-methylcytidine-3'-phosphorothioate
  modified_base 22: mod_base = OTHER; note = 2'-O-methyladenosine-3'-phosphorothioate
  modified_base 23: mod_base = OTHER; note = 2'-O-methyladenosine-3'-phosphate
aacgtattgttcaaaaatcacaa

SEQ ID NO: 1179 - RNA, 23 nt, synthetic construct
  source 1..23: mol_type = other RNA
  modified_base 1: mod_base = OTHER; note = 2'-O-methyladenosine-3'-phosphorothioate
  modified_base 2: mod_base = OTHER; note = 2'-fluorocytidine-3'-phosphorothioate
  modified_base 3: mod_base = OTHER; note = 2'-O-methyladenosine-3'-phosphate
  modified_base 4: mod_base = OTHER; note = 2'-O-methylcytidine-3'-phosphate
  modified_base 5: mod_base = OTHER; note = 2'-O-methylguanosine-3'-phosphate
  modified_base 6: mod_base = OTHER; note = 2'-fluorouridine-3'-phosphate
  modified_base 7: mod_base = OTHER; note = 2'-O-methyladenosine-3'-phosphate
  modified_base 8: mod_base = OTHER; note = 2'-fluorouridine-3'-phosphate
  modified_base 9: mod_base = OTHER; note = 2'-fluorouridine-3'-phosphate
  modified_base 10: mod_base = OTHER; note = 2'-O-methylguanosine-3'-phosphate
  modified_base 11: mod_base = OTHER; note = 2'-O-methyluridine-3'-phosphate
  modified_base 12: mod_base = OTHER; note = 2'-O-methyluridine-3'-phosphate
  modified_base 13: mod_base = OTHER; note = 2'-O-methylcytidine-3'-phosphate
  modified_base 14: mod_base = OTHER; note = 2'-fluoroadenosine-3'-phosphate
  modified_base 15: mod_base = OTHER; note = 2'-O-methyladenosine-3'-phosphate
  modified_base 16: mod_base = OTHER; note = 2'-fluoroadenosine-3'-phosphate
  modified_base 17: mod_base = OTHER; note = 2'-O-methyladenosine-3'-phosphate
  modified_base 18: mod_base = OTHER; note = 2'-O-methyladenosine-3'-phosphate
  modified_base 19: mod_base = OTHER; note = 2'-O-methyluridine-3'-phosphate
  modified_base 20: mod_base = OTHER; note = 2'-O-methylcytidine-3'-phosphate
  modified_base 21: mod_base = OTHER; note = 2'-O-methyladenosine-3'-phosphorothioate
  modified_base 22: mod_base = OTHER; note = 2'-O-methylcytidine-3'-phosphorothioate
  modified_base 23: mod_base = OTHER; note = 2'-O-methyladenosine-3'-phosphate
acacgtattgttcaaaaatcaca

SEQ ID NO: 1180 - RNA, 23 nt, synthetic construct
  source 1..23: mol_type = other RNA
  modified_base 1: mod_base = OTHER; note = 2'-O-methyladenosine-3'-phosphorothioate
  modified_base 2: mod_base = OTHER; note = 2'-fluorouridine -3'-phosphorothioate
  modified_base 3: mod_base = OTHER; note = 2'-O-methylcytidine-3'-phosphate
  modified_base 4: mod_base = OTHER; note = 2'-O-methyladenosine-3'-phosphate
  modified_base 5: mod_base = OTHER; note = 2'-O-methylcytidine-3'-phosphate
  modified_base 6: mod_base = OTHER; note = 2'-fluoroguanosine-3'-phosphate
  modified_base 7: mod_base = OTHER; note = 2'-O-methyluridine-3'-phosphate
  modified_base 8: mod_base = OTHER; note = 2'-fluoroadenosine-3'-phosphate
  modified_base 9: mod_base = OTHER; note = 2'-fluorouridine-3'-phosphate
  modified_base 10: mod_base = OTHER; note = 2'-O-methyluridine-3'-phosphate
  modified_base 11: mod_base = OTHER; note = 2'-O-methylguanosine-3'-phosphate
  modified_base 12: mod_base = OTHER; note = 2'-O-methyluridine-3'-phosphate
  modified_base 13: mod_base = OTHER; note = 2'-O-methyluridine-3'-phosphate
  modified_base 14: mod_base = OTHER; note = 2'-fluorocytidine-3'-phosphate
  modified_base 15: mod_base = OTHER; note = 2'-O-methyladenosine-3'-phosphate
  modified_base 16: mod_base = OTHER; note = 2'-fluoroadenosine-3'-phosphate
  modified_base 17: mod_base = OTHER; note = 2'-O-methyladenosine-3'-phosphate
  modified_base 18: mod_base = OTHER; note = 2'-O-methyladenosine-3'-phosphate
  modified_base 19: mod_base = OTHER; note = 2'-O-methyladenosine-3'-phosphate
  modified_base 20: mod_base = OTHER; note = 2'-O-methyluridine-3'-phosphate
  modified_base 21: mod_base = OTHER; note = 2'-O-methylcytidine-3'-phosphorothioate
  modified_base 22: mod_base = OTHER; note = 2'-O-methyladenosine-3'-phosphorothioate
  modified_base 23: mod_base = OTHER; note = 2'-O-methylcytidine-3'-phosphate
atcacgtattgttcaaaaatcac

SEQ ID NO: 1181 - RNA, 23 nt, synthetic construct
  source 1..23: mol_type = other RNA
  modified_base 1: mod_base = OTHER; note = 2'-O-methyladenosine-3'-phosphorothioate
  modified_base 2: mod_base = OTHER; note = 2'-fluorouridine -3'-phosphorothioate
  modified_base 3: mod_base = OTHER; note = 2'-O-methyluridine-3'-phosphate
  modified_base 4: mod_base = OTHER; note = 2'-O-methylcytidine-3'-phosphate
  modified_base 5: mod_base = OTHER; note = 2'-O-methyladenosine-3'-phosphate
  modified_base 6: mod_base = OTHER; note = 2'-fluorocytidine-3'-phosphate
  modified_base 7: mod_base = OTHER; note = 2'-O-methylguanosine-3'-phosphate
  modified_base 8: mod_base = OTHER; note = 2'-fluorouridine-3'-phosphate
  modified_base 9: mod_base = OTHER; note = 2'-fluoroadenosine-3'-phosphate
  modified_base 10: mod_base = OTHER; note = 2'-O-methyluridine-3'-phosphate
  modified_base 11: mod_base = OTHER; note = 2'-O-methyluridine-3'-phosphate
  modified_base 12: mod_base = OTHER; note = 2'-O-methylguanosine-3'-phosphate
  modified_base 13: mod_base = OTHER; note = 2'-O-methyluridine-3'-phosphate
  modified_base 14: mod_base = OTHER; note = 2'-fluorouridine-3'-phosphate
  modified_base 15: mod_base = OTHER; note = 2'-O-methylcytidine-3'-phosphate
  modified_base 16: mod_base = OTHER; note = 2'-fluoroadenosine-3'-phosphate
  modified_base 17: mod_base = OTHER; note = 2'-O-methyladenosine-3'-phosphate
  modified_base 18: mod_base = OTHER; note = 2'-O-methyladenosine-3'-phosphate
  modified_base 19: mod_base = OTHER; note = 2'-O-methyladenosine-3'-phosphate
  modified_base 20: mod_base = OTHER; note = 2'-O-methyladenosine-3'-phosphate
  modified_base 21: mod_base = OTHER; note = 2'-O-methyluridine-3'-phosphorothioate
  modified_base 22: mod_base = OTHER; note = 2'-O-methylcytidine-3'-phosphorothioate
  modified_base 23: mod_base = OTHER; note = 2'-O-methyladenosine-3'-phosphate
attcacgtattgttcaaaaatca

SEQ ID NO: 1182 - RNA, 23 nt, synthetic construct
  source 1..23: mol_type = other RNA
  modified_base 1: mod_base = OTHER; note = 2'-O-methyladenosine-3'-phosphorothioate
  modified_base 2: mod_base = OTHER; note = 2'-fluorocytidine-3'-phosphorothioate
  modified_base 3: mod_base = OTHER; note = 2'-O-methyladenosine-3'-phosphate
  modified_base 4: mod_base = OTHER; note = 2'-O-methyluridine-3'-phosphate
  modified_base 5: mod_base = OTHER; note = 2'-O-methylcytidine-3'-phosphate
  modified_base 6: mod_base = OTHER; note = 2'-fluorouridine-3'-phosphate
  modified_base 7: mod_base = OTHER; note = 2'-O-methyluridine-3'-phosphate
  modified_base 8: mod_base = OTHER; note = 2'-fluorouridine-3'-phosphate
  modified_base 9: mod_base = OTHER; note = 2'-fluorocytidine-3'-phosphate
  modified_base 10: mod_base = OTHER; note = 2'-O-methyladenosine-3'-phosphate
  modified_base 11: mod_base = OTHER; note = 2'-O-methylcytidine-3'-phosphate
  modified_base 12: mod_base = OTHER; note = 2'-O-methylguanosine-3'-phosphate
  modified_base 13: mod_base = OTHER; note = 2'-O-methyluridine-3'-phosphate
  modified_base 14: mod_base = OTHER; note = 2'-fluoroadenosine-3'-phosphate
  modified_base 15: mod_base = OTHER; note = 2'-O-methyluridine-3'-phosphate
  modified_base 16: mod_base = OTHER; note = 2'-fluorouridine-3'-phosphate
  modified_base 17: mod_base = OTHER; note = 2'-O-methylguanosine-3'-phosphate
  modified_base 18: mod_base = OTHER; note = 2'-O-methyluridine-3'-phosphate
  modified_base 19: mod_base = OTHER; note = 2'-O-methyluridine-3'-phosphate
  modified_base 20: mod_base = OTHER; note = 2'-O-methylcytidine-3'-phosphate
  modified_base 21: mod_base = OTHER; note = 2'-O-methyladenosine-3'-phosphorothioate
  modified_base 22: mod_base = OTHER; note = 2'-O-methyladenosine-3'-phosphorothioate
  modified_base 23: mod_base = OTHER; note = 2'-O-methyladenosine-3'-phosphate
acatctttcacgtattgttcaaa

SEQ ID NO: 1183 - RNA, 23 nt, synthetic construct
  source 1..23: mol_type = other RNA
  modified_base 1: mod_base = OTHER; note = 2'-O-methyladenosine-3'-phosphorothioate
  modified_base 2: mod_base = OTHER; note = 2'-fluoroguanosine-3'-phosphorothioate
  modified_base 3: mod_base = OTHER; note = 2'-O-methyladenosine-3'-phosphate
  modified_base 4: mod_base = OTHER; note = 2'-O-methyladenosine-3'-phosphate
  modified_base 5: mod_base = OTHER; note = 2'-O-methyladenosine-3'-phosphate
  modified_base 6: mod_base = OTHER; note = 2'-fluorouridine-3'-phosphate
  modified_base 7: mod_base = OTHER; note = 2'-O-methyluridine-3'-phosphate
  modified_base 8: mod_base = OTHER; note = 2'-fluorocytidine-3'-phosphate
  modified_base 9: mod_base = OTHER; note = 2'-fluoroadenosine-3'-phosphate
  modified_base 10: mod_base = OTHER; note = 2'-O-methylguanosine-3'-phosphate
  modified_base 11: mod_base = OTHER; note = 2'-O-methylguanosine-3'-phosphate
  modified_base 12: mod_base = OTHER; note = 2'-O-methyluridine-3'-phosphate
  modified_base 13: mod_base = OTHER; note = 2'-O-methylguanosine-3'-phosphate
  modified_base 14: mod_base = OTHER; note = 2'-fluorocytidine-3'-phosphate
  modified_base 15: mod_base = OTHER; note = 2'-O-methyluridine-3'-phosphate
  modified_base 16: mod_base = OTHER; note = 2'-fluorouridine-3'-phosphate
  modified_base 17: mod_base = OTHER; note = 2'-O-methylguanosine-3'-phosphate
  modified_base 18: mod_base = OTHER; note = 2'-O-methylcytidine-3'-phosphate
  modified_base 19: mod_base = OTHER; note = 2'-O-methyladenosine-3'-phosphate
  modified_base 20: mod_base = OTHER; note = 2'-O-methyluridine-3'-phosphate
  modified_base 21: mod_base = OTHER; note = 2'-O-methylcytidine-3'-phosphorothioate
  modified_base 22: mod_base = OTHER; note = 2'-O-methyluridine-3'-phosphorothioate
  modified_base 23: mod_base = OTHER; note = 2'-O-methyluridine-3'-phosphate
agaaattcaggtgcttgcatctt

SEQ ID NO: 1184 - RNA, 23 nt, synthetic construct
  source 1..23: mol_type = other RNA
  modified_base 1: mod_base = OTHER; note = 2'-O-methyladenosine-3'-phosphorothioate
  modified_base 2: mod_base = OTHER; note = 2'-fluoroadenosine-3'-phosphorothioate
  modified_base 3: mod_base = OTHER; note = 2'-O-methylguanosine-3'-phosphate
  modified_base 4: mod_base = OTHER; note = 2'-O-methyladenosine-3'-phosphate
  modified_base 5: mod_base = OTHER; note = 2'-O-methyladenosine-3'-phosphate
  modified_base 6: mod_base = OTHER; note = 2'-fluoroadenosine-3'-phosphate
  modified_base 7: mod_base = OTHER; note = 2'-O-methyluridine-3'-phosphate
  modified_base 8: mod_base = OTHER; note = 2'-fluorouridine-3'-phosphate
  modified_base 9: mod_base = OTHER; note = 2'-fluorocytidine-3'-phosphate
  modified_base 10: mod_base = OTHER; note = 2'-O-methyladenosine-3'-phosphate
  modified_base 11: mod_base = OTHER; note = 2'-O-methylguanosine-3'-phosphate
  modified_base 12: mod_base = OTHER; note = 2'-O-methylguanosine-3'-phosphate
  modified_base 13: mod_base = OTHER; note = 2'-O-methyluridine-3'-phosphate
  modified_base 14: mod_base = OTHER; note = 2'-fluoroguanosine-3'-phosphate
  modified_base 15: mod_base = OTHER; note = 2'-O-methylcytidine-3'-phosphate
  modified_base 16: mod_base = OTHER; note = 2'-fluorouridine-3'-phosphate
  modified_base 17: mod_base = OTHER; note = 2'-O-methyluridine-3'-phosphate
  modified_base 18: mod_base = OTHER; note = 2'-O-methylguanosine-3'-phosphate
  modified_base 19: mod_base = OTHER; note = 2'-O-methylcytidine-3'-phosphate
  modified_base 20: mod_base = OTHER; note = 2'-O-methyladenosine-3'-phosphate
  modified_base 21: mod_base = OTHER; note = 2'-O-methyluridine-3'-phosphorothioate
  modified_base 22: mod_base = OTHER; note = 2'-O-methylcytidine-3'-phosphorothioate
  modified_base 23: mod_base = OTHER; note = 2'-O-methyluridine-3'-phosphate
aagaaattcaggtgcttgcatct

SEQ ID NO: 1185 - RNA, 23 nt, synthetic construct
  source 1..23: mol_type = other RNA
  modified_base 1: mod_base = OTHER; note = 2'-O-methyladenosine-3'-phosphorothioate
  modified_base 2: mod_base = OTHER; note = 2'-fluorocytidine-3'-phosphorothioate
  modified_base 3: mod_base = OTHER; note = 2'-O-methyladenosine-3'-phosphate
  modified_base 4: mod_base = OTHER; note = 2'-O-methylguanosine-3'-phosphate
  modified_base 5: mod_base = OTHER; note = 2'-O-methyladenosine-3'-phosphate
  modified_base 6: mod_base = OTHER; note = 2'-fluoroadenosine-3'-phosphate
  modified_base 7: mod_base = OTHER; note = 2'-O-methyladenosine-3'-phosphate
  modified_base 8: mod_base = OTHER; note = 2'-fluorouridine-3'-phosphate
  modified_base 9: mod_base = OTHER; note = 2'-fluorouridine-3'-phosphate
  modified_base 10: mod_base = OTHER; note = 2'-O-methylcytidine-3'-phosphate
  modified_base 11: mod_base = OTHER; note = 2'-O-methyladenosine-3'-phosphate
  modified_base 12: mod_base = OTHER; note = 2'-O-methylguanosine-3'-phosphate
  modified_base 13: mod_base = OTHER; note = 2'-O-methylguanosine-3'-phosphate
  modified_base 14: mod_base = OTHER; note = 2'-fluorouridine-3'-phosphate
  modified_base 15: mod_base = OTHER; note = 2'-O-methylguanosine-3'-phosphate
  modified_base 16: mod_base = OTHER; note = 2'-fluorocytidine-3'-phosphate
  modified_base 17: mod_base = OTHER; note = 2'-O-methyluridine-3'-phosphate
  modified_base 18: mod_base = OTHER; note = 2'-O-methyluridine-3'-phosphate
  modified_base 19: mod_base = OTHER; note = 2'-O-methylguanosine-3'-phosphate
  modified_base 20: mod_base = OTHER; note = 2'-O-methylcytidine-3'-phosphate
  modified_base 21: mod_base = OTHER; note = 2'-O-methyladenosine-3'-phosphorothioate
  modified_base 22: mod_base = OTHER; note = 2'-O-methyluridine-3'-phosphorothioate
  modified_base 23: mod_base = OTHER; note = 2'-O-methylcytidine-3'-phosphate
acagaaattcaggtgcttgcatc

SEQ ID NO: 1186 - RNA, 23 nt, synthetic construct
  source 1..23: mol_type = other RNA
  modified_base 1: mod_base = OTHER; note = 2'-O-methyladenosine-3'-phosphorothioate
  modified_base 2: mod_base = OTHER; note = 2'-fluoroadenosine-3'-phosphorothioate
  modified_base 3: mod_base = OTHER; note = 2'-O-methylcytidine-3'-phosphate
  modified_base 4: mod_base = OTHER; note = 2'-O-methyladenosine-3'-phosphate
  modified_base 5: mod_base = OTHER; note = 2'-O-methylguanosine-3'-phosphate
  modified_base 6: mod_base = OTHER; note = 2'-fluoroadenosine-3'-phosphate
  modified_base 7: mod_base = OTHER; note = 2'-O-methyladenosine-3'-phosphate
  modified_base 8: mod_base = OTHER; note = 2'-fluoroadenosine-3'-phosphate
  modified_base 9: mod_base = OTHER; note = 2'-fluorouridine-3'-phosphate
  modified_base 10: mod_base = OTHER; note = 2'-O-methyluridine-3'-phosphate
  modified_base 11: mod_base = OTHER; note = 2'-O-methylcytidine-3'-phosphate
  modified_base 12: mod_base = OTHER; note = 2'-O-methyladenosine-3'-phosphate
  modified_base 13: mod_base = OTHER; note = 2'-O-methylguanosine-3'-phosphate
  modified_base 14: mod_base = OTHER; note = 2'-fluoroguanosine-3'-phosphate
  modified_base 15: mod_base = OTHER; note = 2'-O-methyluridine-3'-phosphate
  modified_base 16: mod_base = OTHER; note = 2'-fluoroguanosine-3'-phosphate
  modified_base 17: mod_base = OTHER; note = 2'-O-methylcytidine-3'-phosphate
  modified_base 18: mod_base = OTHER; note = 2'-O-methyluridine-3'-phosphate
  modified_base 19: mod_base = OTHER; note = 2'-O-methyluridine-3'-phosphate
  modified_base 20: mod_base = OTHER; note = 2'-O-methylguanosine-3'-phosphate
  modified_base 21: mod_base = OTHER; note = 2'-O-methylcytidine-3'-phosphorothioate
  modified_base 22: mod_base = OTHER; note = 2'-O-methyladenosine-3'-phosphorothioate
  modified_base 23: mod_base = OTHER; note = 2'-O-methyluridine-3'-phosphate
aacagaaattcaggtgcttgcat

SEQ ID NO: 1187 - RNA, 23 nt, synthetic construct
  source 1..23: mol_type = other RNA
  modified_base 1: mod_base = OTHER; note = 2'-O-methyladenosine-3'-phosphorothioate
  modified_base 2: mod_base = OTHER; note = 2'-fluoroadenosine-3'-phosphorothioate
  modified_base 3: mod_base = OTHER; note = 2'-O-methyladenosine-3'-phosphate
  modified_base 4: mod_base = OTHER; note = 2'-O-methylcytidine-3'-phosphate
  modified_base 5: mod_base = OTHER; note = 2'-O-methyladenosine-3'-phosphate
  modified_base 6: mod_base = OTHER; note = 2'-fluoroguanosine-3'-phosphate
  modified_base 7: mod_base = OTHER; note = 2'-O-methyladenosine-3'-phosphate
  modified_base 8: mod_base = OTHER; note = 2'-fluoroadenosine-3'-phosphate
  modified_base 9: mod_base = OTHER; note = 2'-fluoroadenosine-3'-phosphate
  modified_base 10: mod_base = OTHER; note = 2'-O-methyluridine-3'-phosphate
  modified_base 11: mod_base = OTHER; note = 2'-O-methyluridine-3'-phosphate
  modified_base 12: mod_base = OTHER; note = 2'-O-methylcytidine-3'-phosphate
  modified_base 13: mod_base = OTHER; note = 2'-O-methyladenosine-3'-phosphate
  modified_base 14: mod_base = OTHER; note = 2'-fluoroguanosine-3'-phosphate
  modified_base 15: mod_base = OTHER; note = 2'-O-methylguanosine-3'-phosphate
  modified_base 16: mod_base = OTHER; note = 2'-fluorouridine-3'-phosphate
  modified_base 17: mod_base = OTHER; note = 2'-O-methylguanosine-3'-phosphate
  modified_base 18: mod_base = OTHER; note = 2'-O-methylcytidine-3'-phosphate
  modified_base 19: mod_base = OTHER; note = 2'-O-methyluridine-3'-phosphate
  modified_base 20: mod_base = OTHER; note = 2'-O-methyluridine-3'-phosphate
  modified_base 21: mod_base = OTHER; note = 2'-O-methylguanosine-3'-phosphorothioate
  modified_base 22: mod_base = OTHER; note = 2'-O-methylcytidine-3'-phosphorothioate
  modified_base 23: mod_base = OTHER; note = 2'-O-methyladenosine-3'-phosphate
aaacagaaattcaggtgcttgca

SEQ ID NO: 1188 - RNA, 23 nt, synthetic construct
  source 1..23: mol_type = other RNA
  modified_base 1: mod_base = OTHER; note = 2'-O-methyladenosine-3'-phosphorothioate
  modified_base 2: mod_base = OTHER; note = 2'-fluoroadenosine-3'-phosphorothioate
  modified_base 3: mod_base = OTHER; note = 2'-O-methyladenosine-3'-phosphate
  modified_base 4: mod_base = OTHER; note = 2'-O-methyladenosine-3'-phosphate
  modified_base 5: mod_base = OTHER; note = 2'-O-methylcytidine-3'-phosphate
  modified_base 6: mod_base = OTHER; note = 2'-fluoroadenosine-3'-phosphate
  modified_base 7: mod_base = OTHER; note = 2'-O-methylguanosine-3'-phosphate
  modified_base 8: mod_base = OTHER; note = 2'-fluoroadenosine-3'-phosphate
  modified_base 9: mod_base = OTHER; note = 2'-fluoroadenosine-3'-phosphate
  modified_base 10: mod_base = OTHER; note = 2'-O-methyladenosine-3'-phosphate
  modified_base 11: mod_base = OTHER; note = 2'-O-methyluridine-3'-phosphate
  modified_base 12: mod_base = OTHER; note = 2'-O-methyluridine-3'-phosphate
  modified_base 13: mod_base = OTHER; note = 2'-O-methylcytidine-3'-phosphate
  modified_base 14: mod_base = OTHER; note = 2'-fluoroadenosine-3'-phosphate
  modified_base 15: mod_base = OTHER; note = 2'-O-methylguanosine-3'-phosphate
  modified_base 16: mod_base = OTHER; note = 2'-fluoroguanosine-3'-phosphate
  modified_base 17: mod_base = OTHER; note = 2'-O-methyluridine-3'-phosphate
  modified_base 18: mod_base = OTHER; note = 2'-O-methylguanosine-3'-phosphate
  modified_base 19: mod_base = OTHER; note = 2'-O-methylcytidine-3'-phosphate
  modified_base 20: mod_base = OTHER; note = 2'-O-methyluridine-3'-phosphate
  modified_base 21: mod_base = OTHER; note = 2'-O-methyluridine-3'-phosphorothioate
  modified_base 22: mod_base = OTHER; note = 2'-O-methylguanosine-3'-phosphorothioate
  modified_base 23: mod_base = OTHER; note = 2'-O-methylcytidine-3'-phosphate
aaaacagaaattcaggtgcttgc

SEQ ID NO: 1189 - RNA, 23 nt, synthetic construct
  source 1..23: mol_type = other RNA
  modified_base 1: mod_base = OTHER; note = 2'-O-methyladenosine-3'-phosphorothioate
  modified_base 2: mod_base = OTHER; note = 2'-fluorocytidine-3'-phosphorothioate
  modified_base 3: mod_base = OTHER; note = 2'-O-methyladenosine-3'-phosphate
  modified_base 4: mod_base = OTHER; note = 2'-O-methyladenosine-3'-phosphate
  modified_base 5: mod_base = OTHER; note = 2'-O-methyladenosine-3'-phosphate
  modified_base 6: mod_base = OTHER; note = 2'-fluorocytidine-3'-phosphate
  modified_base 7: mod_base = OTHER; note = 2'-O-methyladenosine-3'-phosphate
  modified_base 8: mod_base = OTHER; note = 2'-fluoroguanosine-3'-phosphate
  modified_base 9: mod_base = OTHER; note = 2'-fluoroadenosine-3'-phosphate
  modified_base 10: mod_base = OTHER; note = 2'-O-methyladenosine-3'-phosphate
  modified_base 11: mod_base = OTHER; note = 2'-O-methyladenosine-3'-phosphate
  modified_base 12: mod_base = OTHER; note = 2'-O-methyluridine-3'-phosphate
  modified_base 13: mod_base = OTHER; note = 2'-O-methyluridine-3'-phosphate
  modified_base 14: mod_base = OTHER; note = 2'-fluorocytidine-3'-phosphate
  modified_base 15: mod_base = OTHER; note = 2'-O-methyladenosine-3'-phosphate
  modified_base 16: mod_base = OTHER; note = 2'-fluoroguanosine-3'-phosphate
  modified_base 17: mod_base = OTHER; note = 2'-O-methylguanosine-3'-phosphate
  modified_base 18: mod_base = OTHER; note = 2'-O-methyluridine-3'-phosphate
  modified_base 19: mod_base = OTHER; note = 2'-O-methylguanosine-3'-phosphate
  modified_base 20: mod_base = OTHER; note = 2'-O-methylcytidine-3'-phosphate
  modified_base 21: mod_base = OTHER; note = 2'-O-methyluridine-3'-phosphorothioate
  modified_base 22: mod_base = OTHER; note = 2'-O-methyluridine-3'-phosphorothioate
  modified_base 23: mod_base = OTHER; note = 2'-O-methylguanosine-3'-phosphate
acaaacagaaattcaggtgcttg

SEQ ID NO: 1190 - RNA, 23 nt, synthetic construct
  source 1..23: mol_type = other RNA
  modified_base 1: mod_base = OTHER; note = 2'-O-methyladenosine-3'-phosphorothioate
  modified_base 2: mod_base = OTHER; note = 2'-fluorouridine -3'-phosphorothioate
  modified_base 3: mod_base = OTHER; note = 2'-O-methylcytidine-3'-phosphate
  modified_base 4: mod_base = OTHER; note = 2'-O-methyladenosine-3'-phosphate
  modified_base 5: mod_base = OTHER; note = 2'-O-methyladenosine-3'-phosphate
  modified_base 6: mod_base = OTHER; note = 2'-fluoroadenosine-3'-phosphate
  modified_base 7: mod_base = OTHER; note = 2'-O-methylcytidine-3'-phosphate
  modified_base 8: mod_base = OTHER; note = 2'-fluoroadenosine-3'-phosphate
  modified_base 9: mod_base = OTHER; note = 2'-fluoroguanosine-3'-phosphate
  modified_base 10: mod_base = OTHER; note = 2'-O-methyladenosine-3'-phosphate
  modified_base 11: mod_base = OTHER; note = 2'-O-methyladenosine-3'-phosphate
  modified_base 12: mod_base = OTHER; note = 2'-O-methyladenosine-3'-phosphate
  modified_base 13: mod_base = OTHER; note = 2'-O-methyluridine-3'-phosphate
  modified_base 14: mod_base = OTHER; note = 2'-fluorouridine-3'-phosphate
  modified_base 15: mod_base = OTHER; note = 2'-O-methylcytidine-3'-phosphate
  modified_base 16: mod_base = OTHER; note = 2'-fluoroadenosine-3'-phosphate
  modified_base 17: mod_base = OTHER; note = 2'-O-methylguanosine-3'-phosphate
  modified_base 18: mod_base = OTHER; note = 2'-O-methylguanosine-3'-phosphate
  modified_base 19: mod_base = OTHER; note = 2'-O-methyluridine-3'-phosphate
  modified_base 20: mod_base = OTHER; note = 2'-O-methylguanosine-3'-phosphate
  modified_base 21: mod_base = OTHER; note = 2'-O-methylcytidine-3'-phosphorothioate
  modified_base 22: mod_base = OTHER; note = 2'-O-methyluridine-3'-phosphorothioate
  modified_base 23: mod_base = OTHER; note = 2'-O-methyluridine-3'-phosphate
atcaaacagaaattcaggtgctt

SEQ ID NO: 1191 - RNA, 23 nt, synthetic construct
  source 1..23: mol_type = other RNA
  modified_base 1: mod_base = OTHER; note = 2'-O-methyladenosine-3'-phosphorothioate
  modified_base 2: mod_base = OTHER; note = 2'-fluorouridine -3'-phosphorothioate
  modified_base 3: mod_base = OTHER; note = 2'-O-methyluridine-3'-phosphate
  modified_base 4: mod_base = OTHER; note = 2'-O-methylcytidine-3'-phosphate
  modified_base 5: mod_base = OTHER; note = 2'-O-methyladenosine-3'-phosphate
  modified_base 6: mod_base = OTHER; note = 2'-fluoroadenosine-3'-phosphate
  modified_base 7: mod_base = OTHER; note = 2'-O-methyladenosine-3'-phosphate
  modified_base 8: mod_base = OTHER; note = 2'-fluorocytidine-3'-phosphate
  modified_base 9: mod_base = OTHER; note = 2'-fluoroadenosine-3'-phosphate
  modified_base 10: mod_base = OTHER; note = 2'-O-methylguanosine-3'-phosphate
  modified_base 11: mod_base = OTHER; note = 2'-O-methyladenosine-3'-phosphate
  modified_base 12: mod_base = OTHER; note = 2'-O-methyladenosine-3'-phosphate
  modified_base 13: mod_base = OTHER; note = 2'-O-methyladenosine-3'-phosphate
  modified_base 14: mod_base = OTHER; note = 2'-fluorouridine-3'-phosphate
  modified_base 15: mod_base = OTHER; note = 2'-O-methyluridine-3'-phosphate
  modified_base 16: mod_base = OTHER; note = 2'-fluorocytidine-3'-phosphate
  modified_base 17: mod_base = OTHER; note = 2'-O-methyladenosine-3'-phosphate
  modified_base 18: mod_base = OTHER; note = 2'-O-methylguanosine-3'-phosphate
  modified_base 19: mod_base = OTHER; note = 2'-O-methylguanosine-3'-phosphate
  modified_base 20: mod_base = OTHER; note = 2'-O-methyluridine-3'-phosphate
  modified_base 21: mod_base = OTHER; note = 2'-O-methylguanosine-3'-phosphorothioate
  modified_base 22: mod_base = OTHER; note = 2'-O-methylcytidine-3'-phosphorothioate
  modified_base 23: mod_base = OTHER; note = 2'-O-methyluridine-3'-phosphate
attcaaacagaaattcaggtgct

SEQ ID NO: 1192 - RNA, 23 nt, synthetic construct
  source 1..23: mol_type = other RNA
  modified_base 1: mod_base = OTHER; note = 2'-O-methyladenosine-3'-phosphorothioate
  modified_base 2: mod_base = OTHER; note = 2'-fluoroadenosine-3'-phosphorothioate
  modified_base 3: mod_base = OTHER; note = 2'-O-methyluridine-3'-phosphate
  modified_base 4: mod_base = OTHER; note = 2'-O-methyluridine-3'-phosphate
  modified_base 5: mod_base = OTHER; note = 2'-O-methylcytidine-3'-phosphate
  modified_base 6: mod_base = OTHER; note = 2'-fluoroadenosine-3'-phosphate
  modified_base 7: mod_base = OTHER; note = 2'-O-methyladenosine-3'-phosphate
  modified_base 8: mod_base = OTHER; note = 2'-fluoroadenosine-3'-phosphate
  modified_base 9: mod_base = OTHER; note = 2'-fluorocytidine-3'-phosphate
  modified_base 10: mod_base = OTHER; note = 2'-O-methyladenosine-3'-phosphate
  modified_base 11: mod_base = OTHER; note = 2'-O-methylguanosine-3'-phosphate
  modified_base 12: mod_base = OTHER; note = 2'-O-methyladenosine-3'-phosphate
  modified_base 13: mod_base = OTHER; note = 2'-O-methyladenosine-3'-phosphate
  modified_base 14: mod_base = OTHER; note = 2'-fluoroadenosine-3'-phosphate
  modified_base 15: mod_base = OTHER; note = 2'-O-methyluridine-3'-phosphate
  modified_base 16: mod_base = OTHER; note = 2'-fluorouridine-3'-phosphate
  modified_base 17: mod_base = OTHER; note = 2'-O-methylcytidine-3'-phosphate
  modified_base 18: mod_base = OTHER; note = 2'-O-methyladenosine-3'-phosphate
  modified_base 19: mod_base = OTHER; note = 2'-O-methylguanosine-3'-phosphate
  modified_base 20: mod_base = OTHER; note = 2'-O-methylguanosine-3'-phosphate
  modified_base 21: mod_base = OTHER; note = 2'-O-methyluridine-3'-phosphorothioate
  modified_base 22: mod_base = OTHER; note = 2'-O-methylguanosine-3'-phosphorothioate
  modified_base 23: mod_base = OTHER; note = 2'-O-methylcytidine-3'-phosphate
aattcaaacagaaattcaggtgc

SEQ ID NO: 1193 - RNA, 23 nt, synthetic construct
  source 1..23: mol_type = other RNA
  modified_base 1: mod_base = OTHER; note = 2'-O-methyladenosine-3'-phosphorothioate
  modified_base 2: mod_base = OTHER; note = 2'-fluorocytidine-3'-phosphorothioate
  modified_base 3: mod_base = OTHER; note = 2'-O-methyladenosine-3'-phosphate
  modified_base 4: mod_base = OTHER; note = 2'-O-methyluridine-3'-phosphate
  modified_base 5: mod_base = OTHER; note = 2'-O-methyluridine-3'-phosphate
  modified_base 6: mod_base = OTHER; note = 2'-fluorocytidine-3'-phosphate
  modified_base 7: mod_base = OTHER; note = 2'-O-methyladenosine-3'-phosphate
  modified_base 8: mod_base = OTHER; note = 2'-fluoroadenosine-3'-phosphate
  modified_base 9: mod_base = OTHER; note = 2'-fluoroadenosine-3'-phosphate
  modified_base 10: mod_base = OTHER; note = 2'-O-methylcytidine-3'-phosphate
  modified_base 11: mod_base = OTHER; note = 2'-O-methyladenosine-3'-phosphate
  modified_base 12: mod_base = OTHER; note = 2'-O-methylguanosine-3'-phosphate
  modified_base 13: mod_base = OTHER; note = 2'-O-methyladenosine-3'-phosphate
  modified_base 14: mod_base = OTHER; note = 2'-fluoroadenosine-3'-phosphate
  modified_base 15: mod_base = OTHER; note = 2'-O-methyladenosine-3'-phosphate
  modified_base 16: mod_base = OTHER; note = 2'-fluorouridine-3'-phosphate
  modified_base 17: mod_base = OTHER; note = 2'-O-methyluridine-3'-phosphate
  modified_base 18: mod_base = OTHER; note = 2'-O-methylcytidine-3'-phosphate
  modified_base 19: mod_base = OTHER; note = 2'-O-methyladenosine-3'-phosphate
  modified_base 20: mod_base = OTHER; note = 2'-O-methylguanosine-3'-phosphate
  modified_base 21: mod_base = OTHER; note = 2'-O-methylguanosine-3'-phosphorothioate
  modified_base 22: mod_base = OTHER; note = 2'-O-methyluridine-3'-phosphorothioate
  modified_base 23: mod_base = OTHER; note = 2'-O-methylguanosine-3'-phosphate
acattcaaacagaaattcaggtg

SEQ ID NO: 1194 - RNA, 23 nt, synthetic construct
  source 1..23: mol_type = other RNA
  modified_base 1: mod_base = OTHER; note = 2'-O-methyladenosine-3'-phosphorothioate
  modified_base 2: mod_base = OTHER; note = 2'-fluorocytidine-3'-phosphorothioate
  modified_base 3: mod_base = OTHER; note = 2'-O-methylguanosine-3'-phosphate
  modified_base 4: mod_base = OTHER; note = 2'-O-methylcytidine-3'-phosphate
  modified_base 5: mod_base = OTHER; note = 2'-O-methyladenosine-3'-phosphate
  modified_base 6: mod_base = OTHER; note = 2'-fluorouridine-3'-phosphate
  modified_base 7: mod_base = OTHER; note = 2'-O-methyluridine-3'-phosphate
  modified_base 8: mod_base = OTHER; note = 2'-fluorocytidine-3'-phosphate
  modified_base 9: mod_base = OTHER; note = 2'-fluoroadenosine-3'-phosphate
  modified_base 10: mod_base = OTHER; note = 2'-O-methyladenosine-3'-phosphate
  modified_base 11: mod_base = OTHER; note = 2'-O-methyladenosine-3'-phosphate
  modified_base 12: mod_base = OTHER; note = 2'-O-methylcytidine-3'-phosphate
  modified_base 13: mod_base = OTHER; note = 2'-O-methyladenosine-3'-phosphate
  modified_base 14: mod_base = OTHER; note = 2'-fluoroguanosine-3'-phosphate
  modified_base 15: mod_base = OTHER; note = 2'-O-methyladenosine-3'-phosphate
  modified_base 16: mod_base = OTHER; note = 2'-fluoroadenosine-3'-phosphate
  modified_base 17: mod_base = OTHER; note = 2'-O-methyladenosine-3'-phosphate
  modified_base 18: mod_base = OTHER; note = 2'-O-methyluridine-3'-phosphate
  modified_base 19: mod_base = OTHER; note = 2'-O-methyluridine-3'-phosphate
  modified_base 20: mod_base = OTHER; note = 2'-O-methylcytidine-3'-phosphate
  modified_base 21: mod_base = OTHER; note = 2'-O-methyladenosine-3'-phosphorothioate
  modified_base 22: mod_base = OTHER; note = 2'-O-methylguanosine-3'-phosphorothioate
  modified_base 23: mod_base = OTHER; note = 2'-O-methylguanosine-3'-phosphate
acgcattcaaacagaaattcagg

SEQ ID NO: 1195 - RNA, 23 nt, synthetic construct
  source 1..23: mol_type = other RNA
  modified_base 1: mod_base = OTHER; note = 2'-O-methyladenosine-3'-phosphorothioate
  modified_base 2: mod_base = OTHER; note = 2'-fluorocytidine-3'-phosphorothioate
  modified_base 3: mod_base = OTHER; note = 2'-O-methylcytidine-3'-phosphate
  modified_base 4: mod_base = OTHER; note = 2'-O-methylguanosine-3'-phosphate
  modified_base 5: mod_base = OTHER; note = 2'-O-methylcytidine-3'-phosphate
  modified_base 6: mod_base = OTHER; note = 2'-fluoroadenosine-3'-phosphate
  modified_base 7: mod_base = OTHER; note = 2'-O-methyluridine-3'-phosphate
  modified_base 8: mod_base = OTHER; note = 2'-fluorouridine-3'-phosphate
  modified_base 9: mod_base = OTHER; note = 2'-fluorocytidine-3'-phosphate
  modified_base 10: mod_base = OTHER; note = 2'-O-methyladenosine-3'-phosphate
  modified_base 11: mod_base = OTHER; note = 2'-O-methyladenosine-3'-phosphate
  modified_base 12: mod_base = OTHER; note = 2'-O-methyladenosine-3'-phosphate
  modified_base 13: mod_base = OTHER; note = 2'-O-methylcytidine-3'-phosphate
  modified_base 14: mod_base = OTHER; note = 2'-fluoroadenosine-3'-phosphate
  modified_base 15: mod_base = OTHER; note = 2'-O-methylguanosine-3'-phosphate
  modified_base 16: mod_base = OTHER; note = 2'-fluoroadenosine-3'-phosphate
  modified_base 17: mod_base = OTHER; note = 2'-O-methyladenosine-3'-phosphate
  modified_base 18: mod_base = OTHER; note = 2'-O-methyladenosine-3'-phosphate
  modified_base 19: mod_base = OTHER; note = 2'-O-methyluridine-3'-phosphate
  modified_base 20: mod_base = OTHER; note = 2'-O-methyluridine-3'-phosphate
  modified_base 21: mod_base = OTHER; note = 2'-O-methylcytidine-3'-phosphorothioate
  modified_base 22: mod_base = OTHER; note = 2'-O-methyladenosine-3'-phosphorothioate
  modified_base 23: mod_base = OTHER; note = 2'-O-methylguanosine-3'-phosphate
accgcattcaaacagaaattcag

SEQ ID NO: 1196 - RNA, 23 nt, synthetic construct
  source 1..23: mol_type = other RNA
  modified_base 1: mod_base = OTHER; note = 2'-O-methyladenosine-3'-phosphorothioate
  modified_base 2: mod_base = OTHER; note = 2'-fluorouridine -3'-phosphorothioate
  modified_base 3: mod_base = OTHER; note = 2'-O-methylcytidine-3'-phosphate
  modified_base 4: mod_base = OTHER; note = 2'-O-methylcytidine-3'-phosphate
  modified_base 5: mod_base = OTHER; note = 2'-O-methylguanosine-3'-phosphate
  modified_base 6: mod_base = OTHER; note = 2'-fluorocytidine-3'-phosphate
  modified_base 7: mod_base = OTHER; note = 2'-O-methyladenosine-3'-phosphate
  modified_base 8: mod_base = OTHER; note = 2'-fluorouridine-3'-phosphate
  modified_base 9: mod_base = OTHER; note = 2'-fluorouridine-3'-phosphate
  modified_base 10: mod_base = OTHER; note = 2'-O-methylcytidine-3'-phosphate
  modified_base 11: mod_base = OTHER; note = 2'-O-methyladenosine-3'-phosphate
  modified_base 12: mod_base = OTHER; note = 2'-O-methyladenosine-3'-phosphate
  modified_base 13: mod_base = OTHER; note = 2'-O-methyladenosine-3'-phosphate
  modified_base 14: mod_base = OTHER; note = 2'-fluorocytidine-3'-phosphate
  modified_base 15: mod_base = OTHER; note = 2'-O-methyladenosine-3'-phosphate
  modified_base 16: mod_base = OTHER; note = 2'-fluoroguanosine-3'-phosphate
  modified_base 17: mod_base = OTHER; note = 2'-O-methyladenosine-3'-phosphate
  modified_base 18: mod_base = OTHER; note = 2'-O-methyladenosine-3'-phosphate
  modified_base 19: mod_base = OTHER; note = 2'-O-methyladenosine-3'-phosphate
  modified_base 20: mod_base = OTHER; note = 2'-O-methyluridine-3'-phosphate
  modified_base 21: mod_base = OTHER; note = 2'-O-methyluridine-3'-phosphorothioate
  modified_base 22: mod_base = OTHER; note = 2'-O-methylcytidine-3'-phosphorothioate
  modified_base 23: mod_base = OTHER; note = 2'-O-methyladenosine-3'-phosphate
atccgcattcaaacagaaattca

SEQ ID NO: 1197 - RNA, 23 nt, synthetic construct
  source 1..23: mol_type = other RNA
  modified_base 1: mod_base = OTHER; note = 2'-O-methyladenosine-3'-phosphorothioate
  modified_base 2: mod_base = OTHER; note = 2'-fluoroadenosine-3'-phosphorothioate
  modified_base 3: mod_base = OTHER; note = 2'-O-methylguanosine-3'-phosphate
  modified_base 4: mod_base = OTHER; note = 2'-O-methylcytidine-3'-phosphate
  modified_base 5: mod_base = OTHER; note = 2'-O-methyluridine-3'-phosphate
  modified_base 6: mod_base = OTHER; note = 2'-fluoroadenosine-3'-phosphate
  modified_base 7: mod_base = OTHER; note = 2'-O-methyluridine-3'-phosphate
  modified_base 8: mod_base = OTHER; note = 2'-fluoroguanosine-3'-phosphate
  modified_base 9: mod_base = OTHER; note = 2'-fluoroguanosine-3'-phosphate
  modified_base 10: mod_base = OTHER; note = 2'-O-methyluridine-3'-phosphate
  modified_base 11: mod_base = OTHER; note = 2'-O-methyluridine-3'-phosphate
  modified_base 12: mod_base = OTHER; note = 2'-O-methylcytidine-3'-phosphate
  modified_base 13: mod_base = OTHER; note = 2'-O-methylcytidine-3'-phosphate
  modified_base 14: mod_base = OTHER; note = 2'-fluoroguanosine-3'-phosphate
  modified_base 15: mod_base = OTHER; note = 2'-O-methylcytidine-3'-phosphate
  modified_base 16: mod_base = OTHER; note = 2'-fluoroadenosine-3'-phosphate
  modified_base 17: mod_base = OTHER; note = 2'-O-methyluridine-3'-phosphate
  modified_base 18: mod_base = OTHER; note = 2'-O-methyluridine-3'-phosphate
  modified_base 19: mod_base = OTHER; note = 2'-O-methylcytidine-3'-phosphate
  modified_base 20: mod_base = OTHER; note = 2'-O-methyladenosine-3'-phosphate
  modified_base 21: mod_base = OTHER; note = 2'-O-methyladenosine-3'-phosphorothioate
  modified_base 22: mod_base = OTHER; note = 2'-O-methyladenosine-3'-phosphorothioate
  modified_base 23: mod_base = OTHER; note = 2'-O-methylcytidine-3'-phosphate
aagctatggttccgcattcaaac

SEQ ID NO: 1198 - RNA, 23 nt, synthetic construct
  source 1..23: mol_type = other RNA
  modified_base 1: mod_base = OTHER; note = 2'-O-methyladenosine-3'-phosphorothioate
  modified_base 2: mod_base = OTHER; note = 2'-fluorocytidine-3'-phosphorothioate
  modified_base 3: mod_base = OTHER; note = 2'-O-methyladenosine-3'-phosphate
  modified_base 4: mod_base = OTHER; note = 2'-O-methylguanosine-3'-phosphate
  modified_base 5: mod_base = OTHER; note = 2'-O-methylcytidine-3'-phosphate
  modified_base 6: mod_base = OTHER; note = 2'-fluorouridine-3'-phosphate
  modified_base 7: mod_base = OTHER; note = 2'-O-methyladenosine-3'-phosphate
  modified_base 8: mod_base = OTHER; note = 2'-fluorouridine-3'-phosphate
  modified_base 9: mod_base = OTHER; note = 2'-fluoroguanosine-3'-phosphate
  modified_base 10: mod_base = OTHER; note = 2'-O-methylguanosine-3'-phosphate
  modified_base 11: mod_base = OTHER; note = 2'-O-methyluridine-3'-phosphate
  modified_base 12: mod_base = OTHER; note = 2'-O-methyluridine-3'-phosphate
  modified_base 13: mod_base = OTHER; note = 2'-O-methylcytidine-3'-phosphate
  modified_base 14: mod_base = OTHER; note = 2'-fluorocytidine-3'-phosphate
  modified_base 15: mod_base = OTHER; note = 2'-O-methylguanosine-3'-phosphate
  modified_base 16: mod_base = OTHER; note = 2'-fluorocytidine-3'-phosphate
  modified_base 17: mod_base = OTHER; note = 2'-O-methyladenosine-3'-phosphate
  modified_base 18: mod_base = OTHER; note = 2'-O-methyluridine-3'-phosphate
  modified_base 19: mod_base = OTHER; note = 2'-O-methyluridine-3'-phosphate
  modified_base 20: mod_base = OTHER; note = 2'-O-methylcytidine-3'-phosphate
  modified_base 21: mod_base = OTHER; note = 2'-O-methyladenosine-3'-phosphorothioate
  modified_base 22: mod_base = OTHER; note = 2'-O-methyladenosine-3'-phosphorothioate
  modified_base 23: mod_base = OTHER; note = 2'-O-methyladenosine-3'-phosphate
acagctatggttccgcattcaaa

SEQ ID NO: 1199 - RNA, 23 nt, synthetic construct
  source 1..23: mol_type = other RNA
  modified_base 1: mod_base = OTHER; note = 2'-O-methyladenosine-3'-phosphorothioate
  modified_base 2: mod_base = OTHER; note = 2'-fluorocytidine-3'-phosphorothioate
  modified_base 3: mod_base = OTHER; note = 2'-O-methylcytidine-3'-phosphate
  modified_base 4: mod_base = OTHER; note = 2'-O-methyladenosine-3'-phosphate
  modified_base 5: mod_base = OTHER; note = 2'-O-methylguanosine-3'-phosphate
  modified_base 6: mod_base = OTHER; note = 2'-fluorocytidine-3'-phosphate
  modified_base 7: mod_base = OTHER; note = 2'-O-methyluridine-3'-phosphate
  modified_base 8: mod_base = OTHER; note = 2'-fluoroadenosine-3'-phosphate
  modified_base 9: mod_base = OTHER; note = 2'-fluorouridine-3'-phosphate
  modified_base 10: mod_base = OTHER; note = 2'-O-methylguanosine-3'-phosphate
  modified_base 11: mod_base = OTHER; note = 2'-O-methylguanosine-3'-phosphate
  modified_base 12: mod_base = OTHER; note = 2'-O-methyluridine-3'-phosphate
  modified_base 13: mod_base = OTHER; note = 2'-O-methyluridine-3'-phosphate
  modified_base 14: mod_base = OTHER; note = 2'-fluorocytidine-3'-phosphate
  modified_base 15: mod_base = OTHER; note = 2'-O-methylcytidine-3'-phosphate
  modified_base 16: mod_base = OTHER; note = 2'-fluoroguanosine-3'-phosphate
  modified_base 17: mod_base = OTHER; note = 2'-O-methylcytidine-3'-phosphate
  modified_base 18: mod_base = OTHER; note = 2'-O-methyladenosine-3'-phosphate
  modified_base 19: mod_base = OTHER; note = 2'-O-methyluridine-3'-phosphate
  modified_base 20: mod_base = OTHER; note = 2'-O-methyluridine-3'-phosphate
  modified_base 21: mod_base = OTHER; note = 2'-O-methylcytidine-3'-phosphorothioate
  modified_base 22: mod_base = OTHER; note = 2'-O-methyladenosine-3'-phosphorothioate
  modified_base 23: mod_base = OTHER; note = 2'-O-methyladenosine-3'-phosphate
accagctatggttccgcattcaa

SEQ ID NO: 1200 - RNA, 23 nt, synthetic construct
  source 1..23: mol_type = other RNA
  modified_base 1: mod_base = OTHER; note = 2'-O-methyladenosine-3'-phosphorothioate
  modified_base 2: mod_base = OTHER; note = 2'-fluoroadenosine-3'-phosphorothioate
  modified_base 3: mod_base = OTHER; note = 2'-O-methyladenosine-3'-phosphate
  modified_base 4: mod_base = OTHER; note = 2'-O-methyluridine-3'-phosphate
  modified_base 5: mod_base = OTHER; note = 2'-O-methyladenosine-3'-phosphate
  modified_base 6: mod_base = OTHER; note = 2'-fluoroadenosine-3'-phosphate
  modified_base 7: mod_base = OTHER; note = 2'-O-methylcytidine-3'-phosphate
  modified_base 8: mod_base = OTHER; note = 2'-fluorocytidine-3'-phosphate
  modified_base 9: mod_base = OTHER; note = 2'-fluoroadenosine-3'-phosphate
  modified_base 10: mod_base = OTHER; note = 2'-O-methylguanosine-3'-phosphate
  modified_base 11: mod_base = OTHER; note = 2'-O-methylcytidine-3'-phosphate
  modified_base 12: mod_base = OTHER; note = 2'-O-methyluridine-3'-phosphate
  modified_base 13: mod_base = OTHER; note = 2'-O-methyladenosine-3'-phosphate
  modified_base 14: mod_base = OTHER; note = 2'-fluorouridine-3'-phosphate
  modified_base 15: mod_base = OTHER; note = 2'-O-methylguanosine-3'-phosphate
  modified_base 16: mod_base = OTHER; note = 2'-fluoroguanosine-3'-phosphate
  modified_base 17: mod_base = OTHER; note = 2'-O-methyluridine-3'-phosphate
  modified_base 18: mod_base = OTHER; note = 2'-O-methyluridine-3'-phosphate
  modified_base 19: mod_base = OTHER; note = 2'-O-methylcytidine-3'-phosphate
  modified_base 20: mod_base = OTHER; note = 2'-O-methylcytidine-3'-phosphate
  modified_base 21: mod_base = OTHER; note = 2'-O-methylguanosine-3'-phosphorothioate
  modified_base 22: mod_base = OTHER; note = 2'-O-methylcytidine-3'-phosphorothioate
  modified_base 23: mod_base = OTHER; note = 2'-O-methyladenosine-3'-phosphate
aaataaccagctatggttccgca

SEQ ID NO: 1201 - RNA, 23 nt, synthetic construct
  source 1..23: mol_type = other RNA
  modified_base 1: mod_base = OTHER; note = 2'-O-methyladenosine-3'-phosphorothioate
  modified_base 2: mod_base = OTHER; note = 2'-fluoroadenosine-3'-phosphorothioate
  modified_base 3: mod_base = OTHER; note = 2'-O-methyladenosine-3'-phosphate
  modified_base 4: mod_base = OTHER; note = 2'-O-methyladenosine-3'-phosphate
  modified_base 5: mod_base = OTHER; note = 2'-O-methyluridine-3'-phosphate
  modified_base 6: mod_base = OTHER; note = 2'-fluoroadenosine-3'-phosphate
  modified_base 7: mod_base = OTHER; note = 2'-O-methyladenosine-3'-phosphate
  modified_base 8: mod_base = OTHER; note = 2'-fluorocytidine-3'-phosphate
  modified_base 9: mod_base = OTHER; note = 2'-fluorocytidine-3'-phosphate
  modified_base 10: mod_base = OTHER; note = 2'-O-methyladenosine-3'-phosphate
  modified_base 11: mod_base = OTHER; note = 2'-O-methylguanosine-3'-phosphate
  modified_base 12: mod_base = OTHER; note = 2'-O-methylcytidine-3'-phosphate
  modified_base 13: mod_base = OTHER; note = 2'-O-methyluridine-3'-phosphate
  modified_base 14: mod_base = OTHER; note = 2'-fluoroadenosine-3'-phosphate
  modified_base 15: mod_base = OTHER; note = 2'-O-methyluridine-3'-phosphate
  modified_base 16: mod_base = OTHER; note = 2'-fluoroguanosine-3'-phosphate
  modified_base 17: mod_base = OTHER; note = 2'-O-methylguanosine-3'-phosphate
  modified_base 18: mod_base = OTHER; note = 2'-O-methyluridine-3'-phosphate
  modified_base 19: mod_base = OTHER; note = 2'-O-methyluridine-3'-phosphate
  modified_base 20: mod_base = OTHER; note = 2'-O-methylcytidine-3'-phosphate
  modified_base 21: mod_base = OTHER; note = 2'-O-methylcytidine-3'-phosphorothioate
  modified_base 22: mod_base = OTHER; note = 2'-O-methylguanosine-3'-phosphorothioate
  modified_base 23: mod_base = OTHER; note = 2'-O-methylcytidine-3'-phosphate
aaaataaccagctatggttccgc

SEQ ID NO: 1202 - RNA, 23 nt, synthetic construct
  source 1..23: mol_type = other RNA
  modified_base 1: mod_base = OTHER; note = 2'-O-methyladenosine-3'-phosphorothioate
  modified_base 2: mod_base = OTHER; note = 2'-fluoroguanosine-3'-phosphorothioate
  modified_base 3: mod_base = OTHER; note = 2'-O-methyladenosine-3'-phosphate
  modified_base 4: mod_base = OTHER; note = 2'-O-methyladenosine-3'-phosphate
  modified_base 5: mod_base = OTHER; note = 2'-O-methyladenosine-3'-phosphate
  modified_base 6: mod_base = OTHER; note = 2'-fluorouridine-3'-phosphate
  modified_base 7: mod_base = OTHER; note = 2'-O-methyladenosine-3'-phosphate
  modified_base 8: mod_base = OTHER; note = 2'-fluoroadenosine-3'-phosphate
  modified_base 9: mod_base = OTHER; note = 2'-fluorocytidine-3'-phosphate
  modified_base 10: mod_base = OTHER; note = 2'-O-methylcytidine-3'-phosphate
  modified_base 11: mod_base = OTHER; note = 2'-O-methyladenosine-3'-phosphate
  modified_base 12: mod_base = OTHER; note = 2'-O-methylguanosine-3'-phosphate
  modified_base 13: mod_base = OTHER; note = 2'-O-methylcytidine-3'-phosphate
  modified_base 14: mod_base = OTHER; note = 2'-fluorouridine-3'-phosphate
  modified_base 15: mod_base = OTHER; note = 2'-O-methyladenosine-3'-phosphate
  modified_base 16: mod_base = OTHER; note = 2'-fluorouridine-3'-phosphate
  modified_base 17: mod_base = OTHER; note = 2'-O-methylguanosine-3'-phosphate
  modified_base 18: mod_base = OTHER; note = 2'-O-methylguanosine-3'-phosphate
  modified_base 19: mod_base = OTHER; note = 2'-O-methyluridine-3'-phosphate
  modified_base 20: mod_base = OTHER; note = 2'-O-methyluridine-3'-phosphate
  modified_base 21: mod_base = OTHER; note = 2'-O-methylcytidine-3'-phosphorothioate
  modified_base 22: mod_base = OTHER; note = 2'-O-methylcytidine-3'-phosphorothioate
  modified_base 23: mod_base = OTHER; note = 2'-O-methylguanosine-3'-phosphate
agaaataaccagctatggttccg

SEQ ID NO: 1203 - RNA, 23 nt, synthetic construct
  source 1..23: mol_type = other RNA
  modified_base 1: mod_base = OTHER; note = 2'-O-methyladenosine-3'-phosphorothioate
  modified_base 2: mod_base = OTHER; note = 2'-fluoroadenosine-3'-phosphorothioate
  modified_base 3: mod_base = OTHER; note = 2'-O-methylguanosine-3'-phosphate
  modified_base 4: mod_base = OTHER; note = 2'-O-methyladenosine-3'-phosphate
  modified_base 5: mod_base = OTHER; note = 2'-O-methyladenosine-3'-phosphate
  modified_base 6: mod_base = OTHER; note = 2'-fluoroadenosine-3'-phosphate
  modified_base 7: mod_base = OTHER; note = 2'-O-methyluridine-3'-phosphate
  modified_base 8: mod_base = OTHER; note = 2'-fluoroadenosine-3'-phosphate
  modified_base 9: mod_base = OTHER; note = 2'-fluoroadenosine-3'-phosphate
  modified_base 10: mod_base = OTHER; note = 2'-O-methylcytidine-3'-phosphate
  modified_base 11: mod_base = OTHER; note = 2'-O-methylcytidine-3'-phosphate
  modified_base 12: mod_base = OTHER; note = 2'-O-methyladenosine-3'-phosphate
  modified_base 13: mod_base = OTHER; note = 2'-O-methylguanosine-3'-phosphate
  modified_base 14: mod_base = OTHER; note = 2'-fluorocytidine-3'-phosphate
  modified_base 15: mod_base = OTHER; note = 2'-O-methyluridine-3'-phosphate
  modified_base 16: mod_base = OTHER; note = 2'-fluoroadenosine-3'-phosphate
  modified_base 17: mod_base = OTHER; note = 2'-O-methyluridine-3'-phosphate
  modified_base 18: mod_base = OTHER; note = 2'-O-methylguanosine-3'-phosphate
  modified_base 19: mod_base = OTHER; note = 2'-O-methylguanosine-3'-phosphate
  modified_base 20: mod_base = OTHER; note = 2'-O-methyluridine-3'-phosphate
  modified_base 21: mod_base = OTHER; note = 2'-O-methyluridine-3'-phosphorothioate
  modified_base 22: mod_base = OTHER; note = 2'-O-methylcytidine-3'-phosphorothioate
  modified_base 23: mod_base = OTHER; note = 2'-O-methylcytidine-3'-phosphate
aagaaataaccagctatggttcc

SEQ ID NO: 1204 - RNA, 23 nt, synthetic construct
  source 1..23: mol_type = other RNA
  modified_base 1: mod_base = OTHER; note = 2'-O-methyladenosine-3'-phosphorothioate
  modified_base 2: mod_base = OTHER; note = 2'-fluoroguanosine-3'-phosphorothioate
  modified_base 3: mod_base = OTHER; note = 2'-O-methyladenosine-3'-phosphate
  modified_base 4: mod_base = OTHER; note = 2'-O-methylguanosine-3'-phosphate
  modified_base 5: mod_base = OTHER; note = 2'-O-methyladenosine-3'-phosphate
  modified_base 6: mod_base = OTHER; note = 2'-fluoroadenosine-3'-phosphate
  modified_base 7: mod_base = OTHER; note = 2'-O-methyladenosine-3'-phosphate
  modified_base 8: mod_base = OTHER; note = 2'-fluorouridine-3'-phosphate
  modified_base 9: mod_base = OTHER; note = 2'-fluoroadenosine-3'-phosphate
  modified_base 10: mod_base = OTHER; note = 2'-O-methyladenosine-3'-phosphate
  modified_base 11: mod_base = OTHER; note = 2'-O-methylcytidine-3'-phosphate
  modified_base 12: mod_base = OTHER; note = 2'-O-methylcytidine-3'-phosphate
  modified_base 13: mod_base = OTHER; note = 2'-O-methyladenosine-3'-phosphate
  modified_base 14: mod_base = OTHER; note = 2'-fluoroguanosine-3'-phosphate
  modified_base 15: mod_base = OTHER; note = 2'-O-methylcytidine-3'-phosphate
  modified_base 16: mod_base = OTHER; note = 2'-fluorouridine-3'-phosphate
  modified_base 17: mod_base = OTHER; note = 2'-O-methyladenosine-3'-phosphate
  modified_base 18: mod_base = OTHER; note = 2'-O-methyluridine-3'-phosphate
  modified_base 19: mod_base = OTHER; note = 2'-O-methylguanosine-3'-phosphate
  modified_base 20: mod_base = OTHER; note = 2'-O-methylguanosine-3'-phosphate
  modified_base 21: mod_base = OTHER; note = 2'-O-methyluridine-3'-phosphorothioate
  modified_base 22: mod_base = OTHER; note = 2'-O-methyluridine-3'-phosphorothioate
  modified_base 23: mod_base = OTHER; note = 2'-O-methylcytidine-3'-phosphate
agagaaataaccagctatggttc

SEQ ID NO: 1205 - RNA, 23 nt, synthetic construct
  source 1..23: mol_type = other RNA
  modified_base 1: mod_base = OTHER; note = 2'-O-methyladenosine-3'-phosphorothioate
  modified_base 2: mod_base = OTHER; note = 2'-fluoroguanosine-3'-phosphorothioate
  modified_base 3: mod_base = OTHER; note = 2'-O-methylguanosine-3'-phosphate
  modified_base 4: mod_base = OTHER; note = 2'-O-methyladenosine-3'-phosphate
  modified_base 5: mod_base = OTHER; note = 2'-O-methylguanosine-3'-phosphate
  modified_base 6: mod_base = OTHER; note = 2'-fluoroadenosine-3'-phosphate
  modified_base 7: mod_base = OTHER; note = 2'-O-methyladenosine-3'-phosphate
  modified_base 8: mod_base = OTHER; note = 2'-fluoroadenosine-3'-phosphate
  modified_base 9: mod_base = OTHER; note = 2'-fluorouridine-3'-phosphate
  modified_base 10: mod_base = OTHER; note = 2'-O-methyladenosine-3'-phosphate
  modified_base 11: mod_base = OTHER; note = 2'-O-methyladenosine-3'-phosphate
  modified_base 12: mod_base = OTHER; note = 2'-O-methylcytidine-3'-phosphate
  modified_base 13: mod_base = OTHER; note = 2'-O-methylcytidine-3'-phosphate
  modified_base 14: mod_base = OTHER; note = 2'-fluoroadenosine-3'-phosphate
  modified_base 15: mod_base = OTHER; note = 2'-O-methylguanosine-3'-phosphate
  modified_base 16: mod_base = OTHER; note = 2'-fluorocytidine-3'-phosphate
  modified_base 17: mod_base = OTHER; note = 2'-O-methyluridine-3'-phosphate
  modified_base 18: mod_base = OTHER; note = 2'-O-methyladenosine-3'-phosphate
  modified_base 19: mod_base = OTHER; note = 2'-O-methyluridine-3'-phosphate
  modified_base 20: mod_base = OTHER; note = 2'-O-methylguanosine-3'-phosphate
  modified_base 21: mod_base = OTHER; note = 2'-O-methylguanosine-3'-phosphorothioate
  modified_base 22: mod_base = OTHER; note = 2'-O-methyluridine-3'-phosphorothioate
  modified_base 23: mod_base = OTHER; note = 2'-O-methyluridine-3'-phosphate
aggagaaataaccagctatggtt

SEQ ID NO: 1206 - RNA, 23 nt, synthetic construct
  source 1..23: mol_type = other RNA
  modified_base 1: mod_base = OTHER; note = 2'-O-methyladenosine-3'-phosphorothioate
  modified_base 2: mod_base = OTHER; note = 2'-fluoroguanosine-3'-phosphorothioate
  modified_base 3: mod_base = OTHER; note = 2'-O-methylguanosine-3'-phosphate
  modified_base 4: mod_base = OTHER; note = 2'-O-methylguanosine-3'-phosphate
  modified_base 5: mod_base = OTHER; note = 2'-O-methyladenosine-3'-phosphate
  modified_base 6: mod_base = OTHER; note = 2'-fluoroguanosine-3'-phosphate
  modified_base 7: mod_base = OTHER; note = 2'-O-methyladenosine-3'-phosphate
  modified_base 8: mod_base = OTHER; note = 2'-fluoroadenosine-3'-phosphate
  modified_base 9: mod_base = OTHER; note = 2'-fluoroadenosine-3'-phosphate
  modified_base 10: mod_base = OTHER; note = 2'-O-methyluridine-3'-phosphate
  modified_base 11: mod_base = OTHER; note = 2'-O-methyladenosine-3'-phosphate
  modified_base 12: mod_base = OTHER; note = 2'-O-methyladenosine-3'-phosphate
  modified_base 13: mod_base = OTHER; note = 2'-O-methylcytidine-3'-phosphate
  modified_base 14: mod_base = OTHER; note = 2'-fluorocytidine-3'-phosphate
  modified_base 15: mod_base = OTHER; note = 2'-O-methyladenosine-3'-phosphate
  modified_base 16: mod_base = OTHER; note = 2'-fluoroguanosine-3'-phosphate
  modified_base 17: mod_base = OTHER; note = 2'-O-methylcytidine-3'-phosphate
  modified_base 18: mod_base = OTHER; note = 2'-O-methyluridine-3'-phosphate
  modified_base 19: mod_base = OTHER; note = 2'-O-methyladenosine-3'-phosphate
  modified_base 20: mod_base = OTHER; note = 2'-O-methyluridine-3'-phosphate
  modified_base 21: mod_base = OTHER; note = 2'-O-methylguanosine-3'-phosphorothioate
  modified_base 22: mod_base = OTHER; note = 2'-O-methylguanosine-3'-phosphorothioate
  modified_base 23: mod_base = OTHER; note = 2'-O-methyluridine-3'-phosphate
agggagaaataaccagctatggt

SEQ ID NO: 1207 - RNA, 23 nt, synthetic construct
  source 1..23: mol_type = other RNA
  modified_base 1: mod_base = OTHER; note = 2'-O-methyladenosine-3'-phosphorothioate
  modified_base 2: mod_base = OTHER; note = 2'-fluorocytidine-3'-phosphorothioate
  modified_base 3: mod_base = OTHER; note = 2'-O-methyladenosine-3'-phosphate
  modified_base 4: mod_base = OTHER; note = 2'-O-methylcytidine-3'-phosphate
  modified_base 5: mod_base = OTHER; note = 2'-O-methyladenosine-3'-phosphate
  modified_base 6: mod_base = OTHER; note = 2'-fluoroadenosine-3'-phosphate
  modified_base 7: mod_base = OTHER; note = 2'-O-methylguanosine-3'-phosphate
  modified_base 8: mod_base = OTHER; note = 2'-fluoroguanosine-3'-phosphate
  modified_base 9: mod_base = OTHER; note = 2'-fluoroguanosine-3'-phosphate
  modified_base 10: mod_base = OTHER; note = 2'-O-methyladenosine-3'-phosphate
  modified_base 11: mod_base = OTHER; note = 2'-O-methylguanosine-3'-phosphate
  modified_base 12: mod_base = OTHER; note = 2'-O-methyladenosine-3'-phosphate
  modified_base 13: mod_base = OTHER; note = 2'-O-methyladenosine-3'-phosphate
  modified_base 14: mod_base = OTHER; note = 2'-fluoroadenosine-3'-phosphate
  modified_base 15: mod_base = OTHER; note = 2'-O-methyluridine-3'-phosphate
  modified_base 16: mod_base = OTHER; note = 2'-fluoroadenosine-3'-phosphate
  modified_base 17: mod_base = OTHER; note = 2'-O-methyladenosine-3'-phosphate
  modified_base 18: mod_base = OTHER; note = 2'-O-methylcytidine-3'-phosphate
  modified_base 19: mod_base = OTHER; note = 2'-O-methylcytidine-3'-phosphate
  modified_base 20: mod_base = OTHER; note = 2'-O-methyladenosine-3'-phosphate
  modified_base 21: mod_base = OTHER; note = 2'-O-methylguanosine-3'-phosphorothioate
  modified_base 22: mod_base = OTHER; note = 2'-O-methylcytidine-3'-phosphorothioate
  modified_base 23: mod_base = OTHER; note = 2'-O-methyluridine-3'-phosphate
acacaagggagaaataaccagct

SEQ ID NO: 1208 - RNA, 23 nt, synthetic construct
  source 1..23: mol_type = other RNA
  modified_base 1: mod_base = OTHER; note = 2'-O-methyladenosine-3'-phosphorothioate
  modified_base 2: mod_base = OTHER; note = 2'-fluoroadenosine-3'-phosphorothioate
  modified_base 3: mod_base = OTHER; note = 2'-O-methylcytidine-3'-phosphate
  modified_base 4: mod_base = OTHER; note = 2'-O-methyladenosine-3'-phosphate
  modified_base 5: mod_base = OTHER; note = 2'-O-methylcytidine-3'-phosphate
  modified_base 6: mod_base = OTHER; note = 2'-fluoroadenosine-3'-phosphate
  modified_base 7: mod_base = OTHER; note = 2'-O-methyladenosine-3'-phosphate
  modified_base 8: mod_base = OTHER; note = 2'-fluoroguanosine-3'-phosphate
  modified_base 9: mod_base = OTHER; note = 2'-fluoroguanosine-3'-phosphate
  modified_base 10: mod_base = OTHER; note = 2'-O-methylguanosine-3'-phosphate
  modified_base 11: mod_base = OTHER; note = 2'-O-methyladenosine-3'-phosphate
  modified_base 12: mod_base = OTHER; note = 2'-O-methylguanosine-3'-phosphate
  modified_base 13: mod_base = OTHER; note = 2'-O-methyladenosine-3'-phosphate
  modified_base 14: mod_base = OTHER; note = 2'-fluoroadenosine-3'-phosphate
  modified_base 15: mod_base = OTHER; note = 2'-O-methyladenosine-3'-phosphate
  modified_base 16: mod_base = OTHER; note = 2'-fluorouridine-3'-phosphate
  modified_base 17: mod_base = OTHER; note = 2'-O-methyladenosine-3'-phosphate
  modified_base 18: mod_base = OTHER; note = 2'-O-methyladenosine-3'-phosphate
  modified_base 19: mod_base = OTHER; note = 2'-O-methylcytidine-3'-phosphate
  modified_base 20: mod_base = OTHER; note = 2'-O-methylcytidine-3'-phosphate
  modified_base 21: mod_base = OTHER; note = 2'-O-methyladenosine-3'-phosphorothioate
  modified_base 22: mod_base = OTHER; note = 2'-O-methylguanosine-3'-phosphorothioate
  modified_base 23: mod_base = OTHER; note = 2'-O-methylcytidine-3'-phosphate
aacacaagggagaaataaccagc

SEQ ID NO: 1209 - RNA, 23 nt, synthetic construct
  source 1..23: mol_type = other RNA
  modified_base 1: mod_base = OTHER; note = 2'-O-methyladenosine-3'-phosphorothioate
  modified_base 2: mod_base = OTHER; note = 2'-fluoroadenosine-3'-phosphorothioate
  modified_base 3: mod_base = OTHER; note = 2'-O-methyladenosine-3'-phosphate
  modified_base 4: mod_base = OTHER; note = 2'-O-methylcytidine-3'-phosphate
  modified_base 5: mod_base = OTHER; note = 2'-O-methyladenosine-3'-phosphate
  modified_base 6: mod_base = OTHER; note = 2'-fluorocytidine-3'-phosphate
  modified_base 7: mod_base = OTHER; note = 2'-O-methyladenosine-3'-phosphate
  modified_base 8: mod_base = OTHER; note = 2'-fluoroadenosine-3'-phosphate
  modified_base 9: mod_base = OTHER; note = 2'-fluoroguanosine-3'-phosphate
  modified_base 10: mod_base = OTHER; note = 2'-O-methylguanosine-3'-phosphate
  modified_base 11: mod_base = OTHER; note = 2'-O-methylguanosine-3'-phosphate
  modified_base 12: mod_base = OTHER; note = 2'-O-methyladenosine-3'-phosphate
  modified_base 13: mod_base = OTHER; note = 2'-O-methylguanosine-3'-phosphate
  modified_base 14: mod_base = OTHER; note = 2'-fluoroadenosine-3'-phosphate
  modified_base 15: mod_base = OTHER; note = 2'-O-methyladenosine-3'-phosphate
  modified_base 16: mod_base = OTHER; note = 2'-fluoroadenosine-3'-phosphate
  modified_base 17: mod_base = OTHER; note = 2'-O-methyluridine-3'-phosphate
  modified_base 18: mod_base = OTHER; note = 2'-O-methyladenosine-3'-phosphate
  modified_base 19: mod_base = OTHER; note = 2'-O-methyladenosine-3'-phosphate
  modified_base 20: mod_base = OTHER; note = 2'-O-methylcytidine-3'-phosphate
  modified_base 21: mod_base = OTHER; note = 2'-O-methylcytidine-3'-phosphorothioate
  modified_base 22: mod_base = OTHER; note = 2'-O-methyladenosine-3'-phosphorothioate
  modified_base 23: mod_base = OTHER; note = 2'-O-methylguanosine-3'-phosphate
aaacacaagggagaaataaccag

SEQ ID NO: 1210 - RNA, 23 nt, synthetic construct
  source 1..23: mol_type = other RNA
  modified_base 1: mod_base = OTHER; note = 2'-O-methyladenosine-3'-phosphorothioate
  modified_base 2: mod_base = OTHER; note = 2'-fluorocytidine-3'-phosphorothioate
  modified_base 3: mod_base = OTHER; note = 2'-O-methyluridine-3'-phosphate
  modified_base 4: mod_base = OTHER; note = 2'-O-methyladenosine-3'-phosphate
  modified_base 5: mod_base = OTHER; note = 2'-O-methyladenosine-3'-phosphate
  modified_base 6: mod_base = OTHER; note = 2'-fluorocytidine-3'-phosphate
  modified_base 7: mod_base = OTHER; note = 2'-O-methyladenosine-3'-phosphate
  modified_base 8: mod_base = OTHER; note = 2'-fluorocytidine-3'-phosphate
  modified_base 9: mod_base = OTHER; note = 2'-fluoroadenosine-3'-phosphate
  modified_base 10: mod_base = OTHER; note = 2'-O-methyladenosine-3'-phosphate
  modified_base 11: mod_base = OTHER; note = 2'-O-methylguanosine-3'-phosphate
  modified_base 12: mod_base = OTHER; note = 2'-O-methylguanosine-3'-phosphate
  modified_base 13: mod_base = OTHER; note = 2'-O-methylguanosine-3'-phosphate
  modified_base 14: mod_base = OTHER; note = 2'-fluoroadenosine-3'-phosphate
  modified_base 15: mod_base = OTHER; note = 2'-O-methylguanosine-3'-phosphate
  modified_base 16: mod_base = OTHER; note = 2'-fluoroadenosine-3'-phosphate
  modified_base 17: mod_base = OTHER; note = 2'-O-methyladenosine-3'-phosphate
  modified_base 18: mod_base = OTHER; note = 2'-O-methyladenosine-3'-phosphate
  modified_base 19: mod_base = OTHER; note = 2'-O-methyluridine-3'-phosphate
  modified_base 20: mod_base = OTHER; note = 2'-O-methyladenosine-3'-phosphate
  modified_base 21: mod_base = OTHER; note = 2'-O-methyladenosine-3'-phosphorothioate
  modified_base 22: mod_base = OTHER; note = 2'-O-methylcytidine-3'-phosphorothioate
  modified_base 23: mod_base = OTHER; note = 2'-O-methylcytidine-3'-phosphate
actaacacaagggagaaataacc

SEQ ID NO: 1211 - RNA, 23 nt, synthetic construct
  source 1..23: mol_type = other RNA
  modified_base 1: mod_base = OTHER; note = 2'-O-methyladenosine-3'-phosphorothioate
  modified_base 2: mod_base = OTHER; note = 2'-fluoroadenosine-3'-phosphorothioate
  modified_base 3: mod_base = OTHER; note = 2'-O-methylcytidine-3'-phosphate
  modified_base 4: mod_base = OTHER; note = 2'-O-methyluridine-3'-phosphate
  modified_base 5: mod_base = OTHER; note = 2'-O-methyladenosine-3'-phosphate
  modified_base 6: mod_base = OTHER; note = 2'-fluoroadenosine-3'-phosphate
  modified_base 7: mod_base = OTHER; note = 2'-O-methylcytidine-3'-phosphate
  modified_base 8: mod_base = OTHER; note = 2'-fluoroadenosine-3'-phosphate
  modified_base 9: mod_base = OTHER; note = 2'-fluorocytidine-3'-phosphate
  modified_base 10: mod_base = OTHER; note = 2'-O-methyladenosine-3'-phosphate
  modified_base 11: mod_base = OTHER; note = 2'-O-methyladenosine-3'-phosphate
  modified_base 12: mod_base = OTHER; note = 2'-O-methylguanosine-3'-phosphate
  modified_base 13: mod_base = OTHER; note = 2'-O-methylguanosine-3'-phosphate
  modified_base 14: mod_base = OTHER; note = 2'-fluoroguanosine-3'-phosphate
  modified_base 15: mod_base = OTHER; note = 2'-O-methyladenosine-3'-phosphate
  modified_base 16: mod_base = OTHER; note = 2'-fluoroguanosine-3'-phosphate
  modified_base 17: mod_base = OTHER; note = 2'-O-methyladenosine-3'-phosphate
  modified_base 18: mod_base = OTHER; note = 2'-O-methyladenosine-3'-phosphate
  modified_base 19: mod_base = OTHER; note = 2'-O-methyladenosine-3'-phosphate
  modified_base 20: mod_base = OTHER; note = 2'-O-methyluridine-3'-phosphate
  modified_base 21: mod_base = OTHER; note = 2'-O-methyladenosine-3'-phosphorothioate
  modified_base 22: mod_base = OTHER; note = 2'-O-methyladenosine-3'-phosphorothioate
  modified_base 23: mod_base = OTHER; note = 2'-O-methylcytidine-3'-phosphate
aactaacacaagggagaaataac

SEQ ID NO: 1212 - RNA, 23 nt, synthetic construct
  source 1..23: mol_type = other RNA
  modified_base 1: mod_base = OTHER; note = 2'-O-methyladenosine-3'-phosphorothioate
  modified_base 2: mod_base = OTHER; note = 2'-fluorouridine -3'-phosphorothioate
  modified_base 3: mod_base = OTHER; note = 2'-O-methyladenosine-3'-phosphate
  modified_base 4: mod_base = OTHER; note = 2'-O-methylcytidine-3'-phosphate
  modified_base 5: mod_base = OTHER; note = 2'-O-methyluridine-3'-phosphate
  modified_base 6: mod_base = OTHER; note = 2'-fluoroadenosine-3'-phosphate
  modified_base 7: mod_base = OTHER; note = 2'-O-methyladenosine-3'-phosphate
  modified_base 8: mod_base = OTHER; note = 2'-fluorocytidine-3'-phosphate
  modified_base 9: mod_base = OTHER; note = 2'-fluoroadenosine-3'-phosphate
  modified_base 10: mod_base = OTHER; note = 2'-O-methylcytidine-3'-phosphate
  modified_base 11: mod_base = OTHER; note = 2'-O-methyladenosine-3'-phosphate
  modified_base 12: mod_base = OTHER; note = 2'-O-methyladenosine-3'-phosphate
  modified_base 13: mod_base = OTHER; note = 2'-O-methylguanosine-3'-phosphate
  modified_base 14: mod_base = OTHER; note = 2'-fluoroguanosine-3'-phosphate
  modified_base 15: mod_base = OTHER; note = 2'-O-methylguanosine-3'-phosphate
  modified_base 16: mod_base = OTHER; note = 2'-fluoroadenosine-3'-phosphate
  modified_base 17: mod_base = OTHER; note = 2'-O-methylguanosine-3'-phosphate
  modified_base 18: mod_base = OTHER; note = 2'-O-methyladenosine-3'-phosphate
  modified_base 19: mod_base = OTHER; note = 2'-O-methyladenosine-3'-phosphate
  modified_base 20: mod_base = OTHER; note = 2'-O-methyladenosine-3'-phosphate
  modified_base 21: mod_base = OTHER; note = 2'-O-methyluridine-3'-phosphorothioate
  modified_base 22: mod_base = OTHER; note = 2'-O-methyladenosine-3'-phosphorothioate
  modified_base 23: mod_base = OTHER; note = 2'-O-methyladenosine-3'-phosphate
atactaacacaagggagaaataa

SEQ ID NO: 1213 - RNA, 23 nt, synthetic construct
  source 1..23: mol_type = other RNA
  modified_base 1: mod_base = OTHER; note = 2'-O-methyladenosine-3'-phosphorothioate
  modified_base 2: mod_base = OTHER; note = 2'-fluorouridine -3'-phosphorothioate
  modified_base 3: mod_base = OTHER; note = 2'-O-methyluridine-3'-phosphate
  modified_base 4: mod_base = OTHER; note = 2'-O-methyladenosine-3'-phosphate
  modified_base 5: mod_base = OTHER; note = 2'-O-methylcytidine-3'-phosphate
  modified_base 6: mod_base = OTHER; note = 2'-fluorouridine-3'-phosphate
  modified_base 7: mod_base = OTHER; note = 2'-O-methyladenosine-3'-phosphate
  modified_base 8: mod_base = OTHER; note = 2'-fluoroadenosine-3'-phosphate
  modified_base 9: mod_base = OTHER; note = 2'-fluorocytidine-3'-phosphate
  modified_base 10: mod_base = OTHER; note = 2'-O-methyladenosine-3'-phosphate
  modified_base 11: mod_base = OTHER; note = 2'-O-methylcytidine-3'-phosphate
  modified_base 12: mod_base = OTHER; note = 2'-O-methyladenosine-3'-phosphate
  modified_base 13: mod_base = OTHER; note = 2'-O-methyladenosine-3'-phosphate
  modified_base 14: mod_base = OTHER; note = 2'-fluoroguanosine-3'-phosphate
  modified_base 15: mod_base = OTHER; note = 2'-O-methylguanosine-3'-phosphate
  modified_base 16: mod_base = OTHER; note = 2'-fluoroguanosine-3'-phosphate
  modified_base 17: mod_base = OTHER; note = 2'-O-methyladenosine-3'-phosphate
  modified_base 18: mod_base = OTHER; note = 2'-O-methylguanosine-3'-phosphate
  modified_base 19: mod_base = OTHER; note = 2'-O-methyladenosine-3'-phosphate
  modified_base 20: mod_base = OTHER; note = 2'-O-methyladenosine-3'-phosphate
  modified_base 21: mod_base = OTHER; note = 2'-O-methyladenosine-3'-phosphorothioate
  modified_base 22: mod_base = OTHER; note = 2'-O-methyluridine-3'-phosphorothioate
  modified_base 23: mod_base = OTHER; note = 2'-O-methyladenosine-3'-phosphate
attactaacacaagggagaaata

SEQ ID NO: 1214 - RNA, 23 nt, synthetic construct
  source 1..23: mol_type = other RNA
  modified_base 1: mod_base = OTHER; note = 2'-O-methyladenosine-3'-phosphorothioate
  modified_base 2: mod_base = OTHER; note = 2'-fluorouridine -3'-phosphorothioate
  modified_base 3: mod_base = OTHER; note = 2'-O-methyluridine-3'-phosphate
  modified_base 4: mod_base = OTHER; note = 2'-O-methyluridine-3'-phosphate
  modified_base 5: mod_base = OTHER; note = 2'-O-methyladenosine-3'-phosphate
  modified_base 6: mod_base = OTHER; note = 2'-fluorouridine-3'-phosphate
  modified_base 7: mod_base = OTHER; note = 2'-O-methyluridine-3'-phosphate
  modified_base 8: mod_base = OTHER; note = 2'-fluoroadenosine-3'-phosphate
  modified_base 9: mod_base = OTHER; note = 2'-fluorocytidine-3'-phosphate
  modified_base 10: mod_base = OTHER; note = 2'-O-methyluridine-3'-phosphate
  modified_base 11: mod_base = OTHER; note = 2'-O-methyladenosine-3'-phosphate
  modified_base 12: mod_base = OTHER; note = 2'-O-methyladenosine-3'-phosphate
  modified_base 13: mod_base = OTHER; note = 2'-O-methylcytidine-3'-phosphate
  modified_base 14: mod_base = OTHER; note = 2'-fluoroadenosine-3'-phosphate
  modified_base 15: mod_base = OTHER; note = 2'-O-methylcytidine-3'-phosphate
  modified_base 16: mod_base = OTHER; note = 2'-fluoroadenosine-3'-phosphate
  modified_base 17: mod_base = OTHER; note = 2'-O-methyladenosine-3'-phosphate
  modified_base 18: mod_base = OTHER; note = 2'-O-methylguanosine-3'-phosphate
  modified_base 19: mod_base = OTHER; note = 2'-O-methylguanosine-3'-phosphate
  modified_base 20: mod_base = OTHER; note = 2'-O-methylguanosine-3'-phosphate
  modified_base 21: mod_base = OTHER; note = 2'-O-methyladenosine-3'-phosphorothioate
  modified_base 22: mod_base = OTHER; note = 2'-O-methylguanosine-3'-phosphorothioate
  modified_base 23: mod_base = OTHER; note = 2'-O-methyladenosine-3'-phosphate
atttattactaacacaagggaga

SEQ ID NO: 1215 - RNA, 23 nt, synthetic construct
  source 1..23: mol_type = other RNA
  modified_base 1: mod_base = OTHER; note = 2'-O-methyladenosine-3'-phosphorothioate
  modified_base 2: mod_base = OTHER; note = 2'-fluoroguanosine-3'-phosphorothioate
  modified_base 3: mod_base = OTHER; note = 2'-O-methyluridine-3'-phosphate
  modified_base 4: mod_base = OTHER; note = 2'-O-methyluridine-3'-phosphate
  modified_base 5: mod_base = OTHER; note = 2'-O-methyluridine-3'-phosphate
  modified_base 6: mod_base = OTHER; note = 2'-fluoroadenosine-3'-phosphate
  modified_base 7: mod_base = OTHER; note = 2'-O-methyluridine-3'-phosphate
  modified_base 8: mod_base = OTHER; note = 2'-fluorouridine-3'-phosphate
  modified_base 9: mod_base = OTHER; note = 2'-fluoroadenosine-3'-phosphate
  modified_base 10: mod_base = OTHER; note = 2'-O-methylcytidine-3'-phosphate
  modified_base 11: mod_base = OTHER; note = 2'-O-methyluridine-3'-phosphate
  modified_base 12: mod_base = OTHER; note = 2'-O-methyladenosine-3'-phosphate
  modified_base 13: mod_base = OTHER; note = 2'-O-methyladenosine-3'-phosphate
  modified_base 14: mod_base = OTHER; note = 2'-fluorocytidine-3'-phosphate
  modified_base 15: mod_base = OTHER; note = 2'-O-methyladenosine-3'-phosphate
  modified_base 16: mod_base = OTHER; note = 2'-fluorocytidine-3'-phosphate
  modified_base 17: mod_base = OTHER; note = 2'-O-methyladenosine-3'-phosphate
  modified_base 18: mod_base = OTHER; note = 2'-O-methyladenosine-3'-phosphate
  modified_base 19: mod_base = OTHER; note = 2'-O-methylguanosine-3'-phosphate
  modified_base 20: mod_base = OTHER; note = 2'-O-methylguanosine-3'-phosphate
  modified_base 21: mod_base = OTHER; note = 2'-O-methylguanosine-3'-phosphorothioate
  modified_base 22: mod_base = OTHER; note = 2'-O-methyladenosine-3'-phosphorothioate
  modified_base 23: mod_base = OTHER; note = 2'-O-methylguanosine-3'-phosphate
agtttattactaacacaagggag

SEQ ID NO: 1216 - RNA, 23 nt, synthetic construct
  source 1..23: mol_type = other RNA
  modified_base 1: mod_base = OTHER; note = 2'-O-methyladenosine-3'-phosphorothioate
  modified_base 2: mod_base = OTHER; note = 2'-fluorocytidine-3'-phosphorothioate
  modified_base 3: mod_base = OTHER; note = 2'-O-methylguanosine-3'-phosphate
  modified_base 4: mod_base = OTHER; note = 2'-O-methyluridine-3'-phosphate
  modified_base 5: mod_base = OTHER; note = 2'-O-methyluridine-3'-phosphate
  modified_base 6: mod_base = OTHER; note = 2'-fluorouridine-3'-phosphate
  modified_base 7: mod_base = OTHER; note = 2'-O-methyladenosine-3'-phosphate
  modified_base 8: mod_base = OTHER; note = 2'-fluorouridine-3'-phosphate
  modified_base 9: mod_base = OTHER; note = 2'-fluorouridine-3'-phosphate
  modified_base 10: mod_base = OTHER; note = 2'-O-methyladenosine-3'-phosphate
  modified_base 11: mod_base = OTHER; note = 2'-O-methylcytidine-3'-phosphate
  modified_base 12: mod_base = OTHER; note = 2'-O-methyluridine-3'-phosphate
  modified_base 13: mod_base = OTHER; note = 2'-O-methyladenosine-3'-phosphate
  modified_base 14: mod_base = OTHER; note = 2'-fluoroadenosine-3'-phosphate
  modified_base 15: mod_base = OTHER; note = 2'-O-methylcytidine-3'-phosphate
  modified_base 16: mod_base = OTHER; note = 2'-fluoroadenosine-3'-phosphate
  modified_base 17: mod_base = OTHER; note = 2'-O-methylcytidine-3'-phosphate
  modified_base 18: mod_base = OTHER; note = 2'-O-methyladenosine-3'-phosphate
  modified_base 19: mod_base = OTHER; note = 2'-O-methyladenosine-3'-phosphate
  modified_base 20: mod_base = OTHER; note = 2'-O-methylguanosine-3'-phosphate
  modified_base 21: mod_base = OTHER; note = 2'-O-methylguanosine-3'-phosphorothioate
  modified_base 22: mod_base = OTHER; note = 2'-O-methylguanosine-3'-phosphorothioate
  modified_base 23: mod_base = OTHER; note = 2'-O-methyladenosine-3'-phosphate
acgtttattactaacacaaggga

SEQ ID NO: 1217 - RNA, 23 nt, synthetic construct
  source 1..23: mol_type = other RNA
  modified_base 1: mod_base = OTHER; note = 2'-O-methyladenosine-3'-phosphorothioate
  modified_base 2: mod_base = OTHER; note = 2'-fluoroadenosine-3'-phosphorothioate
  modified_base 3: mod_base = OTHER; note = 2'-O-methylcytidine-3'-phosphate
  modified_base 4: mod_base = OTHER; note = 2'-O-methylguanosine-3'-phosphate
  modified_base 5: mod_base = OTHER; note = 2'-O-methyluridine-3'-phosphate
  modified_base 6: mod_base = OTHER; note = 2'-fluorouridine-3'-phosphate
  modified_base 7: mod_base = OTHER; note = 2'-O-methyluridine-3'-phosphate
  modified_base 8: mod_base = OTHER; note = 2'-fluoroadenosine-3'-phosphate
  modified_base 9: mod_base = OTHER; note = 2'-fluorouridine-3'-phosphate
  modified_base 10: mod_base = OTHER; note = 2'-O-methyluridine-3'-phosphate
  modified_base 11: mod_base = OTHER; note = 2'-O-methyladenosine-3'-phosphate
  modified_base 12: mod_base = OTHER; note = 2'-O-methylcytidine-3'-phosphate
  modified_base 13: mod_base = OTHER; note = 2'-O-methyluridine-3'-phosphate
  modified_base 14: mod_base = OTHER; note = 2'-fluoroadenosine-3'-phosphate
  modified_base 15: mod_base = OTHER; note = 2'-O-methyladenosine-3'-phosphate
  modified_base 16: mod_base = OTHER; note = 2'-fluorocytidine-3'-phosphate
  modified_base 17: mod_base = OTHER; note = 2'-O-methyladenosine-3'-phosphate
  modified_base 18: mod_base = OTHER; note = 2'-O-methylcytidine-3'-phosphate
  modified_base 19: mod_base = OTHER; note = 2'-O-methyladenosine-3'-phosphate
  modified_base 20: mod_base = OTHER; note = 2'-O-methyladenosine-3'-phosphate
  modified_base 21: mod_base = OTHER; note = 2'-O-methylguanosine-3'-phosphorothioate
  modified_base 22: mod_base = OTHER; note = 2'-O-methylguanosine-3'-phosphorothioate
  modified_base 23: mod_base = OTHER; note = 2'-O-methylguanosine-3'-phosphate
aacgtttattactaacacaaggg

SEQ ID NO: 1218 - RNA, 23 nt, synthetic construct
  source 1..23: mol_type = other RNA
  modified_base 1: mod_base = OTHER; note = 2'-O-methyladenosine-3'-phosphorothioate
  modified_base 2: mod_base = OTHER; note = 2'-fluoroguanosine-3'-phosphorothioate
  modified_base 3: mod_base = OTHER; note = 2'-O-methyladenosine-3'-phosphate
  modified_base 4: mod_base = OTHER; note = 2'-O-methylcytidine-3'-phosphate
  modified_base 5: mod_base = OTHER; note = 2'-O-methylguanosine-3'-phosphate
  modified_base 6: mod_base = OTHER; note = 2'-fluorouridine-3'-phosphate
  modified_base 7: mod_base = OTHER; note = 2'-O-methyluridine-3'-phosphate
  modified_base 8: mod_base = OTHER; note = 2'-fluorouridine-3'-phosphate
  modified_base 9: mod_base = OTHER; note = 2'-fluoroadenosine-3'-phosphate
  modified_base 10: mod_base = OTHER; note = 2'-O-methyluridine-3'-phosphate
  modified_base 11: mod_base = OTHER; note = 2'-O-methyluridine-3'-phosphate
  modified_base 12: mod_base = OTHER; note = 2'-O-methyladenosine-3'-phosphate
  modified_base 13: mod_base = OTHER; note = 2'-O-methylcytidine-3'-phosphate
  modified_base 14: mod_base = OTHER; note = 2'-fluorouridine-3'-phosphate
  modified_base 15: mod_base = OTHER; note = 2'-O-methyladenosine-3'-phosphate
  modified_base 16: mod_base = OTHER; note = 2'-fluoroadenosine-3'-phosphate
  modified_base 17: mod_base = OTHER; note = 2'-O-methylcytidine-3'-phosphate
  modified_base 18: mod_base = OTHER; note = 2'-O-methyladenosine-3'-phosphate
  modified_base 19: mod_base = OTHER; note = 2'-O-methylcytidine-3'-phosphate
  modified_base 20: mod_base = OTHER; note = 2'-O-methyladenosine-3'-phosphate
  modified_base 21: mod_base = OTHER; note = 2'-O-methyladenosine-3'-phosphorothioate
  modified_base 22: mod_base = OTHER; note = 2'-O-methylguanosine-3'-phosphorothioate
  modified_base 23: mod_base = OTHER; note = 2'-O-methylguanosine-3'-phosphate
agacgtttattactaacacaagg

SEQ ID NO: 1219 - RNA, 23 nt, synthetic construct
  source 1..23: mol_type = other RNA
  modified_base 1: mod_base = OTHER; note = 2'-O-methyladenosine-3'-phosphorothioate
  modified_base 2: mod_base = OTHER; note = 2'-fluoroadenosine-3'-phosphorothioate
  modified_base 3: mod_base = OTHER; note = 2'-O-methylguanosine-3'-phosphate
  modified_base 4: mod_base = OTHER; note = 2'-O-methyladenosine-3'-phosphate
  modified_base 5: mod_base = OTHER; note = 2'-O-methylcytidine-3'-phosphate
  modified_base 6: mod_base = OTHER; note = 2'-fluoroguanosine-3'-phosphate
  modified_base 7: mod_base = OTHER; note = 2'-O-methyluridine-3'-phosphate
  modified_base 8: mod_base = OTHER; note = 2'-fluorouridine-3'-phosphate
  modified_base 9: mod_base = OTHER; note = 2'-fluorouridine-3'-phosphate
  modified_base 10: mod_base = OTHER; note = 2'-O-methyladenosine-3'-phosphate
  modified_base 11: mod_base = OTHER; note = 2'-O-methyluridine-3'-phosphate
  modified_base 12: mod_base = OTHER; note = 2'-O-methyluridine-3'-phosphate
  modified_base 13: mod_base = OTHER; note = 2'-O-methyladenosine-3'-phosphate
  modified_base 14: mod_base = OTHER; note = 2'-fluorocytidine-3'-phosphate
  modified_base 15: mod_base = OTHER; note = 2'-O-methyluridine-3'-phosphate
  modified_base 16: mod_base = OTHER; note = 2'-fluoroadenosine-3'-phosphate
  modified_base 17: mod_base = OTHER; note = 2'-O-methyladenosine-3'-phosphate
  modified_base 18: mod_base = OTHER; note = 2'-O-methylcytidine-3'-phosphate
  modified_base 19: mod_base = OTHER; note = 2'-O-methyladenosine-3'-phosphate
  modified_base 20: mod_base = OTHER; note = 2'-O-methylcytidine-3'-phosphate
  modified_base 21: mod_base = OTHER; note = 2'-O-methyladenosine-3'-phosphorothioate
  modified_base 22: mod_base = OTHER; note = 2'-O-methyladenosine-3'-phosphorothioate
  modified_base 23: mod_base = OTHER; note = 2'-O-methylguanosine-3'-phosphate
aagacgtttattactaacacaag

SEQ ID NO: 1220 - RNA, 23 nt, synthetic construct
  source 1..23: mol_type = other RNA
  modified_base 1: mod_base = OTHER; note = 2'-O-methyladenosine-3'-phosphorothioate
  modified_base 2: mod_base = OTHER; note = 2'-fluoroadenosine-3'-phosphorothioate
  modified_base 3: mod_base = OTHER; note = 2'-O-methyladenosine-3'-phosphate
  modified_base 4: mod_base = OTHER; note = 2'-O-methylguanosine-3'-phosphate
  modified_base 5: mod_base = OTHER; note = 2'-O-methyladenosine-3'-phosphate
  modified_base 6: mod_base = OTHER; note = 2'-fluorocytidine-3'-phosphate
  modified_base 7: mod_base = OTHER; note = 2'-O-methylguanosine-3'-phosphate
  modified_base 8: mod_base = OTHER; note = 2'-fluorouridine-3'-phosphate
  modified_base 9: mod_base = OTHER; note = 2'-fluorouridine-3'-phosphate
  modified_base 10: mod_base = OTHER; note = 2'-O-methyluridine-3'-phosphate
  modified_base 11: mod_base = OTHER; note = 2'-O-methyladenosine-3'-phosphate
  modified_base 12: mod_base = OTHER; note = 2'-O-methyluridine-3'-phosphate
  modified_base 13: mod_base = OTHER; note = 2'-O-methyluridine-3'-phosphate
  modified_base 14: mod_base = OTHER; note = 2'-fluoroadenosine-3'-phosphate
  modified_base 15: mod_base = OTHER; note = 2'-O-methylcytidine-3'-phosphate
  modified_base 16: mod_base = OTHER; note = 2'-fluorouridine-3'-phosphate
  modified_base 17: mod_base = OTHER; note = 2'-O-methyladenosine-3'-phosphate
  modified_base 18: mod_base = OTHER; note = 2'-O-methyladenosine-3'-phosphate
  modified_base 19: mod_base = OTHER; note = 2'-O-methylcytidine-3'-phosphate
  modified_base 20: mod_base = OTHER; note = 2'-O-methyladenosine-3'-phosphate
  modified_base 21: mod_base = OTHER; note = 2'-O-methylcytidine-3'-phosphorothioate
  modified_base 22: mod_base = OTHER; note = 2'-O-methyladenosine-3'-phosphorothioate
  modified_base 23: mod_base = OTHER; note = 2'-O-methyladenosine-3'-phosphate
aaagacgtttattactaacacaa

SEQ ID NO: 1221 - RNA, 23 nt, synthetic construct
  source 1..23: mol_type = other RNA
  modified_base 1: mod_base = OTHER; note = 2'-O-methyladenosine-3'-phosphorothioate
  modified_base 2: mod_base = OTHER; note = 2'-fluorocytidine-3'-phosphorothioate
  modified_base 3: mod_base = OTHER; note = 2'-O-methyladenosine-3'-phosphate
  modified_base 4: mod_base = OTHER; note = 2'-O-methyladenosine-3'-phosphate
  modified_base 5: mod_base = OTHER; note = 2'-O-methylguanosine-3'-phosphate
  modified_base 6: mod_base = OTHER; note = 2'-fluoroadenosine-3'-phosphate
  modified_base 7: mod_base = OTHER; note = 2'-O-methylcytidine-3'-phosphate
  modified_base 8: mod_base = OTHER; note = 2'-fluoroguanosine-3'-phosphate
  modified_base 9: mod_base = OTHER; note = 2'-fluorouridine-3'-phosphate
  modified_base 10: mod_base = OTHER; note = 2'-O-methyluridine-3'-phosphate
  modified_base 11: mod_base = OTHER; note = 2'-O-methyluridine-3'-phosphate
  modified_base 12: mod_base = OTHER; note = 2'-O-methyladenosine-3'-phosphate
  modified_base 13: mod_base = OTHER; note = 2'-O-methyluridine-3'-phosphate
  modified_base 14: mod_base = OTHER; note = 2'-fluorouridine-3'-phosphate
  modified_base 15: mod_base = OTHER; note = 2'-O-methyladenosine-3'-phosphate
  modified_base 16: mod_base = OTHER; note = 2'-fluorocytidine-3'-phosphate
  modified_base 17: mod_base = OTHER; note = 2'-O-methyluridine-3'-phosphate
  modified_base 18: mod_base = OTHER; note = 2'-O-methyladenosine-3'-phosphate
  modified_base 19: mod_base = OTHER; note = 2'-O-methyladenosine-3'-phosphate
  modified_base 20: mod_base = OTHER; note = 2'-O-methylcytidine-3'-phosphate
  modified_base 21: mod_base = OTHER; note = 2'-O-methyladenosine-3'-phosphorothioate
  modified_base 22: mod_base = OTHER; note = 2'-O-methylcytidine-3'-phosphorothioate
  modified_base 23: mod_base = OTHER; note = 2'-O-methyladenosine-3'-phosphate
acaagacgtttattactaacaca

SEQ ID NO: 1222 - RNA, 23 nt, synthetic construct
  source 1..23: mol_type = other RNA
  modified_base 1: mod_base = OTHER; note = 2'-O-methyladenosine-3'-phosphorothioate
  modified_base 2: mod_base = OTHER; note = 2'-fluoroguanosine-3'-phosphorothioate
  modified_base 3: mod_base = OTHER; note = 2'-O-methylcytidine-3'-phosphate
  modified_base 4: mod_base = OTHER; note = 2'-O-methyladenosine-3'-phosphate
  modified_base 5: mod_base = OTHER; note = 2'-O-methyladenosine-3'-phosphate
  modified_base 6: mod_base = OTHER; note = 2'-fluoroguanosine-3'-phosphate
  modified_base 7: mod_base = OTHER; note = 2'-O-methyladenosine-3'-phosphate
  modified_base 8: mod_base = OTHER; note = 2'-fluorocytidine-3'-phosphate
  modified_base 9: mod_base = OTHER; note = 2'-fluoroguanosine-3'-phosphate
  modified_base 10: mod_base = OTHER; note = 2'-O-methyluridine-3'-phosphate
  modified_base 11: mod_base = OTHER; note = 2'-O-methyluridine-3'-phosphate
  modified_base 12: mod_base = OTHER; note = 2'-O-methyluridine-3'-phosphate
  modified_base 13: mod_base = OTHER; note = 2'-O-methyladenosine-3'-phosphate
  modified_base 14: mod_base = OTHER; note = 2'-fluorouridine-3'-phosphate
  modified_base 15: mod_base = OTHER; note = 2'-O-methyluridine-3'-phosphate
  modified_base 16: mod_base = OTHER; note = 2'-fluoroadenosine-3'-phosphate
  modified_base 17: mod_base = OTHER; note = 2'-O-methylcytidine-3'-phosphate
  modified_base 18: mod_base = OTHER; note = 2'-O-methyluridine-3'-phosphate
  modified_base 19: mod_base = OTHER; note = 2'-O-methyladenosine-3'-phosphate
  modified_base 20: mod_base = OTHER; note = 2'-O-methyladenosine-3'-phosphate
  modified_base 21: mod_base = OTHER; note = 2'-O-methylcytidine-3'-phosphorothioate
  modified_base 22: mod_base = OTHER; note = 2'-O-methyladenosine-3'-phosphorothioate
  modified_base 23: mod_base = OTHER; note = 2'-O-methylcytidine-3'-phosphate
agcaagacgtttattactaacac

SEQ ID NO: 1223 - RNA, 23 nt, synthetic construct
  source 1..23: mol_type = other RNA
  modified_base 1: mod_base = OTHER; note = 2'-O-methyladenosine-3'-phosphorothioate
  modified_base 2: mod_base = OTHER; note = 2'-fluoroguanosine-3'-phosphorothioate
  modified_base 3: mod_base = OTHER; note = 2'-O-methylguanosine-3'-phosphate
  modified_base 4: mod_base = OTHER; note = 2'-O-methylcytidine-3'-phosphate
  modified_base 5: mod_base = OTHER; note = 2'-O-methyladenosine-3'-phosphate
  modified_base 6: mod_base = OTHER; note = 2'-fluoroadenosine-3'-phosphate
  modified_base 7: mod_base = OTHER; note = 2'-O-methylguanosine-3'-phosphate
  modified_base 8: mod_base = OTHER; note = 2'-fluoroadenosine-3'-phosphate
  modified_base 9: mod_base = OTHER; note = 2'-fluorocytidine-3'-phosphate
  modified_base 10: mod_base = OTHER; note = 2'-O-methylguanosine-3'-phosphate
  modified_base 11: mod_base = OTHER; note = 2'-O-methyluridine-3'-phosphate
  modified_base 12: mod_base = OTHER; note = 2'-O-methyluridine-3'-phosphate
  modified_base 13: mod_base = OTHER; note = 2'-O-methyluridine-3'-phosphate
  modified_base 14: mod_base = OTHER; note = 2'-fluoroadenosine-3'-phosphate
  modified_base 15: mod_base = OTHER; note = 2'-O-methyluridine-3'-phosphate
  modified_base 16: mod_base = OTHER; note = 2'-fluorouridine-3'-phosphate
  modified_base 17: mod_base = OTHER; note = 2'-O-methyladenosine-3'-phosphate
  modified_base 18: mod_base = OTHER; note = 2'-O-methylcytidine-3'-phosphate
  modified_base 19: mod_base = OTHER; note = 2'-O-methyluridine-3'-phosphate
  modified_base 20: mod_base = OTHER; note = 2'-O-methyladenosine-3'-phosphate
  modified_base 21: mod_base = OTHER; note = 2'-O-methyladenosine-3'-phosphorothioate
  modified_base 22: mod_base = OTHER; note = 2'-O-methylcytidine-3'-phosphorothioate
  modified_base 23: mod_base = OTHER; note = 2'-O-methyladenosine-3'-phosphate
aggcaagacgtttattactaaca

SEQ ID NO: 1224 - RNA, 23 nt, synthetic construct
  source 1..23: mol_type = other RNA
  modified_base 1: mod_base = OTHER; note = 2'-O-methyladenosine-3'-phosphorothioate
  modified_base 2: mod_base = OTHER; note = 2'-fluorocytidine-3'-phosphorothioate
  modified_base 3: mod_base = OTHER; note = 2'-O-methyluridine-3'-phosphate
  modified_base 4: mod_base = OTHER; note = 2'-O-methyluridine-3'-phosphate
  modified_base 5: mod_base = OTHER; note = 2'-O-methyladenosine-3'-phosphate
  modified_base 6: mod_base = OTHER; note = 2'-fluorouridine-3'-phosphate
  modified_base 7: mod_base = OTHER; note = 2'-O-methyluridine-3'-phosphate
  modified_base 8: mod_base = OTHER; note = 2'-fluoroguanosine-3'-phosphate
  modified_base 9: mod_base = OTHER; note = 2'-fluorouridine-3'-phosphate
  modified_base 10: mod_base = OTHER; note = 2'-O-methylguanosine-3'-phosphate
  modified_base 11: mod_base = OTHER; note = 2'-O-methylguanosine-3'-phosphate
  modified_base 12: mod_base = OTHER; note = 2'-O-methylcytidine-3'-phosphate
  modified_base 13: mod_base = OTHER; note = 2'-O-methyladenosine-3'-phosphate
  modified_base 14: mod_base = OTHER; note = 2'-fluoroadenosine-3'-phosphate
  modified_base 15: mod_base = OTHER; note = 2'-O-methylguanosine-3'-phosphate
  modified_base 16: mod_base = OTHER; note = 2'-fluoroadenosine-3'-phosphate
  modified_base 17: mod_base = OTHER; note = 2'-O-methylcytidine-3'-phosphate
  modified_base 18: mod_base = OTHER; note = 2'-O-methylguanosine-3'-phosphate
  modified_base 19: mod_base = OTHER; note = 2'-O-methyluridine-3'-phosphate
  modified_base 20: mod_base = OTHER; note = 2'-O-methyluridine-3'-phosphate
  modified_base 21: mod_base = OTHER; note = 2'-O-methyluridine-3'-phosphorothioate
  modified_base 22: mod_base = OTHER; note = 2'-O-methyladenosine-3'-phosphorothioate
  modified_base 23: mod_base = OTHER; note = 2'-O-methyluridine-3'-phosphate
acttattgtggcaagacgtttat

SEQ ID NO: 1225 - RNA, 23 nt, synthetic construct
  source 1..23: mol_type = other RNA
  modified_base 1: mod_base = OTHER; note = 2'-O-methyladenosine-3'-phosphorothioate
  modified_base 2: mod_base = OTHER; note = 2'-fluoroguanosine-3'-phosphorothioate
  modified_base 3: mod_base = OTHER; note = 2'-O-methylcytidine-3'-phosphate
  modified_base 4: mod_base = OTHER; note = 2'-O-methyluridine-3'-phosphate
  modified_base 5: mod_base = OTHER; note = 2'-O-methyluridine-3'-phosphate
  modified_base 6: mod_base = OTHER; note = 2'-fluoroadenosine-3'-phosphate
  modified_base 7: mod_base = OTHER; note = 2'-O-methyluridine-3'-phosphate
  modified_base 8: mod_base = OTHER; note = 2'-fluorouridine-3'-phosphate
  modified_base 9: mod_base = OTHER; note = 2'-fluoroguanosine-3'-phosphate
  modified_base 10: mod_base = OTHER; note = 2'-O-methyluridine-3'-phosphate
  modified_base 11: mod_base = OTHER; note = 2'-O-methylguanosine-3'-phosphate
  modified_base 12: mod_base = OTHER; note = 2'-O-methylguanosine-3'-phosphate
  modified_base 13: mod_base = OTHER; note = 2'-O-methylcytidine-3'-phosphate
  modified_base 14: mod_base = OTHER; note = 2'-fluoroadenosine-3'-phosphate
  modified_base 15: mod_base = OTHER; note = 2'-O-methyladenosine-3'-phosphate
  modified_base 16: mod_base = OTHER; note = 2'-fluoroguanosine-3'-phosphate
  modified_base 17: mod_base = OTHER; note = 2'-O-methyladenosine-3'-phosphate
  modified_base 18: mod_base = OTHER; note = 2'-O-methylcytidine-3'-phosphate
  modified_base 19: mod_base = OTHER; note = 2'-O-methylguanosine-3'-phosphate
  modified_base 20: mod_base = OTHER; note = 2'-O-methyluridine-3'-phosphate
  modified_base 21: mod_base = OTHER; note = 2'-O-methyluridine-3'-phosphorothioate
  modified_base 22: mod_base = OTHER; note = 2'-O-methyluridine-3'-phosphorothioate
  modified_base 23: mod_base = OTHER; note = 2'-O-methyladenosine-3'-phosphate
agcttattgtggcaagacgttta

SEQ ID NO: 1226 - RNA, 23 nt, synthetic construct
  source 1..23: mol_type = other RNA
  modified_base 1: mod_base = OTHER; note = 2'-O-methyladenosine-3'-phosphorothioate
  modified_base 2: mod_base = OTHER; note = 2'-fluoroguanosine-3'-phosphorothioate
  modified_base 3: mod_base = OTHER; note = 2'-O-methylguanosine-3'-phosphate
  modified_base 4: mod_base = OTHER; note = 2'-O-methylcytidine-3'-phosphate
  modified_base 5: mod_base = OTHER; note = 2'-O-methyluridine-3'-phosphate
  modified_base 6: mod_base = OTHER; note = 2'-fluorouridine-3'-phosphate
  modified_base 7: mod_base = OTHER; note = 2'-O-methyladenosine-3'-phosphate
  modified_base 8: mod_base = OTHER; note = 2'-fluorouridine-3'-phosphate
  modified_base 9: mod_base = OTHER; note = 2'-fluorouridine-3'-phosphate
  modified_base 10: mod_base = OTHER; note = 2'-O-methylguanosine-3'-phosphate
  modified_base 11: mod_base = OTHER; note = 2'-O-methyluridine-3'-phosphate
  modified_base 12: mod_base = OTHER; note = 2'-O-methylguanosine-3'-phosphate
  modified_base 13: mod_base = OTHER; note = 2'-O-methylguanosine-3'-phosphate
  modified_base 14: mod_base = OTHER; note = 2'-fluorocytidine-3'-phosphate
  modified_base 15: mod_base = OTHER; note = 2'-O-methyladenosine-3'-phosphate
  modified_base 16: mod_base = OTHER; note = 2'-fluoroadenosine-3'-phosphate
  modified_base 17: mod_base = OTHER; note = 2'-O-methylguanosine-3'-phosphate
  modified_base 18: mod_base = OTHER; note = 2'-O-methyladenosine-3'-phosphate
  modified_base 19: mod_base = OTHER; note = 2'-O-methylcytidine-3'-phosphate
  modified_base 20: mod_base = OTHER; note = 2'-O-methylguanosine-3'-phosphate
  modified_base 21: mod_base = OTHER; note = 2'-O-methyluridine-3'-phosphorothioate
  modified_base 22: mod_base = OTHER; note = 2'-O-methyluridine-3'-phosphorothioate
  modified_base 23: mod_base = OTHER; note = 2'-O-methyluridine-3'-phosphate
aggcttattgtggcaagacgttt

SEQ ID NO: 1227 - RNA, 23 nt, synthetic construct
  source 1..23: mol_type = other RNA
  modified_base 1: mod_base = OTHER; note = 2'-O-methyladenosine-3'-phosphorothioate
  modified_base 2: mod_base = OTHER; note = 2'-fluorocytidine-3'-phosphorothioate
  modified_base 3: mod_base = OTHER; note = 2'-O-methylcytidine-3'-phosphate
  modified_base 4: mod_base = OTHER; note = 2'-O-methylcytidine-3'-phosphate
  modified_base 5: mod_base = OTHER; note = 2'-O-methyladenosine-3'-phosphate
  modified_base 6: mod_base = OTHER; note = 2'-fluoroadenosine-3'-phosphate
  modified_base 7: mod_base = OTHER; note = 2'-O-methyluridine-3'-phosphate
  modified_base 8: mod_base = OTHER; note = 2'-fluorouridine-3'-phosphate
  modified_base 9: mod_base = OTHER; note = 2'-fluorouridine-3'-phosphate
  modified_base 10: mod_base = OTHER; note = 2'-O-methyluridine-3'-phosphate
  modified_base 11: mod_base = OTHER; note = 2'-O-methyluridine-3'-phosphate
  modified_base 12: mod_base = OTHER; note = 2'-O-methylguanosine-3'-phosphate
  modified_base 13: mod_base = OTHER; note = 2'-O-methyluridine-3'-phosphate
  modified_base 14: mod_base = OTHER; note = 2'-fluorouridine-3'-phosphate
  modified_base 15: mod_base = OTHER; note = 2'-O-methylcytidine-3'-phosphate
  modified_base 16: mod_base = OTHER; note = 2'-fluorouridine-3'-phosphate
  modified_base 17: mod_base = OTHER; note = 2'-O-methylcytidine-3'-phosphate
  modified_base 18: mod_base = OTHER; note = 2'-O-methyladenosine-3'-phosphate
  modified_base 19: mod_base = OTHER; note = 2'-O-methyladenosine-3'-phosphate
  modified_base 20: mod_base = OTHER; note = 2'-O-methylcytidine-3'-phosphate
  modified_base 21: mod_base = OTHER; note = 2'-O-methyluridine-3'-phosphorothioate
  modified_base 22: mod_base = OTHER; note = 2'-O-methyluridine-3'-phosphorothioate
  modified_base 23: mod_base = OTHER; note = 2'-O-methylguanosine-3'-phosphate
acccaatttttgttctcaacttg

SEQ ID NO: 1228 - RNA, 23 nt, synthetic construct
  source 1..23: mol_type = other RNA
gaagaagctgccgttgttctggg

SEQ ID NO: 1229 - RNA, 23 nt, synthetic construct
  source 1..23: mol_type = other RNA
aagaagctgccgttgttctgggt

SEQ ID NO: 1230 - RNA, 23 nt, synthetic construct
  source 1..23: mol_type = other RNA
agaagctgccgttgttctgggta

SEQ ID NO: 1231 - RNA, 23 nt, synthetic construct
  source 1..23: mol_type = other RNA
agctgccgttgttctgggtacta

SEQ ID NO: 1232 - RNA, 23 nt, synthetic construct
  source 1..23: mol_type = other RNA
gccgttgttctgggtactacagc

SEQ ID NO: 1233 - RNA, 23 nt, synthetic construct
  source 1..23: mol_type = other RNA
ttctgggtactacagcagaaggg

SEQ ID NO: 1234 - RNA, 23 nt, synthetic construct
  source 1..23: mol_type = other RNA
ggtactacagcagaagggtatgc

SEQ ID NO: 1235 - RNA, 23 nt, synthetic construct
  source 1..23: mol_type = other RNA
gtactacagcagaagggtatgcg

SEQ ID NO: 1236 - RNA, 23 nt, synthetic construct
  source 1..23: mol_type = other RNA
tactacagcagaagggtatgcgg

SEQ ID NO: 1237 - RNA, 23 nt, synthetic construct
  source 1..23: mol_type = other RNA
actacagcagaagggtatgcgga

SEQ ID NO: 1238 - RNA, 23 nt, synthetic construct
  source 1..23: mol_type = other RNA
ctacagcagaagggtatgcggaa

SEQ ID NO: 1239 - RNA, 23 nt, synthetic construct
  source 1..23: mol_type = other RNA
acagcagaagggtatgcggaagc

SEQ ID NO: 1240 - RNA, 23 nt, synthetic construct
  source 1..23: mol_type = other RNA
tcatccacaatgagagtacctgt

SEQ ID NO: 1241 - RNA, 23 nt, synthetic construct
  source 1..23: mol_type = other RNA
ccacaatgagagtacctgtgagc

SEQ ID NO: 1242 - RNA, 23 nt, synthetic construct
  source 1..23: mol_type = other RNA
ccttcatacctgctccaattcag

SEQ ID NO: 1243 - RNA, 23 nt, synthetic construct
  source 1..23: mol_type = other RNA
cttcatacctgctccaattcagg

SEQ ID NO: 1244 - RNA, 23 nt, synthetic construct
  source 1..23: mol_type = other RNA
ttcatacctgctccaattcaggc

SEQ ID NO: 1245 - RNA, 23 nt, synthetic construct
  source 1..23: mol_type = other RNA
tgtggatgaaaaggccctacagg

SEQ ID NO: 1246 - RNA, 23 nt, synthetic construct
  source 1..23: mol_type = other RNA
gtggatgaaaaggccctacagga

SEQ ID NO: 1247 - RNA, 23 nt, synthetic construct
  source 1..23: mol_type = other RNA
tggtgctagtcgctgcaaaactt

SEQ ID NO: 1248 - RNA, 23 nt, synthetic construct
  source 1..23: mol_type = other RNA
ggtgctagtcgctgcaaaacttg

SEQ ID NO: 1249 - RNA, 23 nt, synthetic construct
  source 1..23: mol_type = other RNA
gtgctagtcgctgcaaaacttga

SEQ ID NO: 1250 - RNA, 23 nt, synthetic construct
  source 1..23: mol_type = other RNA
gctgcaaaacttgacaccgaaga

SEQ ID NO: 1251 - RNA, 23 nt, synthetic construct
  source 1..23: mol_type = other RNA
ctgcaaaacttgacaccgaagac

SEQ ID NO: 1252 - RNA, 23 nt, synthetic construct
  source 1..23: mol_type = other RNA
acttgacaccgaagacaagttga

SEQ ID NO: 1253 - RNA, 23 nt, synthetic construct
  source 1..23: mol_type = other RNA
cttgacaccgaagacaagttgag

SEQ ID NO: 1254 - RNA, 23 nt, synthetic construct
  source 1..23: mol_type = other RNA
tgacaccgaagacaagttgaggg

SEQ ID NO: 1255 - RNA, 23 nt, synthetic construct
  source 1..23: mol_type = other RNA
gacaccgaagacaagttgagggc

SEQ ID NO: 1256 - RNA, 23 nt, synthetic construct
  source 1..23: mol_type = other RNA
acaagttgagggccgcaatggtc

SEQ ID NO: 1257 - RNA, 23 nt, synthetic construct
  source 1..23: mol_type = other RNA
tcgggatgctggccaacttcttg

SEQ ID NO: 1258 - RNA, 23 nt, synthetic construct
  source 1..23: mol_type = other RNA
atgctggccaacttcttgggctt

SEQ ID NO: 1259 - RNA, 23 nt, synthetic construct
  source 1..23: mol_type = other RNA
gccaacttcttgggcttccgtat

SEQ ID NO: 1260 - RNA, 23 nt, synthetic construct
  source 1..23: mol_type = other RNA
ccaacttcttgggcttccgtata

SEQ ID NO: 1261 - RNA, 23 nt, synthetic construct
  source 1..23: mol_type = other RNA
caacttcttgggcttccgtatat

SEQ ID NO: 1262 - RNA, 23 nt, synthetic construct
  source 1..23: mol_type = other RNA
cttcttgggcttccgtatatatg

SEQ ID NO: 1263 - RNA, 23 nt, synthetic construct
  source 1..23: mol_type = other RNA
tcttgggcttccgtatatatggc

SEQ ID NO: 1264 - RNA, 23 nt, synthetic construct
  source 1..23: mol_type = other RNA
tatatatggcatgcacagtgagc

SEQ ID NO: 1265 - RNA, 23 nt, synthetic construct
  source 1..23: mol_type = other RNA
tggcatgcacagtgagctatggg

SEQ ID NO: 1266 - RNA, 23 nt, synthetic construct
  source 1..23: mol_type = other RNA
ctctctatctgggagccttggac

SEQ ID NO: 1267 - RNA, 23 nt, synthetic construct
  source 1..23: mol_type = other RNA
ctgacaggctacaggcaatcctg

SEQ ID NO: 1268 - RNA, 23 nt, synthetic construct
  source 1..23: mol_type = other RNA
tgacaggctacaggcaatcctgg

SEQ ID NO: 1269 - RNA, 23 nt, synthetic construct
  source 1..23: mol_type = other RNA
gctacaggcaatcctgggtgttc

SEQ ID NO: 1270 - RNA, 23 nt, synthetic construct
  source 1..23: mol_type = other RNA
ctacaggcaatcctgggtgttcc

SEQ ID NO: 1271 - RNA, 23 nt, synthetic construct
  source 1..23: mol_type = other RNA
caggcaatcctgggtgttccttg

SEQ ID NO: 1272 - RNA, 23 nt, synthetic construct
  source 1..23: mol_type = other RNA
aggcaatcctgggtgttccttgg

SEQ ID NO: 1273 - RNA, 23 nt, synthetic construct
  source 1..23: mol_type = other RNA
gcaatcctgggtgttccttggaa

SEQ ID NO: 1274 - RNA, 23 nt, synthetic construct
  source 1..23: mol_type = other RNA
aatcctgggtgttccttggaagg

SEQ ID NO: 1275 - RNA, 23 nt, synthetic construct
  source 1..23: mol_type = other RNA
ttccttggaaggacaagaactgc

SEQ ID NO: 1276 - RNA, 23 nt, synthetic construct
  source 1..23: mol_type = other RNA
tgcacctgaagcagccgtttgtg

SEQ ID NO: 1277 - RNA, 23 nt, synthetic construct
  source 1..23: mol_type = other RNA
ctctctggacttcacagaactgg

SEQ ID NO: 1278 - RNA, 23 nt, synthetic construct
  source 1..23: mol_type = other RNA
tctctggacttcacagaactgga

SEQ ID NO: 1279 - RNA, 23 nt, synthetic construct
  source 1..23: mol_type = other RNA
ctggacttcacagaactggatgt

SEQ ID NO: 1280 - RNA, 23 nt, synthetic construct
  source 1..23: mol_type = other RNA
ggacttcacagaactggatgttg

SEQ ID NO: 1281 - RNA, 23 nt, synthetic construct
  source 1..23: mol_type = other RNA
gacttcacagaactggatgttgc

SEQ ID NO: 1282 - RNA, 23 nt, synthetic construct
  source 1..23: mol_type = other RNA
ttcacagaactggatgttgctgc

SEQ ID NO: 1283 - RNA, 23 nt, synthetic construct
  source 1..23: mol_type = other RNA
tcacagaactggatgttgctgct

SEQ ID NO: 1284 - RNA, 23 nt, synthetic construct
  source 1..23: mol_type = other RNA
gatgttgctgctgagaagattga

SEQ ID NO: 1285 - RNA, 23 nt, synthetic construct
  source 1..23: mol_type = other RNA
tgttgctgctgagaagattgaca

SEQ ID NO: 1286 - RNA, 23 nt, synthetic construct
  source 1..23: mol_type = other RNA
ttgctgctgagaagattgacagg

SEQ ID NO: 1287 - RNA, 23 nt, synthetic construct
  source 1..23: mol_type = other RNA
tgacaggttcatgcaggctgtga

SEQ ID NO: 1288 - RNA, 23 nt, synthetic construct
  source 1..23: mol_type = other RNA
tcatgcaggctgtgacaggatgg

SEQ ID NO: 1289 - RNA, 23 nt, synthetic construct
  source 1..23: mol_type = other RNA
atgcaggctgtgacaggatggaa

SEQ ID NO: 1290 - RNA, 23 nt, synthetic construct
  source 1..23: mol_type = other RNA
tggacagcaccctggctttcaac

SEQ ID NO: 1291 - RNA, 23 nt, synthetic construct
  source 1..23: mol_type = other RNA
ccctggctttcaacacctacgtc

SEQ ID NO: 1292 - RNA, 23 nt, synthetic construct
  source 1..23: mol_type = other RNA
tggctttcaacacctacgtccac

SEQ ID NO: 1293 - RNA, 23 nt, synthetic construct
  source 1..23: mol_type = other RNA
aacacctacgtccacttccaagg

SEQ ID NO: 1294 - RNA, 23 nt, synthetic construct
  source 1..23: mol_type = other RNA
cgtccacttccaagggaagatga

SEQ ID NO: 1295 - RNA, 23 nt, synthetic construct
  source 1..23: mol_type = other RNA
ccacttccaagggaagatgaagg

SEQ ID NO: 1296 - RNA, 23 nt, synthetic construct
  source 1..23: mol_type = other RNA
cacttccaagggaagatgaaggg

SEQ ID NO: 1297 - RNA, 23 nt, synthetic construct
  source 1..23: mol_type = other RNA
cttccaagggaagatgaagggct

SEQ ID NO: 1298 - RNA, 23 nt, synthetic construct
  source 1..23: mol_type = other RNA
gaagatgaagggcttctccctgc

SEQ ID NO: 1299 - RNA, 23 nt, synthetic construct
  source 1..23: mol_type = other RNA
gtggacaacagcacctcagtgtc

SEQ ID NO: 1300 - RNA, 23 nt, synthetic construct
  source 1..23: mol_type = other RNA
tggacaacagcacctcagtgtct

SEQ ID NO: 1301 - RNA, 23 nt, synthetic construct
  source 1..23: mol_type = other RNA
gacaacagcacctcagtgtctgt

SEQ ID NO: 1302 - RNA, 23 nt, synthetic construct
  source 1..23: mol_type = other RNA
gcacctcagtgtctgttcccatg

SEQ ID NO: 1303 - RNA, 23 nt, synthetic construct
  source 1..23: mol_type = other RNA
ctcagtgtctgttcccatgctct

SEQ ID NO: 1304 - RNA, 23 nt, synthetic construct
  source 1..23: mol_type = other RNA
gtgtctgttcccatgctctctgg

SEQ ID NO: 1305 - RNA, 23 nt, synthetic construct
  source 1..23: mol_type = other RNA
tgtctgttcccatgctctctggc

SEQ ID NO: 1306 - RNA, 23 nt, synthetic construct
  source 1..23: mol_type = other RNA
gtgacatccaggacaacttctcg

SEQ ID NO: 1307 - RNA, 23 nt, synthetic construct
  source 1..23: mol_type = other RNA
tgacatccaggacaacttctcgg

SEQ ID NO: 1308 - RNA, 23 nt, synthetic construct
  source 1..23: mol_type = other RNA
gacatccaggacaacttctcggt

SEQ ID NO: 1309 - RNA, 23 nt, synthetic construct
  source 1..23: mol_type = other RNA
acatccaggacaacttctcggtg

SEQ ID NO: 1310 - RNA, 23 nt, synthetic construct
  source 1..23: mol_type = other RNA
catccaggacaacttctcggtga

SEQ ID NO: 1311 - RNA, 23 nt, synthetic construct
  source 1..23: mol_type = other RNA
atccaggacaacttctcggtgac

SEQ ID NO: 1312 - RNA, 23 nt, synthetic construct
  source 1..23: mol_type = other RNA
tccaggacaacttctcggtgact

SEQ ID NO: 1313 - RNA, 23 nt, synthetic construct
  source 1..23: mol_type = other RNA
caacttctcggtgactcaagtgc

SEQ ID NO: 1314 - RNA, 23 nt, synthetic construct
  source 1..23: mol_type = other RNA
aacttctcggtgactcaagtgcc

SEQ ID NO: 1315 - RNA, 23 nt, synthetic construct
  source 1..23: mol_type = other RNA
gtgactcaagtgcccttcactga

SEQ ID NO: 1316 - RNA, 23 nt, synthetic construct
  source 1..23: mol_type = other RNA
gactcaagtgcccttcactgaga

SEQ ID NO: 1317 - RNA, 23 nt, synthetic construct
  source 1..23: mol_type = other RNA
ctgctgatccagcctcactatgc

SEQ ID NO: 1318 - RNA, 23 nt, synthetic construct
  source 1..23: mol_type = other RNA
aggtggagggtctcactttccag

SEQ ID NO: 1319 - RNA, 23 nt, synthetic construct
  source 1..23: mol_type = other RNA
gtctcactttccagcaaaactcc

SEQ ID NO: 1320 - RNA, 23 nt, synthetic construct
  source 1..23: mol_type = other RNA
tccagcaaaactccctcaactgg

SEQ ID NO: 1321 - RNA, 23 nt, synthetic construct
  source 1..23: mol_type = other RNA
ccagcaaaactccctcaactgga

SEQ ID NO: 1322 - RNA, 23 nt, synthetic construct
  source 1..23: mol_type = other RNA
gcaaaactccctcaactggatga

SEQ ID NO: 1323 - RNA, 23 nt, synthetic construct
  source 1..23: mol_type = other RNA
aaactccctcaactggatgaaga

SEQ ID NO: 1324 - RNA, 23 nt, synthetic construct
  source 1..23: mol_type = other RNA
aactggatgaagaaactatctcc

SEQ ID NO: 1325 - RNA, 23 nt, synthetic construct
  source 1..23: mol_type = other RNA
caactggtgctgcaaggatctta

SEQ ID NO: 1326 - RNA, 23 nt, synthetic construct
  source 1..23: mol_type = other RNA
ctggtgctgcaaggatcttatga

SEQ ID NO: 1327 - RNA, 23 nt, synthetic construct
  source 1..23: mol_type = other RNA
tggtgctgcaaggatcttatgac

SEQ ID NO: 1328 - RNA, 23 nt, synthetic construct
  source 1..23: mol_type = other RNA
ggtgctgcaaggatcttatgacc

SEQ ID NO: 1329 - RNA, 23 nt, synthetic construct
  source 1..23: mol_type = other RNA
atcttatgacctgcaggacctgc

SEQ ID NO: 1330 - RNA, 23 nt, synthetic construct
  source 1..23: mol_type = other RNA
accgagctgaacctgcaaaaatt

SEQ ID NO: 1331 - RNA, 23 nt, synthetic construct
  source 1..23: mol_type = other RNA
ccgagctgaacctgcaaaaattg

SEQ ID NO: 1332 - RNA, 23 nt, synthetic construct
  source 1..23: mol_type = other RNA
cgagctgaacctgcaaaaattga

SEQ ID NO: 1333 - RNA, 23 nt, synthetic construct
  source 1..23: mol_type = other RNA
gagctgaacctgcaaaaattgag

SEQ ID NO: 1334 - RNA, 23 nt, synthetic construct
  source 1..23: mol_type = other RNA
agctgaacctgcaaaaattgagc

SEQ ID NO: 1335 - RNA, 23 nt, synthetic construct
  source 1..23: mol_type = other RNA
gctgaacctgcaaaaattgagca

SEQ ID NO: 1336 - RNA, 23 nt, synthetic construct
  source 1..23: mol_type = other RNA
cctgcaaaaattgagcaatgacc

SEQ ID NO: 1337 - RNA, 23 nt, synthetic construct
  source 1..23: mol_type = other RNA
tgcaaaaattgagcaatgaccgc

SEQ ID NO: 1338 - RNA, 23 nt, synthetic construct
  source 1..23: mol_type = other RNA
aattgagcaatgaccgcatcagg

SEQ ID NO: 1339 - RNA, 23 nt, synthetic construct
  source 1..23: mol_type = other RNA
attgagcaatgaccgcatcaggg

SEQ ID NO: 1340 - RNA, 23 nt, synthetic construct
  source 1..23: mol_type = other RNA
tgagcaatgaccgcatcagggtg

SEQ ID NO: 1341 - RNA, 23 nt, synthetic construct
  source 1..23: mol_type = other RNA
gggaggtgctgaacagcattttt

SEQ ID NO: 1342 - RNA, 23 nt, synthetic construct
  source 1..23: mol_type = other RNA
ttttgagcttgaagcggatgaga

SEQ ID NO: 1343 - RNA, 23 nt, synthetic construct
  source 1..23: mol_type = other RNA
gagtctacccaacagcttaacaa

SEQ ID NO: 1344 - RNA, 23 nt, synthetic construct
  source 1..23: mol_type = other RNA
agtctacccaacagcttaacaag

SEQ ID NO: 1345 - RNA, 23 nt, synthetic construct
  source 1..23: mol_type = other RNA
gtctacccaacagcttaacaagc

SEQ ID NO: 1346 - RNA, 23 nt, synthetic construct
  source 1..23: mol_type = other RNA
acccaacagcttaacaagcctga

SEQ ID NO: 1347 - RNA, 23 nt, synthetic construct
  source 1..23: mol_type = other RNA
caacagcttaacaagcctgaggt

SEQ ID NO: 1348 - RNA, 23 nt, synthetic construct
  source 1..23: mol_type = other RNA
agcttaacaagcctgaggtcttg

SEQ ID NO: 1349 - RNA, 23 nt, synthetic construct
  source 1..23: mol_type = other RNA
gcttaacaagcctgaggtcttgg

SEQ ID NO: 1350 - RNA, 23 nt, synthetic construct
  source 1..23: mol_type = other RNA
cttaacaagcctgaggtcttgga

SEQ ID NO: 1351 - RNA, 23 nt, synthetic construct
  source 1..23: mol_type = other RNA
ttaacaagcctgaggtcttggag

SEQ ID NO: 1352 - RNA, 23 nt, synthetic construct
  source 1..23: mol_type = other RNA
taacaagcctgaggtcttggagg

SEQ ID NO: 1353 - RNA, 23 nt, synthetic construct
  source 1..23: mol_type = other RNA
aacaagcctgaggtcttggaggt

SEQ ID NO: 1354 - RNA, 23 nt, synthetic construct
  source 1..23: mol_type = other RNA
tgaaccgcccattcctgtttgct

SEQ ID NO: 1355 - RNA, 23 nt, synthetic construct
  source 1..23: mol_type = other RNA
gaaccgcccattcctgtttgctg

SEQ ID NO: 1356 - RNA, 23 nt, synthetic construct
  source 1..23: mol_type = other RNA
aaccgcccattcctgtttgctgt

SEQ ID NO: 1357 - RNA, 23 nt, synthetic construct
  source 1..23: mol_type = other RNA
accgcccattcctgtttgctgtg

SEQ ID NO: 1358 - RNA, 23 nt, synthetic construct
  source 1..23: mol_type = other RNA
ccattcctgtttgctgtgtatga

SEQ ID NO: 1359 - RNA, 23 nt, synthetic construct
  source 1..23: mol_type = other RNA
attcctgtttgctgtgtatgatc

SEQ ID NO: 1360 - RNA, 23 nt, synthetic construct
  source 1..23: mol_type = other RNA
tttgctgtgtatgatcaaagcgc

SEQ ID NO: 1361 - RNA, 23 nt, synthetic construct
  source 1..23: mol_type = other RNA
ttgctgtgtatgatcaaagcgcc

SEQ ID NO: 1362 - RNA, 23 nt, synthetic construct
  source 1..23: mol_type = other RNA
tgctgtgtatgatcaaagcgcca

SEQ ID NO: 1363 - RNA, 23 nt, synthetic construct
  source 1..23: mol_type = other RNA
aaaggccagcagcagataacaac

SEQ ID NO: 1364 - RNA, 23 nt, synthetic construct
  source 1..23: mol_type = other RNA
cccggacaaatcagcgatgtgtc

SEQ ID NO: 1365 - RNA, 23 nt, synthetic construct
  source 1..23: mol_type = other RNA
ccggacaaatcagcgatgtgtca

SEQ ID NO: 1366 - RNA, 23 nt, synthetic construct
  source 1..23: mol_type = other RNA
gtctcccaccttttcttctaatg

SEQ ID NO: 1367 - RNA, 23 nt, synthetic construct
  source 1..23: mol_type = other RNA
tctcccaccttttcttctaatga

SEQ ID NO: 1368 - RNA, 23 nt, synthetic construct
  source 1..23: mol_type = other RNA
ctcccaccttttcttctaatgag

SEQ ID NO: 1369 - RNA, 23 nt, synthetic construct
  source 1..23: mol_type = other RNA
ccttttcttctaatgagtcgact

SEQ ID NO: 1370 - RNA, 23 nt, synthetic construct
  source 1..23: mol_type = other RNA
cttttcttctaatgagtcgactt

SEQ ID NO: 1371 - RNA, 23 nt, synthetic construct
  source 1..23: mol_type = other RNA
ttttcttctaatgagtcgacttt

SEQ ID NO: 1372 - RNA, 23 nt, synthetic construct
  source 1..23: mol_type = other RNA
ttcttctaatgagtcgactttga

SEQ ID NO: 1373 - RNA, 23 nt, synthetic construct
  source 1..23: mol_type = other RNA
tcttctaatgagtcgactttgag

SEQ ID NO: 1374 - RNA, 23 nt, synthetic construct
  source 1..23: mol_type = other RNA
cttctaatgagtcgactttgagc

SEQ ID NO: 1375 - RNA, 23 nt, synthetic construct
  source 1..23: mol_type = other RNA
ttctaatgagtcgactttgagct

SEQ ID NO: 1376 - RNA, 23 nt, synthetic construct
  source 1..23: mol_type = other RNA
tctaatgagtcgactttgagctg

SEQ ID NO: 1377 - RNA, 23 nt, synthetic construct
  source 1..23: mol_type = other RNA
tcgactttgagctggaaagcagc

SEQ ID NO: 1378 - RNA, 23 nt, synthetic construct
  source 1..23: mol_type = other RNA
ttgagctggaaagcagccgtttc

SEQ ID NO: 1379 - RNA, 23 nt, synthetic construct
  source 1..23: mol_type = other RNA
tgagctggaaagcagccgtttct

SEQ ID NO: 1380 - RNA, 23 nt, synthetic construct
  source 1..23: mol_type = other RNA
gagctggaaagcagccgtttctc

SEQ ID NO: 1381 - RNA, 23 nt, synthetic construct
  source 1..23: mol_type = other RNA
agctggaaagcagccgtttctcc

SEQ ID NO: 1382 - RNA, 23 nt, synthetic construct
  source 1..23: mol_type = other RNA
ctggaaagcagccgtttctcctt

SEQ ID NO: 1383 - RNA, 23 nt, synthetic construct
  source 1..23: mol_type = other RNA
ggaaagcagccgtttctccttgg

SEQ ID NO: 1384 - RNA, 23 nt, synthetic construct
  source 1..23: mol_type = other RNA
aaagcagccgtttctccttggtc

SEQ ID NO: 1385 - RNA, 23 nt, synthetic construct
  source 1..23: mol_type = other RNA
aagcagccgtttctccttggtct

SEQ ID NO: 1386 - RNA, 23 nt, synthetic construct
  source 1..23: mol_type = other RNA
agcagccgtttctccttggtcta

SEQ ID NO: 1387 - RNA, 23 nt, synthetic construct
  source 1..23: mol_type = other RNA
gccgtttctccttggtctaagtg

SEQ ID NO: 1388 - RNA, 23 nt, synthetic construct
  source 1..23: mol_type = other RNA
ccgtttctccttggtctaagtgt

SEQ ID NO: 1389 - RNA, 23 nt, synthetic construct
  source 1..23: mol_type = other RNA
cgtttctccttggtctaagtgtg

SEQ ID NO: 1390 - RNA, 23 nt, synthetic construct
  source 1..23: mol_type = other RNA
gtttctccttggtctaagtgtgc

SEQ ID NO: 1391 - RNA, 23 nt, synthetic construct
  source 1..23: mol_type = other RNA
tttctccttggtctaagtgtgct

SEQ ID NO: 1392 - RNA, 23 nt, synthetic construct
  source 1..23: mol_type = other RNA
tctccttggtctaagtgtgctgc

SEQ ID NO: 1393 - RNA, 23 nt, synthetic construct
  source 1..23: mol_type = other RNA
ggtctaagtgtgctgcatggagt

SEQ ID NO: 1394 - RNA, 23 nt, synthetic construct
  source 1..23: mol_type = other RNA
taagtgtgctgcatggagtgagc

SEQ ID NO: 1395 - RNA, 23 nt, synthetic construct
  source 1..23: mol_type = other RNA
tgcatggagtgagcagtagaagc

SEQ ID NO: 1396 - RNA, 23 nt, synthetic construct
  source 1..23: mol_type = other RNA
tggagtgagcagtagaagcctgc

SEQ ID NO: 1397 - RNA, 23 nt, synthetic construct
  source 1..23: mol_type = other RNA
cacaaatgcacctcccagtttgc

SEQ ID NO: 1398 - RNA, 23 nt, synthetic construct
  source 1..23: mol_type = other RNA
acaaatgcacctcccagtttgct

SEQ ID NO: 1399 - RNA, 23 nt, synthetic construct
  source 1..23: mol_type = other RNA
caaatgcacctcccagtttgctg

SEQ ID NO: 1400 - RNA, 23 nt, synthetic construct
  source 1..23: mol_type = other RNA
aaatgcacctcccagtttgctgg

SEQ ID NO: 1401 - RNA, 23 nt, synthetic construct
  source 1..23: mol_type = other RNA
aatgcacctcccagtttgctggg

SEQ ID NO: 1402 - RNA, 23 nt, synthetic construct
  source 1..23: mol_type = other RNA
acctcccagtttgctgggtttat

SEQ ID NO: 1403 - RNA, 23 nt, synthetic construct
  source 1..23: mol_type = other RNA
ctcccagtttgctgggtttattt

SEQ ID NO: 1404 - RNA, 23 nt, synthetic construct
  source 1..23: mol_type = other RNA
tcccagtttgctgggtttatttt

SEQ ID NO: 1405 - RNA, 23 nt, synthetic construct
  source 1..23: mol_type = other RNA
cccagtttgctgggtttatttta

SEQ ID NO: 1406 - RNA, 23 nt, synthetic construct
  source 1..23: mol_type = other RNA
ccagtttgctgggtttattttag

SEQ ID NO: 1407 - RNA, 23 nt, synthetic construct
  source 1..23: mol_type = other RNA
cagtttgctgggtttattttaga

SEQ ID NO: 1408 - RNA, 23 nt, synthetic construct
  source 1..23: mol_type = other RNA
agtttgctgggtttattttagag

SEQ ID NO: 1409 - RNA, 23 nt, synthetic construct
  source 1..23: mol_type = other RNA
gtttgctgggtttattttagaga

SEQ ID NO: 1410 - RNA, 23 nt, synthetic construct
  source 1..23: mol_type = other RNA
tttgctgggtttattttagagaa

SEQ ID NO: 1411 - RNA, 23 nt, synthetic construct
  source 1..23: mol_type = other RNA
ctgggtttattttagagaatggg

SEQ ID NO: 1412 - RNA, 23 nt, synthetic construct
  source 1..23: mol_type = other RNA
tggggaggcaagaaccagtgttt

SEQ ID NO: 1413 - RNA, 23 nt, synthetic construct
  source 1..23: mol_type = other RNA
ggggaggcaagaaccagtgttta

SEQ ID NO: 1414 - RNA, 23 nt, synthetic construct
  source 1..23: mol_type = other RNA
ggaggcaagaaccagtgtttagc

SEQ ID NO: 1415 - RNA, 23 nt, synthetic construct
  source 1..23: mol_type = other RNA
gaggcaagaaccagtgtttagcg

SEQ ID NO: 1416 - RNA, 23 nt, synthetic construct
  source 1..23: mol_type = other RNA
agtgtttagcgcgggactactgt

SEQ ID NO: 1417 - RNA, 23 nt, synthetic construct
  source 1..23: mol_type = other RNA
gggactactgttccaaaaagaat

SEQ ID NO: 1418 - RNA, 23 nt, synthetic construct
  source 1..23: mol_type = other RNA
ctactgttccaaaaagaattcca

SEQ ID NO: 1419 - RNA, 23 nt, synthetic construct
  source 1..23: mol_type = other RNA
tactgttccaaaaagaattccaa

SEQ ID NO: 1420 - RNA, 23 nt, synthetic construct
  source 1..23: mol_type = other RNA
tccaaaaagaattccaaccgacc

SEQ ID NO: 1421 - RNA, 23 nt, synthetic construct
  source 1..23: mol_type = other RNA
caaccgaccagcttgtttgtgaa

SEQ ID NO: 1422 - RNA, 23 nt, synthetic construct
  source 1..23: mol_type = other RNA
aaaaagtgttcccttttcaagtt

SEQ ID NO: 1423 - RNA, 23 nt, synthetic construct
  source 1..23: mol_type = other RNA
aaagtgttcccttttcaagttga

SEQ ID NO: 1424 - RNA, 23 nt, synthetic construct
  source 1..23: mol_type = other RNA
aagtgttcccttttcaagttgag

SEQ ID NO: 1425 - RNA, 23 nt, synthetic construct
  source 1..23: mol_type = other RNA
agtgttcccttttcaagttgaga

SEQ ID NO: 1426 - RNA, 23 nt, synthetic construct
  source 1..23: mol_type = other RNA
gtgttcccttttcaagttgagaa

SEQ ID NO: 1427 - RNA, 23 nt, synthetic construct
  source 1..23: mol_type = other RNA
ttcaagttgagaacaaaaattgg

SEQ ID NO: 1428 - RNA, 23 nt, synthetic construct
  source 1..23: mol_type = other RNA
tcaagttgagaacaaaaattggg

SEQ ID NO: 1429 - RNA, 23 nt, synthetic construct
  source 1..23: mol_type = other RNA
aagttgagaacaaaaattgggtt

SEQ ID NO: 1430 - RNA, 23 nt, synthetic construct
  source 1..23: mol_type = other RNA
agttgagaacaaaaattgggttt

SEQ ID NO: 1431 - RNA, 23 nt, synthetic construct
  source 1..23: mol_type = other RNA
gttgagaacaaaaattgggtttt

SEQ ID NO: 1432 - RNA, 23 nt, synthetic construct
  source 1..23: mol_type = other RNA
ttgagaacaaaaattgggtttta

SEQ ID NO: 1433 - RNA, 23 nt, synthetic construct
  source 1..23: mol_type = other RNA
tgagaacaaaaattgggttttaa

SEQ ID NO: 1434 - RNA, 23 nt, synthetic construct
  source 1..23: mol_type = other RNA
gagaacaaaaattgggttttaaa

SEQ ID NO: 1435 - RNA, 23 nt, synthetic construct
  source 1..23: mol_type = other RNA
aagtatacatttttgcattgcct

SEQ ID NO: 1436 - RNA, 23 nt, synthetic construct
  source 1..23: mol_type = other RNA
gtatacatttttgcattgccttc

SEQ ID NO: 1437 - RNA, 23 nt, synthetic construct
  source 1..23: mol_type = other RNA
tacatttttgcattgccttcggt

SEQ ID NO: 1438 - RNA, 23 nt, synthetic construct
  source 1..23: mol_type = other RNA
acatttttgcattgccttcggtt

SEQ ID NO: 1439 - RNA, 23 nt, synthetic construct
  source 1..23: mol_type = other RNA
catttttgcattgccttcggttt

SEQ ID NO: 1440 - RNA, 23 nt, synthetic construct
  source 1..23: mol_type = other RNA
atttttgcattgccttcggtttg

SEQ ID NO: 1441 - RNA, 23 nt, synthetic construct
  source 1..23: mol_type = other RNA
tttttgcattgccttcggtttgt

SEQ ID NO: 1442 - RNA, 23 nt, synthetic construct
  source 1..23: mol_type = other RNA
ttttgcattgccttcggtttgta

SEQ ID NO: 1443 - RNA, 23 nt, synthetic construct
  source 1..23: mol_type = other RNA
tttgcattgccttcggtttgtat

SEQ ID NO: 1444 - RNA, 23 nt, synthetic construct
  source 1..23: mol_type = other RNA
ttgcattgccttcggtttgtatt

SEQ ID NO: 1445 - RNA, 23 nt, synthetic construct
  source 1..23: mol_type = other RNA
tgcattgccttcggtttgtattt

SEQ ID NO: 1446 - RNA, 23 nt, synthetic construct
  source 1..23: mol_type = other RNA
gcattgccttcggtttgtattta

SEQ ID NO: 1447 - RNA, 23 nt, synthetic construct
  source 1..23: mol_type = other RNA
cattgccttcggtttgtatttag

SEQ ID NO: 1448 - RNA, 23 nt, synthetic construct
  source 1..23: mol_type = other RNA
attgccttcggtttgtatttagt

SEQ ID NO: 1449 - RNA, 23 nt, synthetic construct
  source 1..23: mol_type = other RNA
ttgccttcggtttgtatttagtg

SEQ ID NO: 1450 - RNA, 23 nt, synthetic construct
  source 1..23: mol_type = other RNA
tgccttcggtttgtatttagtgt

SEQ ID NO: 1451 - RNA, 23 nt, synthetic construct
  source 1..23: mol_type = other RNA
gccttcggtttgtatttagtgtc

SEQ ID NO: 1452 - RNA, 23 nt, synthetic construct
  source 1..23: mol_type = other RNA
tcggtttgtatttagtgtcttga

SEQ ID NO: 1453 - RNA, 23 nt, synthetic construct
  source 1..23: mol_type = other RNA
tttgtatttagtgtcttgaatgt

SEQ ID NO: 1454 - RNA, 23 nt, synthetic construct
  source 1..23: mol_type = other RNA
tgtatttagtgtcttgaatgtaa

SEQ ID NO: 1455 - RNA, 23 nt, synthetic construct
  source 1..23: mol_type = other RNA
tatttagtgtcttgaatgtaaga

SEQ ID NO: 1456 - RNA, 23 nt, synthetic construct
  source 1..23: mol_type = other RNA
gtgtcttgaatgtaagaacatga

SEQ ID NO: 1457 - RNA, 23 nt, synthetic construct
  source 1..23: mol_type = other RNA
atgtaagaacatgacctccgtgt

SEQ ID NO: 1458 - RNA, 23 nt, synthetic construct
  source 1..23: mol_type = other RNA
tgtaagaacatgacctccgtgta

SEQ ID NO: 1459 - RNA, 23 nt, synthetic construct
  source 1..23: mol_type = other RNA
gtaagaacatgacctccgtgtag

SEQ ID NO: 1460 - RNA, 23 nt, synthetic construct
  source 1..23: mol_type = other RNA
taagaacatgacctccgtgtagt

SEQ ID NO: 1461 - RNA, 23 nt, synthetic construct
  source 1..23: mol_type = other RNA
aagaacatgacctccgtgtagtg

SEQ ID NO: 1462 - RNA, 23 nt, synthetic construct
  source 1..23: mol_type = other RNA
agaacatgacctccgtgtagtgt

SEQ ID NO: 1463 - RNA, 23 nt, synthetic construct
  source 1..23: mol_type = other RNA
gaacatgacctccgtgtagtgtc

SEQ ID NO: 1464 - RNA, 23 nt, synthetic construct
  source 1..23: mol_type = other RNA
catgacctccgtgtagtgtctgt

SEQ ID NO: 1465 - RNA, 23 nt, synthetic construct
  source 1..23: mol_type = other RNA
ctccgtgtagtgtctgtaatacc

SEQ ID NO: 1466 - RNA, 23 nt, synthetic construct
  source 1..23: mol_type = other RNA
tccgtgtagtgtctgtaatacct

SEQ ID NO: 1467 - RNA, 23 nt, synthetic construct
  source 1..23: mol_type = other RNA
ccgtgtagtgtctgtaatacctt

SEQ ID NO: 1468 - RNA, 23 nt, synthetic construct
  source 1..23: mol_type = other RNA
cgtgtagtgtctgtaatacctta

SEQ ID NO: 1469 - RNA, 23 nt, synthetic construct
  source 1..23: mol_type = other RNA
gtagtgtctgtaataccttagtt

SEQ ID NO: 1470 - RNA, 23 nt, synthetic construct
  source 1..23: mol_type = other RNA
tagtgtctgtaataccttagttt

SEQ ID NO: 1471 - RNA, 23 nt, synthetic construct
  source 1..23: mol_type = other RNA
agtgtctgtaataccttagtttt

SEQ ID NO: 1472 - RNA, 23 nt, synthetic construct
  source 1..23: mol_type = other RNA
gtgtctgtaataccttagttttt

SEQ ID NO: 1473 - RNA, 23 nt, synthetic construct
  source 1..23: mol_type = other RNA
tttttccacagatgcttgtgatt

SEQ ID NO: 1474 - RNA, 23 nt, synthetic construct
  source 1..23: mol_type = other RNA
tccacagatgcttgtgatttttg

SEQ ID NO: 1475 - RNA, 23 nt, synthetic construct
  source 1..23: mol_type = other RNA
ccacagatgcttgtgatttttga

SEQ ID NO: 1476 - RNA, 23 nt, synthetic construct
  source 1..23: mol_type = other RNA
cacagatgcttgtgatttttgaa

SEQ ID NO: 1477 - RNA, 23 nt, synthetic construct
  source 1..23: mol_type = other RNA
acagatgcttgtgatttttgaac

SEQ ID NO: 1478 - RNA, 23 nt, synthetic construct
  source 1..23: mol_type = other RNA
cagatgcttgtgatttttgaaca

SEQ ID NO: 1479 - RNA, 23 nt, synthetic construct
  source 1..23: mol_type = other RNA
cttgtgatttttgaacaatacgt

SEQ ID NO: 1480 - RNA, 23 nt, synthetic construct
  source 1..23: mol_type = other RNA
ttgtgatttttgaacaatacgtg

SEQ ID NO: 1481 - RNA, 23 nt, synthetic construct
  source 1..23: mol_type = other RNA
tgtgatttttgaacaatacgtga

SEQ ID NO: 1482 - RNA, 23 nt, synthetic construct
  source 1..23: mol_type = other RNA
gtgatttttgaacaatacgtgaa

SEQ ID NO: 1483 - RNA, 23 nt, synthetic construct
  source 1..23: mol_type = other RNA
tgatttttgaacaatacgtgaaa

SEQ ID NO: 1484 - RNA, 23 nt, synthetic construct
  source 1..23: mol_type = other RNA
tttgaacaatacgtgaaagatgc

SEQ ID NO: 1485 - RNA, 23 nt, synthetic construct
  source 1..23: mol_type = other RNA
aagatgcaagcacctgaatttct

SEQ ID NO: 1486 - RNA, 23 nt, synthetic construct
  source 1..23: mol_type = other RNA
agatgcaagcacctgaatttctg

SEQ ID NO: 1487 - RNA, 23 nt, synthetic construct
  source 1..23: mol_type = other RNA
gatgcaagcacctgaatttctgt

SEQ ID NO: 1488 - RNA, 23 nt, synthetic construct
  source 1..23: mol_type = other RNA
atgcaagcacctgaatttctgtt

SEQ ID NO: 1489 - RNA, 23 nt, synthetic construct
  source 1..23: mol_type = other RNA
tgcaagcacctgaatttctgttt

SEQ ID NO: 1490 - RNA, 23 nt, synthetic construct
  source 1..23: mol_type = other RNA
gcaagcacctgaatttctgtttg

SEQ ID NO: 1491 - RNA, 23 nt, synthetic construct
  source 1..23: mol_type = other RNA
caagcacctgaatttctgtttga

SEQ ID NO: 1492 - RNA, 23 nt, synthetic construct
  source 1..23: mol_type = other RNA
aagcacctgaatttctgtttgaa

SEQ ID NO: 1493 - RNA, 23 nt, synthetic construct
  source 1..23: mol_type = other RNA
agcacctgaatttctgtttgaat

SEQ ID NO: 1494 - RNA, 23 nt, synthetic construct
  source 1..23: mol_type = other RNA
gcacctgaatttctgtttgaatg

SEQ ID NO: 1495 - RNA, 23 nt, synthetic construct
  source 1..23: mol_type = other RNA
cacctgaatttctgtttgaatgc

SEQ ID NO: 1496 - RNA, 23 nt, synthetic construct
  source 1..23: mol_type = other RNA
cctgaatttctgtttgaatgcgg

SEQ ID NO: 1497 - RNA, 23 nt, synthetic construct
  source 1..23: mol_type = other RNA
ctgaatttctgtttgaatgcgga

SEQ ID NO: 1498 - RNA, 23 nt, synthetic construct
  source 1..23: mol_type = other RNA
tgaatttctgtttgaatgcggaa

SEQ ID NO: 1499 - RNA, 23 nt, synthetic construct
  source 1..23: mol_type = other RNA
gtttgaatgcggaaccatagctg

SEQ ID NO: 1500 - RNA, 23 nt, synthetic construct
  source 1..23: mol_type = other RNA
tttgaatgcggaaccatagctgg

SEQ ID NO: 1501 - RNA, 23 nt, synthetic construct
  source 1..23: mol_type = other RNA
ttgaatgcggaaccatagctggt

SEQ ID NO: 1502 - RNA, 23 nt, synthetic construct
  source 1..23: mol_type = other RNA
tgcggaaccatagctggttattt

SEQ ID NO: 1503 - RNA, 23 nt, synthetic construct
  source 1..23: mol_type = other RNA
gcggaaccatagctggttatttc

SEQ ID NO: 1504 - RNA, 23 nt, synthetic construct
  source 1..23: mol_type = other RNA
cggaaccatagctggttatttct

SEQ ID NO: 1505 - RNA, 23 nt, synthetic construct
  source 1..23: mol_type = other RNA
ggaaccatagctggttatttctc

SEQ ID NO: 1506 - RNA, 23 nt, synthetic construct
  source 1..23: mol_type = other RNA
gaaccatagctggttatttctcc

SEQ ID NO: 1507 - RNA, 23 nt, synthetic construct
  source 1..23: mol_type = other RNA
aaccatagctggttatttctccc

SEQ ID NO: 1508 - RNA, 23 nt, synthetic construct
  source 1..23: mol_type = other RNA
accatagctggttatttctccct

SEQ ID NO: 1509 - RNA, 23 nt, synthetic construct
  source 1..23: mol_type = other RNA
agctggttatttctcccttgtgt

SEQ ID NO: 1510 - RNA, 23 nt, synthetic construct
  source 1..23: mol_type = other RNA
gctggttatttctcccttgtgtt

SEQ ID NO: 1511 - RNA, 23 nt, synthetic construct
  source 1..23: mol_type = other RNA
ctggttatttctcccttgtgtta

SEQ ID NO: 1512 - RNA, 23 nt, synthetic construct
  source 1..23: mol_type = other RNA
ggttatttctcccttgtgttagt

SEQ ID NO: 1513 - RNA, 23 nt, synthetic construct
  source 1..23: mol_type = other RNA
gttatttctcccttgtgttagta

SEQ ID NO: 1514 - RNA, 23 nt, synthetic construct
  source 1..23: mol_type = other RNA
ttatttctcccttgtgttagtaa

SEQ ID NO: 1515 - RNA, 23 nt, synthetic construct
  source 1..23: mol_type = other RNA
tatttctcccttgtgttagtaat

SEQ ID NO: 1516 - RNA, 23 nt, synthetic construct
  source 1..23: mol_type = other RNA
tctcccttgtgttagtaataaac

SEQ ID NO: 1517 - RNA, 23 nt, synthetic construct
  source 1..23: mol_type = other RNA
ctcccttgtgttagtaataaacg

SEQ ID NO: 1518 - RNA, 23 nt, synthetic construct
  source 1..23: mol_type = other RNA
tcccttgtgttagtaataaacgt

SEQ ID NO: 1519 - RNA, 23 nt, synthetic construct
  source 1..23: mol_type = other RNA
cccttgtgttagtaataaacgtc

SEQ ID NO: 1520 - RNA, 23 nt, synthetic construct
  source 1..23: mol_type = other RNA
ccttgtgttagtaataaacgtct

SEQ ID NO: 1521 - RNA, 23 nt, synthetic construct
  source 1..23: mol_type = other RNA
cttgtgttagtaataaacgtctt

SEQ ID NO: 1522 - RNA, 23 nt, synthetic construct
  source 1..23: mol_type = other RNA
ttgtgttagtaataaacgtcttg

SEQ ID NO: 1523 - RNA, 23 nt, synthetic construct
  source 1..23: mol_type = other RNA
tgtgttagtaataaacgtcttgc

SEQ ID NO: 1524 - RNA, 23 nt, synthetic construct
  source 1..23: mol_type = other RNA
gtgttagtaataaacgtcttgcc

SEQ ID NO: 1525 - RNA, 23 nt, synthetic construct
  source 1..23: mol_type = other RNA
tgttagtaataaacgtcttgcca

SEQ ID NO: 1526 - RNA, 23 nt, synthetic construct
  source 1..23: mol_type = other RNA
ataaacgtcttgccacaataagc

SEQ ID NO: 1527 - RNA, 23 nt, synthetic construct
  source 1..23: mol_type = other RNA
taaacgtcttgccacaataagcc

SEQ ID NO: 1528 - RNA, 23 nt, synthetic construct
  source 1..23: mol_type = other RNA
aaacgtcttgccacaataagcct

SEQ ID NO: 1529 - RNA, 23 nt, synthetic construct
  source 1..23: mol_type = other RNA
caagttgagaacaaaaattgggt

SEQ ID NO: 1530 - RNA, 21 nt, synthetic construct
  source 1..21: mol_type = other RNA
agcctgagggccaccatcctt

SEQ ID NO: 1531 - RNA, 21 nt, synthetic construct
  source 1..21: mol_type = other RNA
cctgagggccaccatcctctt

SEQ ID NO: 1532 - RNA, 21 nt, synthetic construct
  source 1..21: mol_type = other RNA
agggccaccatcctctgcctt

SEQ ID NO: 1533 - RNA, 21 nt, synthetic construct
  source 1..21: mol_type = other RNA
gtgaccgggtgtacatacact

SEQ ID NO: 1534 - RNA, 21 nt, synthetic construct
  source 1..21: mol_type = other RNA
cttccacctcgtcatccacat

SEQ ID NO: 1535 - RNA, 21 nt, synthetic construct
  source 1..21: mol_type = other RNA
ttccacctcgtcatccacaat

SEQ ID NO: 1536 - RNA, 21 nt, synthetic construct
  source 1..21: mol_type = other RNA
tccacctcgtcatccacaatt

SEQ ID NO: 1537 - RNA, 21 nt, synthetic construct
  source 1..21: mol_type = other RNA
ccacctcgtcatccacaatgt

SEQ ID NO: 1538 - RNA, 21 nt, synthetic construct
  source 1..21: mol_type = other RNA
cacctcgtcatccacaatgat

SEQ ID NO: 1539 - RNA, 21 nt, synthetic construct
  source 1..21: mol_type = other RNA
acctcgtcatccacaatgagt

SEQ ID NO: 1540 - RNA, 21 nt, synthetic construct
  source 1..21: mol_type = other RNA
cctcgtcatccacaatgagat

SEQ ID NO: 1541 - RNA, 21 nt, synthetic construct
  source 1..21: mol_type = other RNA
ctcgtcatccacaatgagagt

SEQ ID NO: 1542 - RNA, 21 nt, synthetic construct
  source 1..21: mol_type = other RNA
tcgtcatccacaatgagagtt

SEQ ID NO: 1543 - RNA, 21 nt, synthetic construct
  source 1..21: mol_type = other RNA
cgtcatccacaatgagagtat

SEQ ID NO: 1544 - RNA, 21 nt, synthetic construct
  source 1..21: mol_type = other RNA
gtcatccacaatgagagtact

SEQ ID NO: 1545 - RNA, 21 nt, synthetic construct
  source 1..21: mol_type = other RNA
tcatccacaatgagagtacct

SEQ ID NO: 1546 - RNA, 21 nt, synthetic construct
  source 1..21: mol_type = other RNA
catccacaatgagagtacctt

SEQ ID NO: 1547 - RNA, 21 nt, synthetic construct
  source 1..21: mol_type = other RNA
tccacaatgagagtacctgtt

SEQ ID NO: 1548 - RNA, 21 nt, synthetic construct
  source 1..21: mol_type = other RNA
ccacaatgagagtacctgtgt

SEQ ID NO: 1549 - RNA, 21 nt, synthetic construct
  source 1..21: mol_type = other RNA
cacaatgagagtacctgtgat

SEQ ID NO: 1550 - RNA, 21 nt, synthetic construct
  source 1..21: mol_type = other RNA
caatgagagtacctgtgagct

SEQ ID NO: 1551 - RNA, 21 nt, synthetic construct
  source 1..21: mol_type = other RNA
aatgagagtacctgtgagcat

SEQ ID NO: 1552 - RNA, 21 nt, synthetic construct
  source 1..21: mol_type = other RNA
atgagagtacctgtgagcagt

SEQ ID NO: 1553 - RNA, 21 nt, synthetic construct
  source 1..21: mol_type = other RNA
tgagagtacctgtgagcagct

SEQ ID NO: 1554 - RNA, 21 nt, synthetic construct
  source 1..21: mol_type = other RNA
gagagtacctgtgagcagctt

SEQ ID NO: 1555 - RNA, 21 nt, synthetic construct
  source 1..21: mol_type = other RNA
agagtacctgtgagcagctgt

SEQ ID NO: 1556 - RNA, 21 nt, synthetic construct
  source 1..21: mol_type = other RNA
gagtacctgtgagcagctggt

SEQ ID NO: 1557 - RNA, 21 nt, synthetic construct
  source 1..21: mol_type = other RNA
agtacctgtgagcagctggct

SEQ ID NO: 1558 - RNA, 21 nt, synthetic construct
  source 1..21: mol_type = other RNA
gtacctgtgagcagctggcat

SEQ ID NO: 1559 - RNA, 21 nt, synthetic construct
  source 1..21: mol_type = other RNA
tacctgtgagcagctggcaat

SEQ ID NO: 1560 - RNA, 21 nt, synthetic construct
  source 1..21: mol_type = other RNA
aatggtcgggatgctggccat

SEQ ID NO: 1561 - RNA, 21 nt, synthetic construct
  source 1..21: mol_type = other RNA
atggtcgggatgctggccaat

SEQ ID NO: 1562 - RNA, 21 nt, synthetic construct
  source 1..21: mol_type = other RNA
tggtcgggatgctggccaact

SEQ ID NO: 1563 - RNA, 21 nt, synthetic construct
  source 1..21: mol_type = other RNA
ggtcgggatgctggccaactt

SEQ ID NO: 1564 - RNA, 21 nt, synthetic construct
  source 1..21: mol_type = other RNA
gtcgggatgctggccaacttt

SEQ ID NO: 1565 - RNA, 21 nt, synthetic construct
  source 1..21: mol_type = other RNA
tcgggatgctggccaacttct

SEQ ID NO: 1566 - RNA, 21 nt, synthetic construct
  source 1..21: mol_type = other RNA
cgggatgctggccaacttctt

SEQ ID NO: 1567 - RNA, 21 nt, synthetic construct
  source 1..21: mol_type = other RNA
ggatgctggccaacttcttgt

SEQ ID NO: 1568 - RNA, 21 nt, synthetic construct
  source 1..21: mol_type = other RNA
gatgctggccaacttcttggt

SEQ ID NO: 1569 - RNA, 21 nt, synthetic construct
  source 1..21: mol_type = other RNA
ctggccaacttcttgggcttt

SEQ ID NO: 1570 - RNA, 21 nt, synthetic construct
  source 1..21: mol_type = other RNA
gccaacttcttgggcttccgt

SEQ ID NO: 1571 - RNA, 21 nt, synthetic construct
  source 1..21: mol_type = other RNA
ccaacttcttgggcttccgtt

SEQ ID NO: 1572 - RNA, 21 nt, synthetic construct
  source 1..21: mol_type = other RNA
cttcttgggcttccgtatatt

SEQ ID NO: 1573 - RNA, 21 nt, synthetic construct
  source 1..21: mol_type = other RNA
ttcttgggcttccgtatatat

SEQ ID NO: 1574 - RNA, 21 nt, synthetic construct
  source 1..21: mol_type = other RNA
cttgggcttccgtatatatgt

SEQ ID NO: 1575 - RNA, 21 nt, synthetic construct
  source 1..21: mol_type = other RNA
tgggcttccgtatatatggct

SEQ ID NO: 1576 - RNA, 21 nt, synthetic construct
  source 1..21: mol_type = other RNA
gggcttccgtatatatggcat

SEQ ID NO: 1577 - RNA, 21 nt, synthetic construct
  source 1..21: mol_type = other RNA
ggcttccgtatatatggcatt

SEQ ID NO: 1578 - RNA, 21 nt, synthetic construct
  source 1..21: mol_type = other RNA
gcttccgtatatatggcatgt

SEQ ID NO: 1579 - RNA, 21 nt, synthetic construct
  source 1..21: mol_type = other RNA
tatatatggcatgcacagtgt

SEQ ID NO: 1580 - RNA, 21 nt, synthetic construct
  source 1..21: mol_type = other RNA
atatatggcatgcacagtgat

SEQ ID NO: 1581 - RNA, 21 nt, synthetic construct
  source 1..21: mol_type = other RNA
atatggcatgcacagtgagct

SEQ ID NO: 1582 - RNA, 21 nt, synthetic construct
  source 1..21: mol_type = other RNA
tatggcatgcacagtgagctt

SEQ ID NO: 1583 - RNA, 21 nt, synthetic construct
  source 1..21: mol_type = other RNA
atggcatgcacagtgagctat

SEQ ID NO: 1584 - RNA, 21 nt, synthetic construct
  source 1..21: mol_type = other RNA
tggcatgcacagtgagctatt

SEQ ID NO: 1585 - RNA, 21 nt, synthetic construct
  source 1..21: mol_type = other RNA
ggcatgcacagtgagctatgt

SEQ ID NO: 1586 - RNA, 21 nt, synthetic construct
  source 1..21: mol_type = other RNA
tggcaccctggcctctctctt

SEQ ID NO: 1587 - RNA, 21 nt, synthetic construct
  source 1..21: mol_type = other RNA
ggcaccctggcctctctctat

SEQ ID NO: 1588 - RNA, 21 nt, synthetic construct
  source 1..21: mol_type = other RNA
ttccttggaaggacaagaact

SEQ ID NO: 1589 - RNA, 21 nt, synthetic construct
  source 1..21: mol_type = other RNA
cttggaaggacaagaactgct

SEQ ID NO: 1590 - RNA, 21 nt, synthetic construct
  source 1..21: mol_type = other RNA
ctgaagcagccgtttgtgcat

SEQ ID NO: 1591 - RNA, 21 nt, synthetic construct
  source 1..21: mol_type = other RNA
tttgtgcagggcctggctctt

SEQ ID NO: 1592 - RNA, 21 nt, synthetic construct
  source 1..21: mol_type = other RNA
ttgtgcagggcctggctctct

SEQ ID NO: 1593 - RNA, 21 nt, synthetic construct
  source 1..21: mol_type = other RNA
tgtgcagggcctggctctctt

SEQ ID NO: 1594 - RNA, 21 nt, synthetic construct
  source 1..21: mol_type = other RNA
gtgcagggcctggctctctat

SEQ ID NO: 1595 - RNA, 21 nt, synthetic construct
  source 1..21: mol_type = other RNA
tgcagggcctggctctctatt

SEQ ID NO: 1596 - RNA, 21 nt, synthetic construct
  source 1..21: mol_type = other RNA
acgctctctggacttcacagt

SEQ ID NO: 1597 - RNA, 21 nt, synthetic construct
  source 1..21: mol_type = other RNA
cgctctctggacttcacagat

SEQ ID NO: 1598 - RNA, 21 nt, synthetic construct
  source 1..21: mol_type = other RNA
ctgagaagattgacaggttct

SEQ ID NO: 1599 - RNA, 21 nt, synthetic construct
  source 1..21: mol_type = other RNA
tgagaagattgacaggttcat

SEQ ID NO: 1600 - RNA, 21 nt, synthetic construct
  source 1..21: mol_type = other RNA
gagaagattgacaggttcatt

SEQ ID NO: 1601 - RNA, 21 nt, synthetic construct
  source 1..21: mol_type = other RNA
agaagattgacaggttcatgt

SEQ ID NO: 1602 - RNA, 21 nt, synthetic construct
  source 1..21: mol_type = other RNA
gaagattgacaggttcatgct

SEQ ID NO: 1603 - RNA, 21 nt, synthetic construct
  source 1..21: mol_type = other RNA
aagattgacaggttcatgcat

SEQ ID NO: 1604 - RNA, 21 nt, synthetic construct
  source 1..21: mol_type = other RNA
agattgacaggttcatgcagt

SEQ ID NO: 1605 - RNA, 21 nt, synthetic construct
  source 1..21: mol_type = other RNA
gattgacaggttcatgcaggt

SEQ ID NO: 1606 - RNA, 21 nt, synthetic construct
  source 1..21: mol_type = other RNA
attgacaggttcatgcaggct

SEQ ID NO: 1607 - RNA, 21 nt, synthetic construct
  source 1..21: mol_type = other RNA
ttgacaggttcatgcaggctt

SEQ ID NO: 1608 - RNA, 21 nt, synthetic construct
  source 1..21: mol_type = other RNA
tgacaggttcatgcaggctgt

SEQ ID NO: 1609 - RNA, 21 nt, synthetic construct
  source 1..21: mol_type = other RNA
gacaggttcatgcaggctgtt

SEQ ID NO: 1610 - RNA, 21 nt, synthetic construct
  source 1..21: mol_type = other RNA
gttcatgcaggctgtgacagt

SEQ ID NO: 1611 - RNA, 21 nt, synthetic construct
  source 1..21: mol_type = other RNA
caggctgtgacaggatggaat

SEQ ID NO: 1612 - RNA, 21 nt, synthetic construct
  source 1..21: mol_type = other RNA
gagttctgggtggacaacagt

SEQ ID NO: 1613 - RNA, 21 nt, synthetic construct
  source 1..21: mol_type = other RNA
acaacagcacctcagtgtctt

SEQ ID NO: 1614 - RNA, 21 nt, synthetic construct
  source 1..21: mol_type = other RNA
aacagcacctcagtgtctgtt

SEQ ID NO: 1615 - RNA, 21 nt, synthetic construct
  source 1..21: mol_type = other RNA
atgcctctgacctggacaagt

SEQ ID NO: 1616 - RNA, 21 nt, synthetic construct
  source 1..21: mol_type = other RNA
tgcctctgacctggacaaggt

SEQ ID NO: 1617 - RNA, 21 nt, synthetic construct
  source 1..21: mol_type = other RNA
aaggtggagggtctcactttt

SEQ ID NO: 1618 - RNA, 21 nt, synthetic construct
  source 1..21: mol_type = other RNA
aggtggagggtctcactttct

SEQ ID NO: 1619 - RNA, 21 nt, synthetic construct
  source 1..21: mol_type = other RNA
ggtggagggtctcactttcct

SEQ ID NO: 1620 - RNA, 21 nt, synthetic construct
  source 1..21: mol_type = other RNA
gagggtctcactttccagcat

SEQ ID NO: 1621 - RNA, 21 nt, synthetic construct
  source 1..21: mol_type = other RNA
agggtctcactttccagcaat

SEQ ID NO: 1622 - RNA, 21 nt, synthetic construct
  source 1..21: mol_type = other RNA
gggtctcactttccagcaaat

SEQ ID NO: 1623 - RNA, 21 nt, synthetic construct
  source 1..21: mol_type = other RNA
ggtctcactttccagcaaaat

SEQ ID NO: 1624 - RNA, 21 nt, synthetic construct
  source 1..21: mol_type = other RNA
gtctcactttccagcaaaact

SEQ ID NO: 1625 - RNA, 21 nt, synthetic construct
  source 1..21: mol_type = other RNA
tctcactttccagcaaaactt

SEQ ID NO: 1626 - RNA, 21 nt, synthetic construct
  source 1..21: mol_type = other RNA
tcactttccagcaaaactcct

SEQ ID NO: 1627 - RNA, 21 nt, synthetic construct
  source 1..21: mol_type = other RNA
cactttccagcaaaactccct

SEQ ID NO: 1628 - RNA, 21 nt, synthetic construct
  source 1..21: mol_type = other RNA
actttccagcaaaactccctt

SEQ ID NO: 1629 - RNA, 21 nt, synthetic construct
  source 1..21: mol_type = other RNA
ctttccagcaaaactccctct

SEQ ID NO: 1630 - RNA, 21 nt, synthetic construct
  source 1..21: mol_type = other RNA
tttccagcaaaactccctcat

SEQ ID NO: 1631 - RNA, 21 nt, synthetic construct
  source 1..21: mol_type = other RNA
ttccagcaaaactccctcaat

SEQ ID NO: 1632 - RNA, 21 nt, synthetic construct
  source 1..21: mol_type = other RNA
tccagcaaaactccctcaact

SEQ ID NO: 1633 - RNA, 21 nt, synthetic construct
  source 1..21: mol_type = other RNA
ccagcaaaactccctcaactt

SEQ ID NO: 1634 - RNA, 21 nt, synthetic construct
  source 1..21: mol_type = other RNA
gcaaaactccctcaactggat

SEQ ID NO: 1635 - RNA, 21 nt, synthetic construct
  source 1..21: mol_type = other RNA
caaaactccctcaactggatt

SEQ ID NO: 1636 - RNA, 21 nt, synthetic construct
  source 1..21: mol_type = other RNA
aaactccctcaactggatgat

SEQ ID NO: 1637 - RNA, 21 nt, synthetic construct
  source 1..21: mol_type = other RNA
aactccctcaactggatgaat

SEQ ID NO: 1638 - RNA, 21 nt, synthetic construct
  source 1..21: mol_type = other RNA
ctccctcaactggatgaagat

SEQ ID NO: 1639 - RNA, 21 nt, synthetic construct
  source 1..21: mol_type = other RNA
tccctcaactggatgaagaat

SEQ ID NO: 1640 - RNA, 21 nt, synthetic construct
  source 1..21: mol_type = other RNA
ccctcaactggatgaagaaat

SEQ ID NO: 1641 - RNA, 21 nt, synthetic construct
  source 1..21: mol_type = other RNA
ctcaactggatgaagaaactt

SEQ ID NO: 1642 - RNA, 21 nt, synthetic construct
  source 1..21: mol_type = other RNA
aaggatcttatgacctgcagt

SEQ ID NO: 1643 - RNA, 21 nt, synthetic construct
  source 1..21: mol_type = other RNA
aggatcttatgacctgcaggt

SEQ ID NO: 1644 - RNA, 21 nt, synthetic construct
  source 1..21: mol_type = other RNA
gaacctgcaaaaattgagcat

SEQ ID NO: 1645 - RNA, 21 nt, synthetic construct
  source 1..21: mol_type = other RNA
aggtgctgaacagcatttttt

SEQ ID NO: 1646 - RNA, 21 nt, synthetic construct
  source 1..21: mol_type = other RNA
ggtgctgaacagcattttttt

SEQ ID NO: 1647 - RNA, 21 nt, synthetic construct
  source 1..21: mol_type = other RNA
gtgctgaacagcatttttttt

SEQ ID NO: 1648 - RNA, 21 nt, synthetic construct
  source 1..21: mol_type = other RNA
tgctgaacagcattttttttt

SEQ ID NO: 1649 - RNA, 21 nt, synthetic construct
  source 1..21: mol_type = other RNA
gctgaacagcattttttttgt

SEQ ID NO: 1650 - RNA, 21 nt, synthetic construct
  source 1..21: mol_type = other RNA
ctgaacagcattttttttgat

SEQ ID NO: 1651 - RNA, 21 nt, synthetic construct
  source 1..21: mol_type = other RNA
tgagagagagcccacagagtt

SEQ ID NO: 1652 - RNA, 21 nt, synthetic construct
  source 1..21: mol_type = other RNA
agagagagcccacagagtctt

SEQ ID NO: 1653 - RNA, 21 nt, synthetic construct
  source 1..21: mol_type = other RNA
gagagagcccacagagtctat

SEQ ID NO: 1654 - RNA, 21 nt, synthetic construct
  source 1..21: mol_type = other RNA
gaaccgcccattcctgtttgt

SEQ ID NO: 1655 - RNA, 21 nt, synthetic construct
  source 1..21: mol_type = other RNA
gcccattcctgtttgctgtgt

SEQ ID NO: 1656 - RNA, 21 nt, synthetic construct
  source 1..21: mol_type = other RNA
cccattcctgtttgctgtgtt

SEQ ID NO: 1657 - RNA, 21 nt, synthetic construct
  source 1..21: mol_type = other RNA
ccattcctgtttgctgtgtat

SEQ ID NO: 1658 - RNA, 21 nt, synthetic construct
  source 1..21: mol_type = other RNA
cattcctgtttgctgtgtatt

SEQ ID NO: 1659 - RNA, 21 nt, synthetic construct
  source 1..21: mol_type = other RNA
ttcctgtttgctgtgtatgat

SEQ ID NO: 1660 - RNA, 21 nt, synthetic construct
  source 1..21: mol_type = other RNA
cctgtttgctgtgtatgatct

SEQ ID NO: 1661 - RNA, 21 nt, synthetic construct
  source 1..21: mol_type = other RNA
ctgtttgctgtgtatgatcat

SEQ ID NO: 1662 - RNA, 21 nt, synthetic construct
  source 1..21: mol_type = other RNA
tgtttgctgtgtatgatcaat

SEQ ID NO: 1663 - RNA, 21 nt, synthetic construct
  source 1..21: mol_type = other RNA
gtttgctgtgtatgatcaaat

SEQ ID NO: 1664 - RNA, 21 nt, synthetic construct
  source 1..21: mol_type = other RNA
tttgctgtgtatgatcaaagt

SEQ ID NO: 1665 - RNA, 21 nt, synthetic construct
  source 1..21: mol_type = other RNA
cagtctcccaccttttcttct

SEQ ID NO: 1666 - RNA, 21 nt, synthetic construct
  source 1..21: mol_type = other RNA
gtctcccaccttttcttctat

SEQ ID NO: 1667 - RNA, 21 nt, synthetic construct
  source 1..21: mol_type = other RNA
ccaccttttcttctaatgagt

SEQ ID NO: 1668 - RNA, 21 nt, synthetic construct
  source 1..21: mol_type = other RNA
caccttttcttctaatgagtt

SEQ ID NO: 1669 - RNA, 21 nt, synthetic construct
  source 1..21: mol_type = other RNA
accttttcttctaatgagtct

SEQ ID NO: 1670 - RNA, 21 nt, synthetic construct
  source 1..21: mol_type = other RNA
ccgtttctccttggtctaagt

SEQ ID NO: 1671 - RNA, 21 nt, synthetic construct
  source 1..21: mol_type = other RNA
gctgggtttattttagagaat

SEQ ID NO: 1672 - RNA, 21 nt, synthetic construct
  source 1..21: mol_type = other RNA
ctgggtttattttagagaatt

SEQ ID NO: 1673 - RNA, 21 nt, synthetic construct
  source 1..21: mol_type = other RNA
tgggtttattttagagaatgt

SEQ ID NO: 1674 - RNA, 21 nt, synthetic construct
  source 1..21: mol_type = other RNA
gaggcaagaaccagtgtttat

SEQ ID NO: 1675 - RNA, 21 nt, synthetic construct
  source 1..21: mol_type = other RNA
gcaagaaccagtgtttagcgt

SEQ ID NO: 1676 - RNA, 21 nt, synthetic construct
  source 1..21: mol_type = other RNA
caagaaccagtgtttagcgct

SEQ ID NO: 1677 - RNA, 21 nt, synthetic construct
  source 1..21: mol_type = other RNA
aagaaccagtgtttagcgcgt

SEQ ID NO: 1678 - RNA, 21 nt, synthetic construct
  source 1..21: mol_type = other RNA
agaaccagtgtttagcgcggt

SEQ ID NO: 1679 - RNA, 21 nt, synthetic construct
  source 1..21: mol_type = other RNA
gaaccagtgtttagcgcgggt

SEQ ID NO: 1680 - RNA, 21 nt, synthetic construct
  source 1..21: mol_type = other RNA
aaccagtgtttagcgcgggat

SEQ ID NO: 1681 - RNA, 21 nt, synthetic construct
  source 1..21: mol_type = other RNA
tgttccaaaaagaattccaat

SEQ ID NO: 1682 - RNA, 21 nt, synthetic construct
  source 1..21: mol_type = other RNA
gttccaaaaagaattccaact

SEQ ID NO: 1683 - RNA, 21 nt, synthetic construct
  source 1..21: mol_type = other RNA
tccaaaaagaattccaaccgt

SEQ ID NO: 1684 - RNA, 21 nt, synthetic construct
  source 1..21: mol_type = other RNA
ccaaaaagaattccaaccgat

SEQ ID NO: 1685 - RNA, 21 nt, synthetic construct
  source 1..21: mol_type = other RNA
aaaaagaattccaaccgacct

SEQ ID NO: 1686 - RNA, 21 nt, synthetic construct
  source 1..21: mol_type = other RNA
aaaagaattccaaccgaccat

SEQ ID NO: 1687 - RNA, 21 nt, synthetic construct
  source 1..21: mol_type = other RNA
aaagaattccaaccgaccagt

SEQ ID NO: 1688 - RNA, 21 nt, synthetic construct
  source 1..21: mol_type = other RNA
aagaattccaaccgaccagct

SEQ ID NO: 1689 - RNA, 21 nt, synthetic construct
  source 1..21: mol_type = other RNA
agaattccaaccgaccagctt

SEQ ID NO: 1690 - RNA, 21 nt, synthetic construct
  source 1..21: mol_type = other RNA
gaattccaaccgaccagcttt

SEQ ID NO: 1691 - RNA, 21 nt, synthetic construct
  source 1..21: mol_type = other RNA
aattccaaccgaccagcttgt

SEQ ID NO: 1692 - RNA, 21 nt, synthetic construct
  source 1..21: mol_type = other RNA
attccaaccgaccagcttgtt

SEQ ID NO: 1693 - RNA, 21 nt, synthetic construct
  source 1..21: mol_type = other RNA
ttccaaccgaccagcttgttt

SEQ ID NO: 1694 - RNA, 21 nt, synthetic construct
  source 1..21: mol_type = other RNA
tccaaccgaccagcttgtttt

SEQ ID NO: 1695 - RNA, 21 nt, synthetic construct
  source 1..21: mol_type = other RNA
ccaaccgaccagcttgtttgt

SEQ ID NO: 1696 - RNA, 21 nt, synthetic construct
  source 1..21: mol_type = other RNA
caaccgaccagcttgtttgtt

SEQ ID NO: 1697 - RNA, 21 nt, synthetic construct
  source 1..21: mol_type = other RNA
aaccgaccagcttgtttgtgt

SEQ ID NO: 1698 - RNA, 21 nt, synthetic construct
  source 1..21: mol_type = other RNA
ccgaccagcttgtttgtgaat

SEQ ID NO: 1699 - RNA, 21 nt, synthetic construct
  source 1..21: mol_type = other RNA
cgaccagcttgtttgtgaaat

SEQ ID NO: 1700 - RNA, 21 nt, synthetic construct
  source 1..21: mol_type = other RNA
gaccagcttgtttgtgaaact

SEQ ID NO: 1701 - RNA, 21 nt, synthetic construct
  source 1..21: mol_type = other RNA
accagcttgtttgtgaaacat

SEQ ID NO: 1702 - RNA, 21 nt, synthetic construct
  source 1..21: mol_type = other RNA
ccagcttgtttgtgaaacaat

SEQ ID NO: 1703 - RNA, 21 nt, synthetic construct
  source 1..21: mol_type = other RNA
cagcttgtttgtgaaacaaat

SEQ ID NO: 1704 - RNA, 21 nt, synthetic construct
  source 1..21: mol_type = other RNA
agcttgtttgtgaaacaaaat

SEQ ID NO: 1705 - RNA, 21 nt, synthetic construct
  source 1..21: mol_type = other RNA
cttgtttgtgaaacaaaaaat

SEQ ID NO: 1706 - RNA, 21 nt, synthetic construct
  source 1..21: mol_type = other RNA
ttgtttgtgaaacaaaaaagt

SEQ ID NO: 1707 - RNA, 21 nt, synthetic construct
  source 1..21: mol_type = other RNA
ttcccttttcaagttgagaat

SEQ ID NO: 1708 - RNA, 21 nt, synthetic construct
  source 1..21: mol_type = other RNA
aacaaaaattgggttttaaat

SEQ ID NO: 1709 - RNA, 21 nt, synthetic construct
  source 1..21: mol_type = other RNA
agtatacatttttgcattgct

SEQ ID NO: 1710 - RNA, 21 nt, synthetic construct
  source 1..21: mol_type = other RNA
tatacatttttgcattgcctt

SEQ ID NO: 1711 - RNA, 21 nt, synthetic construct
  source 1..21: mol_type = other RNA
ttcggtttgtatttagtgtct

SEQ ID NO: 1712 - RNA, 21 nt, synthetic construct
  source 1..21: mol_type = other RNA
tcggtttgtatttagtgtctt

SEQ ID NO: 1713 - RNA, 21 nt, synthetic construct
  source 1..21: mol_type = other RNA
cggtttgtatttagtgtcttt

SEQ ID NO: 1714 - RNA, 21 nt, synthetic construct
  source 1..21: mol_type = other RNA
gtttgtatttagtgtcttgat

SEQ ID NO: 1715 - RNA, 21 nt, synthetic construct
  source 1..21: mol_type = other RNA
tttgtatttagtgtcttgaat

SEQ ID NO: 1716 - RNA, 21 nt, synthetic construct
  source 1..21: mol_type = other RNA
ttgtatttagtgtcttgaatt

SEQ ID NO: 1717 - RNA, 21 nt, synthetic construct
  source 1..21: mol_type = other RNA
gtatttagtgtcttgaatgtt

SEQ ID NO: 1718 - RNA, 21 nt, synthetic construct
  source 1..21: mol_type = other RNA
atttagtgtcttgaatgtaat

SEQ ID NO: 1719 - RNA, 21 nt, synthetic construct
  source 1..21: mol_type = other RNA
ttagtgtcttgaatgtaagat

SEQ ID NO: 1720 - RNA, 21 nt, synthetic construct
  source 1..21: mol_type = other RNA
tagtgtcttgaatgtaagaat

SEQ ID NO: 1721 - RNA, 21 nt, synthetic construct
  source 1..21: mol_type = other RNA
agtgtcttgaatgtaagaact

SEQ ID NO: 1722 - RNA, 21 nt, synthetic construct
  source 1..21: mol_type = other RNA
tgtcttgaatgtaagaacatt

SEQ ID NO: 1723 - RNA, 21 nt, synthetic construct
  source 1..21: mol_type = other RNA
ttgaatgtaagaacatgacct

SEQ ID NO: 1724 - RNA, 21 nt, synthetic construct
  source 1..21: mol_type = other RNA
catgacctccgtgtagtgtct

SEQ ID NO: 1725 - RNA, 21 nt, synthetic construct
  source 1..21: mol_type = other RNA
atgacctccgtgtagtgtctt

SEQ ID NO: 1726 - RNA, 21 nt, synthetic construct
  source 1..21: mol_type = other RNA
cttagttttttccacagatgt

SEQ ID NO: 1727 - RNA, 21 nt, synthetic construct
  source 1..21: mol_type = other RNA
ttagttttttccacagatgct

SEQ ID NO: 1728 - RNA, 21 nt, synthetic construct
  source 1..21: mol_type = other RNA
tagttttttccacagatgctt

SEQ ID NO: 1729 - RNA, 21 nt, synthetic construct
  source 1..21: mol_type = other RNA
agttttttccacagatgcttt

SEQ ID NO: 1730 - RNA, 21 nt, synthetic construct
  source 1..21: mol_type = other RNA
gttttttccacagatgcttgt

SEQ ID NO: 1731 - RNA, 21 nt, synthetic construct
  source 1..21: mol_type = other RNA
tttttccacagatgcttgtgt

SEQ ID NO: 1732 - RNA, 21 nt, synthetic construct
  source 1..21: mol_type = other RNA
ttttccacagatgcttgtgat

SEQ ID NO: 1733 - RNA, 21 nt, synthetic construct
  source 1..21: mol_type = other RNA
ttccacagatgcttgtgattt

SEQ ID NO: 1734 - RNA, 21 nt, synthetic construct
  source 1..21: mol_type = other RNA
tccacagatgcttgtgatttt

SEQ ID NO: 1735 - RNA, 21 nt, synthetic construct
  source 1..21: mol_type = other RNA
ccacagatgcttgtgattttt

SEQ ID NO: 1736 - RNA, 21 nt, synthetic construct
  source 1..21: mol_type = other RNA
tctcccaccttttcttctaat

SEQ ID NO: 1737 - RNA, 21 nt, synthetic construct
  source 1..21: mol_type = other RNA
cctcaactggatgaagaaact

SEQ ID NO: 1738 - RNA, 23 nt, synthetic construct
  source 1..23: mol_type = other RNA
aaggatggtggccctcaggctca

SEQ ID NO: 1739 - RNA, 23 nt, synthetic construct
  source 1..23: mol_type = other RNA
aagaggatggtggccctcaggct

SEQ ID NO: 1740 - RNA, 23 nt, synthetic construct
  source 1..23: mol_type = other RNA
  modified_base 12: mod_base = OTHER; note = Thymine
aaggcagaggatggtggccctca

SEQ ID NO: 1741 - RNA, 23 nt, synthetic construct
  source 1..23: mol_type = other RNA
  modified_base 5: mod_base = OTHER; note = Thymine
  modified_base 7: mod_base = OTHER; note = Thymine
agtgtatgtacacccggtcacct

SEQ ID NO: 1742 - RNA, 23 nt, synthetic construct
  source 1..23: mol_type = other RNA
  modified_base 2: mod_base = OTHER; note = Thymine
atgtggatgacgaggtggaaggg

SEQ ID NO: 1743 - RNA, 23 nt, synthetic construct
  source 1..23: mol_type = other RNA
  modified_base 2: mod_base = OTHER; note = Thymine
  modified_base 5: mod_base = OTHER; note = Thymine
attgtggatgacgaggtggaagg

SEQ ID NO: 1744 - RNA, 23 nt, synthetic construct
  source 1..23: mol_type = other RNA
aattgtggatgacgaggtggaag

SEQ ID NO: 1745 - RNA, 23 nt, synthetic construct
  source 1..23: mol_type = other RNA
  modified_base 5: mod_base = OTHER; note = Thymine
  modified_base 7: mod_base = OTHER; note = Thymine
acattgtggatgacgaggtggaa

SEQ ID NO: 1746 - RNA, 23 nt, synthetic construct
  source 1..23: mol_type = other RNA
  modified_base 2: mod_base = OTHER; note = Thymine
  modified_base 5: mod_base = OTHER; note = Thymine
  modified_base 12: mod_base = OTHER; note = Thymine
atcattgtggatgacgaggtgga

SEQ ID NO: 1747 - RNA, 23 nt, synthetic construct
  source 1..23: mol_type = other RNA
  modified_base 7: mod_base = OTHER; note = Thymine
actcattgtggatgacgaggtgg

SEQ ID NO: 1748 - RNA, 23 nt, synthetic construct
  source 1..23: mol_type = other RNA
  modified_base 2: mod_base = OTHER; note = Thymine
  modified_base 7: mod_base = OTHER; note = Thymine
atctcattgtggatgacgaggtg

SEQ ID NO: 1749 - RNA, 23 nt, synthetic construct
  source 1..23: mol_type = other RNA
  modified_base 5: mod_base = OTHER; note = Thymine
actctcattgtggatgacgaggt

SEQ ID NO: 1750 - RNA, 23 nt, synthetic construct
  source 1..23: mol_type = other RNA
  modified_base 12: mod_base = OTHER; note = Thymine
aactctcattgtggatgacgagg

SEQ ID NO: 1751 - RNA, 23 nt, synthetic construct
  source 1..23: mol_type = other RNA
  modified_base 2: mod_base = OTHER; note = Thymine
  modified_base 5: mod_base = OTHER; note = Thymine
  modified_base 7: mod_base = OTHER; note = Thymine
atactctcattgtggatgacgag

SEQ ID NO: 1752 - RNA, 23 nt, synthetic construct
  source 1..23: mol_type = other RNA
  modified_base 12: mod_base = OTHER; note = Thymine
agtactctcattgtggatgacga

SEQ ID NO: 1753 - RNA, 23 nt, synthetic construct
  source 1..23: mol_type = other RNA
  modified_base 7: mod_base = OTHER; note = Thymine
  modified_base 12: mod_base = OTHER; note = Thymine
aggtactctcattgtggatgacg

SEQ ID NO: 1754 - RNA, 23 nt, synthetic construct
  source 1..23: mol_type = other RNA
  modified_base 5: mod_base = OTHER; note = Thymine
aaggtactctcattgtggatgac

SEQ ID NO: 1755 - RNA, 23 nt, synthetic construct
  source 1..23: mol_type = other RNA
  modified_base 7: mod_base = OTHER; note = Thymine
  modified_base 12: mod_base = OTHER; note = Thymine
aacaggtactctcattgtggatg

SEQ ID NO: 1756 - RNA, 23 nt, synthetic construct
  source 1..23: mol_type = other RNA
acacaggtactctcattgtggat

SEQ ID NO: 1757 - RNA, 23 nt, synthetic construct
  source 1..23: mol_type = other RNA
  modified_base 2: mod_base = OTHER; note = Thymine
  modified_base 12: mod_base = OTHER; note = Thymine
atcacaggtactctcattgtgga

SEQ ID NO: 1758 - RNA, 23 nt, synthetic construct
  source 1..23: mol_type = other RNA
agctcacaggtactctcattgtg

SEQ ID NO: 1759 - RNA, 23 nt, synthetic construct
  source 1..23: mol_type = other RNA
  modified_base 2: mod_base = OTHER; note = Thymine
  modified_base 5: mod_base = OTHER; note = Thymine
  modified_base 12: mod_base = OTHER; note = Thymine
atgctcacaggtactctcattgt

SEQ ID NO: 1760 - RNA, 23 nt, synthetic construct
  source 1..23: mol_type = other RNA
actgctcacaggtactctcattg

SEQ ID NO: 1761 - RNA, 23 nt, synthetic construct
  source 1..23: mol_type = other RNA
  modified_base 7: mod_base = OTHER; note = Thymine
agctgctcacaggtactctcatt

SEQ ID NO: 1762 - RNA, 23 nt, synthetic construct
  source 1..23: mol_type = other RNA
  modified_base 5: mod_base = OTHER; note = Thymine
aagctgctcacaggtactctcat

SEQ ID NO: 1763 - RNA, 23 nt, synthetic construct
  source 1..23: mol_type = other RNA
acagctgctcacaggtactctca

SEQ ID NO: 1764 - RNA, 23 nt, synthetic construct
  source 1..23: mol_type = other RNA
  modified_base 7: mod_base = OTHER; note = Thymine
accagctgctcacaggtactctc

SEQ ID NO: 1765 - RNA, 23 nt, synthetic construct
  source 1..23: mol_type = other RNA
agccagctgctcacaggtactct

SEQ ID NO: 1766 - RNA, 23 nt, synthetic construct
  source 1..23: mol_type = other RNA
  modified_base 2: mod_base = OTHER; note = Thymine
  modified_base 12: mod_base = OTHER; note = Thymine
atgccagctgctcacaggtactc

SEQ ID NO: 1767 - RNA, 23 nt, synthetic construct
  source 1..23: mol_type = other RNA
  modified_base 2: mod_base = OTHER; note = Thymine
attgccagctgctcacaggtact

SEQ ID NO: 1768 - RNA, 23 nt, synthetic construct
  source 1..23: mol_type = other RNA
  modified_base 2: mod_base = OTHER; note = Thymine
atggccagcatcccgaccattgc

SEQ ID NO: 1769 - RNA, 23 nt, synthetic construct
  source 1..23: mol_type = other RNA
  modified_base 2: mod_base = OTHER; note = Thymine
  modified_base 12: mod_base = OTHER; note = Thymine
attggccagcatcccgaccattg

SEQ ID NO: 1770 - RNA, 23 nt, synthetic construct
  source 1..23: mol_type = other RNA
agttggccagcatcccgaccatt

SEQ ID NO: 1771 - RNA, 23 nt, synthetic construct
  source 1..23: mol_type = other RNA
  modified_base 5: mod_base = OTHER; note = Thymine
aagttggccagcatcccgaccat

SEQ ID NO: 1772 - RNA, 23 nt, synthetic construct
  source 1..23: mol_type = other RNA
  modified_base 5: mod_base = OTHER; note = Thymine
aaagttggccagcatcccgacca

SEQ ID NO: 1773 - RNA, 23 nt, synthetic construct
  source 1..23: mol_type = other RNA
  modified_base 7: mod_base = OTHER; note = Thymine
agaagttggccagcatcccgacc

SEQ ID NO: 1774 - RNA, 23 nt, synthetic construct
  source 1..23: mol_type = other RNA
  modified_base 7: mod_base = OTHER; note = Thymine
aagaagttggccagcatcccgac

SEQ ID NO: 1775 - RNA, 23 nt, synthetic construct
  source 1..23: mol_type = other RNA
acaagaagttggccagcatcccg

SEQ ID NO: 1776 - RNA, 23 nt, synthetic construct
  source 1..23: mol_type = other RNA
accaagaagttggccagcatccc

SEQ ID NO: 1777 - RNA, 23 nt, synthetic construct
  source 1..23: mol_type = other RNA
aaagcccaagaagttggccagca

SEQ ID NO: 1778 - RNA, 23 nt, synthetic construct
  source 1..23: mol_type = other RNA
acggaagcccaagaagttggcca

SEQ ID NO: 1779 - RNA, 23 nt, synthetic construct
  source 1..23: mol_type = other RNA
aacggaagcccaagaagttggcc

SEQ ID NO: 1780 - RNA, 23 nt, synthetic construct
  source 1..23: mol_type = other RNA
  modified_base 2: mod_base = OTHER; note = Thymine
atacggaagcccaagaagttggc

SEQ ID NO: 1781 - RNA, 23 nt, synthetic construct
  source 1..23: mol_type = other RNA
  modified_base 2: mod_base = OTHER; note = Thymine
atatacggaagcccaagaagttg

SEQ ID NO: 1782 - RNA, 23 nt, synthetic construct
  source 1..23: mol_type = other RNA
  modified_base 5: mod_base = OTHER; note = Thymine
aatatacggaagcccaagaagtt

SEQ ID NO: 1783 - RNA, 23 nt, synthetic construct
  source 1..23: mol_type = other RNA
  modified_base 2: mod_base = OTHER; note = Thymine
atatatacggaagcccaagaagt

SEQ ID NO: 1784 - RNA, 23 nt, synthetic construct
  source 1..23: mol_type = other RNA
  modified_base 5: mod_base = OTHER; note = Thymine
  modified_base 7: mod_base = OTHER; note = Thymine
aatatatacggaagcccaagaag

SEQ ID NO: 1785 - RNA, 23 nt, synthetic construct
  source 1..23: mol_type = other RNA
acatatatacggaagcccaagaa

SEQ ID NO: 1786 - RNA, 23 nt, synthetic construct
  source 1..23: mol_type = other RNA
  modified_base 5: mod_base = OTHER; note = Thymine
  modified_base 7: mod_base = OTHER; note = Thymine
accatatatacggaagcccaaga

SEQ ID NO: 1787 - RNA, 23 nt, synthetic construct
  source 1..23: mol_type = other RNA
agccatatatacggaagcccaag

SEQ ID NO: 1788 - RNA, 23 nt, synthetic construct
  source 1..23: mol_type = other RNA
  modified_base 2: mod_base = OTHER; note = Thymine
  modified_base 7: mod_base = OTHER; note = Thymine
atgccatatatacggaagcccaa

SEQ ID NO: 1789 - RNA, 23 nt, synthetic construct
  source 1..23: mol_type = other RNA
  modified_base 12: mod_base = OTHER; note = Thymine
aatgccatatatacggaagccca

SEQ ID NO: 1790 - RNA, 23 nt, synthetic construct
  source 1..23: mol_type = other RNA
acatgccatatatacggaagccc

SEQ ID NO: 1791 - RNA, 23 nt, synthetic construct
  source 1..23: mol_type = other RNA
  modified_base 5: mod_base = OTHER; note = Thymine
  modified_base 7: mod_base = OTHER; note = Thymine
acactgtgcatgccatatatacg

SEQ ID NO: 1792 - RNA, 23 nt, synthetic construct
  source 1..23: mol_type = other RNA
  modified_base 2: mod_base = OTHER; note = Thymine
  modified_base 12: mod_base = OTHER; note = Thymine
atcactgtgcatgccatatatac

SEQ ID NO: 1793 - RNA, 23 nt, synthetic construct
  source 1..23: mol_type = other RNA
  modified_base 7: mod_base = OTHER; note = Thymine
actcactgtgcatgccatatata

SEQ ID NO: 1794 - RNA, 23 nt, synthetic construct
  source 1..23: mol_type = other RNA
agctcactgtgcatgccatatat

SEQ ID NO: 1795 - RNA, 23 nt, synthetic construct
  source 1..23: mol_type = other RNA
  modified_base 5: mod_base = OTHER; note = Thymine
aagctcactgtgcatgccatata

SEQ ID NO: 1796 - RNA, 23 nt, synthetic construct
  source 1..23: mol_type = other RNA
  modified_base 2: mod_base = OTHER; note = Thymine
  modified_base 12: mod_base = OTHER; note = Thymine
atagctcactgtgcatgccatat

SEQ ID NO: 1797 - RNA, 23 nt, synthetic construct
  source 1..23: mol_type = other RNA
  modified_base 7: mod_base = OTHER; note = Thymine
aatagctcactgtgcatgccata

SEQ ID NO: 1798 - RNA, 23 nt, synthetic construct
  source 1..23: mol_type = other RNA
  modified_base 12: mod_base = OTHER; note = Thymine
acatagctcactgtgcatgccat

SEQ ID NO: 1799 - RNA, 23 nt, synthetic construct
  source 1..23: mol_type = other RNA
  modified_base 5: mod_base = OTHER; note = Thymine
accatagctcactgtgcatgcca

SEQ ID NO: 1800 - RNA, 23 nt, synthetic construct
  source 1..23: mol_type = other RNA
aagagagaggccagggtgccaaa

SEQ ID NO: 1801 - RNA, 23 nt, synthetic construct
  source 1..23: mol_type = other RNA
  modified_base 2: mod_base = OTHER; note = Thymine
atagagagaggccagggtgccaa

SEQ ID NO: 1802 - RNA, 23 nt, synthetic construct
  source 1..23: mol_type = other RNA
  modified_base 7: mod_base = OTHER; note = Thymine
aaggattgcctgtagcctgtcag

SEQ ID NO: 1803 - RNA, 23 nt, synthetic construct
  source 1..23: mol_type = other RNA
  modified_base 7: mod_base = OTHER; note = Thymine
  modified_base 12: mod_base = OTHER; note = Thymine
acaggattgcctgtagcctgtca

SEQ ID NO: 1804 - RNA, 23 nt, synthetic construct
  source 1..23: mol_type = other RNA
  modified_base 7: mod_base = OTHER; note = Thymine
  modified_base 12: mod_base = OTHER; note = Thymine
agttcttgtccttccaaggaaca

SEQ ID NO: 1805 - RNA, 23 nt, synthetic construct
  source 1..23: mol_type = other RNA
  modified_base 5: mod_base = OTHER; note = Thymine
acagttcttgtccttccaaggaa

SEQ ID NO: 1806 - RNA, 23 nt, synthetic construct
  source 1..23: mol_type = other RNA
  modified_base 7: mod_base = OTHER; note = Thymine
  modified_base 12: mod_base = OTHER; note = Thymine
agcagttcttgtccttccaagga

SEQ ID NO: 1807 - RNA, 23 nt, synthetic construct
  source 1..23: mol_type = other RNA
  modified_base 2: mod_base = OTHER; note = Thymine
atgcacaaacggctgcttcaggt

SEQ ID NO: 1808 - RNA, 23 nt, synthetic construct
  source 1..23: mol_type = other RNA
aagagccaggccctgcacaaacg

SEQ ID NO: 1809 - RNA, 23 nt, synthetic construct
  source 1..23: mol_type = other RNA
agagagccaggccctgcacaaac

SEQ ID NO: 1810 - RNA, 23 nt, synthetic construct
  source 1..23: mol_type = other RNA
aagagagccaggccctgcacaaa

SEQ ID NO: 1811 - RNA, 23 nt, synthetic construct
  source 1..23: mol_type = other RNA
  modified_base 2: mod_base = OTHER; note = Thymine
atagagagccaggccctgcacaa

SEQ ID NO: 1812 - RNA, 23 nt, synthetic construct
  source 1..23: mol_type = other RNA
aatagagagccaggccctgcaca

SEQ ID NO: 1813 - RNA, 23 nt, synthetic construct
  source 1..23: mol_type = other RNA
  modified_base 5: mod_base = OTHER; note = Thymine
actgtgaagtccagagagcgtgg

SEQ ID NO: 1814 - RNA, 23 nt, synthetic construct
  source 1..23: mol_type = other RNA
  modified_base 2: mod_base = OTHER; note = Thymine
atctgtgaagtccagagagcgtg

SEQ ID NO: 1815 - RNA, 23 nt, synthetic construct
  source 1..23: mol_type = other RNA
  modified_base 7: mod_base = OTHER; note = Thymine
agaacctgtcaatcttctcagca

SEQ ID NO: 1816 - RNA, 23 nt, synthetic construct
  source 1..23: mol_type = other RNA
  modified_base 2: mod_base = OTHER; note = Thymine
atgaacctgtcaatcttctcagc

SEQ ID NO: 1817 - RNA, 23 nt, synthetic construct
  source 1..23: mol_type = other RNA
aatgaacctgtcaatcttctcag

SEQ ID NO: 1818 - RNA, 23 nt, synthetic construct
  source 1..23: mol_type = other RNA
  modified_base 12: mod_base = OTHER; note = Thymine
acatgaacctgtcaatcttctca

SEQ ID NO: 1819 - RNA, 23 nt, synthetic construct
  source 1..23: mol_type = other RNA
  modified_base 5: mod_base = OTHER; note = Thymine
agcatgaacctgtcaatcttctc

SEQ ID NO: 1820 - RNA, 23 nt, synthetic construct
  source 1..23: mol_type = other RNA
  modified_base 2: mod_base = OTHER; note = Thymine
  modified_base 12: mod_base = OTHER; note = Thymine
atgcatgaacctgtcaatcttct

SEQ ID NO: 1821 - RNA, 23 nt, synthetic construct
  source 1..23: mol_type = other RNA
  modified_base 7: mod_base = OTHER; note = Thymine
actgcatgaacctgtcaatcttc

SEQ ID NO: 1822 - RNA, 23 nt, synthetic construct
  source 1..23: mol_type = other RNA
acctgcatgaacctgtcaatctt

SEQ ID NO: 1823 - RNA, 23 nt, synthetic construct
  source 1..23: mol_type = other RNA
  modified_base 5: mod_base = OTHER; note = Thymine
agcctgcatgaacctgtcaatct

SEQ ID NO: 1824 - RNA, 23 nt, synthetic construct
  source 1..23: mol_type = other RNA
aagcctgcatgaacctgtcaatc

SEQ ID NO: 1825 - RNA, 23 nt, synthetic construct
  source 1..23: mol_type = other RNA
  modified_base 7: mod_base = OTHER; note = Thymine
acagcctgcatgaacctgtcaat

SEQ ID NO: 1826 - RNA, 23 nt, synthetic construct
  source 1..23: mol_type = other RNA
  modified_base 12: mod_base = OTHER; note = Thymine
aacagcctgcatgaacctgtcaa

SEQ ID NO: 1827 - RNA, 23 nt, synthetic construct
  source 1..23: mol_type = other RNA
  modified_base 5: mod_base = OTHER; note = Thymine
actgtcacagcctgcatgaacct

SEQ ID NO: 1828 - RNA, 23 nt, synthetic construct
  source 1..23: mol_type = other RNA
  modified_base 7: mod_base = OTHER; note = Thymine
acatcctgtcacagcctgcatga

SEQ ID NO: 1829 - RNA, 23 nt, synthetic construct
  source 1..23: mol_type = other RNA
  modified_base 2: mod_base = OTHER; note = Thymine
atccatcctgtcacagcctgcat

SEQ ID NO: 1830 - RNA, 23 nt, synthetic construct
  source 1..23: mol_type = other RNA
  modified_base 2: mod_base = OTHER; note = Thymine
  modified_base 7: mod_base = OTHER; note = Thymine
  modified_base 12: mod_base = OTHER; note = Thymine
attccatcctgtcacagcctgca

SEQ ID NO: 1831 - RNA, 23 nt, synthetic construct
  source 1..23: mol_type = other RNA
  modified_base 2: mod_base = OTHER; note = Thymine
  modified_base 12: mod_base = OTHER; note = Thymine
atggacgtaggtgttgaaagcca

SEQ ID NO: 1832 - RNA, 23 nt, synthetic construct
  source 1..23: mol_type = other RNA
  modified_base 5: mod_base = OTHER; note = Thymine
actgttgtccacccagaactcct

SEQ ID NO: 1833 - RNA, 23 nt, synthetic construct
  source 1..23: mol_type = other RNA
  modified_base 7: mod_base = OTHER; note = Thymine
  modified_base 12: mod_base = OTHER; note = Thymine
agacactgaggtgctgttgtcca

SEQ ID NO: 1834 - RNA, 23 nt, synthetic construct
  source 1..23: mol_type = other RNA
aagacactgaggtgctgttgtcc

SEQ ID NO: 1835 - RNA, 23 nt, synthetic construct
  source 1..23: mol_type = other RNA
aacagacactgaggtgctgttgt

SEQ ID NO: 1836 - RNA, 23 nt, synthetic construct
  source 1..23: mol_type = other RNA
  modified_base 12: mod_base = OTHER; note = Thymine
acttgtccaggtcagaggcatag

SEQ ID NO: 1837 - RNA, 23 nt, synthetic construct
  source 1..23: mol_type = other RNA
  modified_base 5: mod_base = OTHER; note = Thymine
  modified_base 7: mod_base = OTHER; note = Thymine
accttgtccaggtcagaggcata

SEQ ID NO: 1838 - RNA, 23 nt, synthetic construct
  source 1..23: mol_type = other RNA
aaaagtgagaccctccaccttgt

SEQ ID NO: 1839 - RNA, 23 nt, synthetic construct
  source 1..23: mol_type = other RNA
  modified_base 7: mod_base = OTHER; note = Thymine
agaaagtgagaccctccaccttg

SEQ ID NO: 1840 - RNA, 23 nt, synthetic construct
  source 1..23: mol_type = other RNA
aggaaagtgagaccctccacctt

SEQ ID NO: 1841 - RNA, 23 nt, synthetic construct
  source 1..23: mol_type = other RNA
  modified_base 2: mod_base = OTHER; note = Thymine
atggaaagtgagaccctccacct

SEQ ID NO: 1842 - RNA, 23 nt, synthetic construct
  source 1..23: mol_type = other RNA
  modified_base 2: mod_base = OTHER; note = Thymine
  modified_base 5: mod_base = OTHER; note = Thymine
  modified_base 12: mod_base = OTHER; note = Thymine
atgctggaaagtgagaccctcca

SEQ ID NO: 1843 - RNA, 23 nt, synthetic construct
  source 1..23: mol_type = other RNA
  modified_base 2: mod_base = OTHER; note = Thymine
attgctggaaagtgagaccctcc

SEQ ID NO: 1844 - RNA, 23 nt, synthetic construct
  source 1..23: mol_type = other RNA
  modified_base 2: mod_base = OTHER; note = Thymine
  modified_base 7: mod_base = OTHER; note = Thymine
atttgctggaaagtgagaccctc

SEQ ID NO: 1845 - RNA, 23 nt, synthetic construct
  source 1..23: mol_type = other RNA
  modified_base 2: mod_base = OTHER; note = Thymine
  modified_base 5: mod_base = OTHER; note = Thymine
attttgctggaaagtgagaccct

SEQ ID NO: 1846 - RNA, 23 nt, synthetic construct
  source 1..23: mol_type = other RNA
  modified_base 5: mod_base = OTHER; note = Thymine
agttttgctggaaagtgagaccc

SEQ ID NO: 1847 - RNA, 23 nt, synthetic construct
  source 1..23: mol_type = other RNA
  modified_base 5: mod_base = OTHER; note = Thymine
  modified_base 7: mod_base = OTHER; note = Thymine
aagttttgctggaaagtgagacc

SEQ ID NO: 1848 - RNA, 23 nt, synthetic construct
  source 1..23: mol_type = other RNA
  modified_base 5: mod_base = OTHER; note = Thymine
  modified_base 7: mod_base = OTHER; note = Thymine
agagttttgctggaaagtgagac

SEQ ID NO: 1849 - RNA, 23 nt, synthetic construct
  source 1..23: mol_type = other RNA
  modified_base 7: mod_base = OTHER; note = Thymine
  modified_base 12: mod_base = OTHER; note = Thymine
aggagttttgctggaaagtgaga

SEQ ID NO: 1850 - RNA, 23 nt, synthetic construct
  source 1..23: mol_type = other RNA
  modified_base 7: mod_base = OTHER; note = Thymine
agggagttttgctggaaagtgag

SEQ ID NO: 1851 - RNA, 23 nt, synthetic construct
  source 1..23: mol_type = other RNA
aagggagttttgctggaaagtga

SEQ ID NO: 1852 - RNA, 23 nt, synthetic construct
  source 1..23: mol_type = other RNA
  modified_base 12: mod_base = OTHER; note = Thymine
agagggagttttgctggaaagtg

SEQ ID NO: 1853 - RNA, 23 nt, synthetic construct
  source 1..23: mol_type = other RNA
  modified_base 2: mod_base = OTHER; note = Thymine
  modified_base 12: mod_base = OTHER; note = Thymine
atgagggagttttgctggaaagt

SEQ ID NO: 1854 - RNA, 23 nt, synthetic construct
  source 1..23: mol_type = other RNA
  modified_base 2: mod_base = OTHER; note = Thymine
  modified_base 12: mod_base = OTHER; note = Thymine
attgagggagttttgctggaaag

SEQ ID NO: 1855 - RNA, 23 nt, synthetic construct
  source 1..23: mol_type = other RNA
  modified_base 12: mod_base = OTHER; note = Thymine
agttgagggagttttgctggaaa

SEQ ID NO: 1856 - RNA, 23 nt, synthetic construct
  source 1..23: mol_type = other RNA
  modified_base 5: mod_base = OTHER; note = Thymine
aagttgagggagttttgctggaa

SEQ ID NO: 1857 - RNA, 23 nt, synthetic construct
  source 1..23: mol_type = other RNA
  modified_base 5: mod_base = OTHER; note = Thymine
acagttgagggagttttgctgga

SEQ ID NO: 1858 - RNA, 23 nt, synthetic construct
  source 1..23: mol_type = other RNA
  modified_base 7: mod_base = OTHER; note = Thymine
accagttgagggagttttgctgg

SEQ ID NO: 1859 - RNA, 23 nt, synthetic construct
  source 1..23: mol_type = other RNA
  modified_base 2: mod_base = OTHER; note = Thymine
  modified_base 7: mod_base = OTHER; note = Thymine
atccagttgagggagttttgctg

SEQ ID NO: 1860 - RNA, 23 nt, synthetic construct
  source 1..23: mol_type = other RNA
aatccagttgagggagttttgct

SEQ ID NO: 1861 - RNA, 23 nt, synthetic construct
  source 1..23: mol_type = other RNA
  modified_base 2: mod_base = OTHER; note = Thymine
  modified_base 5: mod_base = OTHER; note = Thymine
atcatccagttgagggagttttg

SEQ ID NO: 1862 - RNA, 23 nt, synthetic construct
  source 1..23: mol_type = other RNA
  modified_base 2: mod_base = OTHER; note = Thymine
  modified_base 12: mod_base = OTHER; note = Thymine
attcatccagttgagggagtttt

SEQ ID NO: 1863 - RNA, 23 nt, synthetic construct
  source 1..23: mol_type = other RNA
  modified_base 7: mod_base = OTHER; note = Thymine
  modified_base 12: mod_base = OTHER; note = Thymine
acttcatccagttgagggagttt

SEQ ID NO: 1864 - RNA, 23 nt, synthetic construct
  source 1..23: mol_type = other RNA
  modified_base 2: mod_base = OTHER; note = Thymine
  modified_base 5: mod_base = OTHER; note = Thymine
atcttcatccagttgagggagtt

SEQ ID NO: 1865 - RNA, 23 nt, synthetic construct
  source 1..23: mol_type = other RNA
  modified_base 2: mod_base = OTHER; note = Thymine
  modified_base 5: mod_base = OTHER; note = Thymine
attcttcatccagttgagggagt

SEQ ID NO: 1866 - RNA, 23 nt, synthetic construct
  source 1..23: mol_type = other RNA
  modified_base 2: mod_base = OTHER; note = Thymine
  modified_base 7: mod_base = OTHER; note = Thymine
atttcttcatccagttgagggag

SEQ ID NO: 1867 - RNA, 23 nt, synthetic construct
  source 1..23: mol_type = other RNA
  modified_base 5: mod_base = OTHER; note = Thymine
  modified_base 12: mod_base = OTHER; note = Thymine
aagtttcttcatccagttgaggg

SEQ ID NO: 1868 - RNA, 23 nt, synthetic construct
  source 1..23: mol_type = other RNA
  modified_base 12: mod_base = OTHER; note = Thymine
actgcaggtcataagatccttgc

SEQ ID NO: 1869 - RNA, 23 nt, synthetic construct
  source 1..23: mol_type = other RNA
acctgcaggtcataagatccttg

SEQ ID NO: 1870 - RNA, 23 nt, synthetic construct
  source 1..23: mol_type = other RNA
  modified_base 5: mod_base = OTHER; note = Thymine
  modified_base 7: mod_base = OTHER; note = Thymine
aatttttgcaggttcagctcggt

SEQ ID NO: 1871 - RNA, 23 nt, synthetic construct
  source 1..23: mol_type = other RNA
  modified_base 5: mod_base = OTHER; note = Thymine
  modified_base 7: mod_base = OTHER; note = Thymine
aaatttttgcaggttcagctcgg

SEQ ID NO: 1872 - RNA, 23 nt, synthetic construct
  source 1..23: mol_type = other RNA
  modified_base 5: mod_base = OTHER; note = Thymine
  modified_base 7: mod_base = OTHER; note = Thymine
acaatttttgcaggttcagctcg

SEQ ID NO: 1873 - RNA, 23 nt, synthetic construct
  source 1..23: mol_type = other RNA
  modified_base 2: mod_base = OTHER; note = Thymine
  modified_base 7: mod_base = OTHER; note = Thymine
atcaatttttgcaggttcagctc

SEQ ID NO: 1874 - RNA, 23 nt, synthetic construct
  source 1..23: mol_type = other RNA
  modified_base 7: mod_base = OTHER; note = Thymine
actcaatttttgcaggttcagct

SEQ ID NO: 1875 - RNA, 23 nt, synthetic construct
  source 1..23: mol_type = other RNA
  modified_base 12: mod_base = OTHER; note = Thymine
agctcaatttttgcaggttcagc

SEQ ID NO: 1876 - RNA, 23 nt, synthetic construct
  source 1..23: mol_type = other RNA
  modified_base 2: mod_base = OTHER; note = Thymine
  modified_base 5: mod_base = OTHER; note = Thymine
  modified_base 12: mod_base = OTHER; note = Thymine
atgctcaatttttgcaggttcag

SEQ ID NO: 1877 - RNA, 23 nt, synthetic construct
  source 1..23: mol_type = other RNA
  modified_base 7: mod_base = OTHER; note = Thymine
agtcattgctcaatttttgcagg

SEQ ID NO: 1878 - RNA, 23 nt, synthetic construct
  source 1..23: mol_type = other RNA
  modified_base 12: mod_base = OTHER; note = Thymine
aaaaatgctgttcagcacctccc

SEQ ID NO: 1879 - RNA, 23 nt, synthetic construct
  source 1..23: mol_type = other RNA
  modified_base 7: mod_base = OTHER; note = Thymine
  modified_base 12: mod_base = OTHER; note = Thymine
aaaaaatgctgttcagcacctcc

SEQ ID NO: 1880 - RNA, 23 nt, synthetic construct
  source 1..23: mol_type = other RNA
aaaaaaatgctgttcagcacctc

SEQ ID NO: 1881 - RNA, 23 nt, synthetic construct
  source 1..23: mol_type = other RNA
  modified_base 12: mod_base = OTHER; note = Thymine
aaaaaaaatgctgttcagcacct

SEQ ID NO: 1882 - RNA, 23 nt, synthetic construct
  source 1..23: mol_type = other RNA
aaaaaaaaatgctgttcagcacc

SEQ ID NO: 1883 - RNA, 23 nt, synthetic construct
  source 1..23: mol_type = other RNA
acaaaaaaaatgctgttcagcac

SEQ ID NO: 1884 - RNA, 23 nt, synthetic construct
  source 1..23: mol_type = other RNA
  modified_base 2: mod_base = OTHER; note = Thymine
  modified_base 12: mod_base = OTHER; note = Thymine
atcaaaaaaaatgctgttcagca

SEQ ID NO: 1885 - RNA, 23 nt, synthetic construct
  source 1..23: mol_type = other RNA
aactctgtgggctctctctcatc

SEQ ID NO: 1886 - RNA, 23 nt, synthetic construct
  source 1..23: mol_type = other RNA
aagactctgtgggctctctctca

SEQ ID NO: 1887 - RNA, 23 nt, synthetic construct
  source 1..23: mol_type = other RNA
  modified_base 2: mod_base = OTHER; note = Thymine
  modified_base 7: mod_base = OTHER; note = Thymine
atagactctgtgggctctctctc

SEQ ID NO: 1888 - RNA, 23 nt, synthetic construct
  source 1..23: mol_type = other RNA
  modified_base 12: mod_base = OTHER; note = Thymine
acaaacaggaatgggcggttcag

SEQ ID NO: 1889 - RNA, 23 nt, synthetic construct
  source 1..23: mol_type = other RNA
acacagcaaacaggaatgggcgg

SEQ ID NO: 1890 - RNA, 23 nt, synthetic construct
  source 1..23: mol_type = other RNA
aacacagcaaacaggaatgggcg

SEQ ID NO: 1891 - RNA, 23 nt, synthetic construct
  source 1..23: mol_type = other RNA
  modified_base 2: mod_base = OTHER; note = Thymine
atacacagcaaacaggaatgggc

SEQ ID NO: 1892 - RNA, 23 nt, synthetic construct
  source 1..23: mol_type = other RNA
aatacacagcaaacaggaatggg

SEQ ID NO: 1893 - RNA, 23 nt, synthetic construct
  source 1..23: mol_type = other RNA
  modified_base 2: mod_base = OTHER; note = Thymine
  modified_base 5: mod_base = OTHER; note = Thymine
atcatacacagcaaacaggaatg

SEQ ID NO: 1894 - RNA, 23 nt, synthetic construct
  source 1..23: mol_type = other RNA
  modified_base 7: mod_base = OTHER; note = Thymine
agatcatacacagcaaacaggaa

SEQ ID NO: 1895 - RNA, 23 nt, synthetic construct
  source 1..23: mol_type = other RNA
  modified_base 2: mod_base = OTHER; note = Thymine
  modified_base 5: mod_base = OTHER; note = Thymine
atgatcatacacagcaaacagga

SEQ ID NO: 1896 - RNA, 23 nt, synthetic construct
  source 1..23: mol_type = other RNA
  modified_base 2: mod_base = OTHER; note = Thymine
attgatcatacacagcaaacagg

SEQ ID NO: 1897 - RNA, 23 nt, synthetic construct
  source 1..23: mol_type = other RNA
  modified_base 2: mod_base = OTHER; note = Thymine
  modified_base 7: mod_base = OTHER; note = Thymine
atttgatcatacacagcaaacag

SEQ ID NO: 1898 - RNA, 23 nt, synthetic construct
  source 1..23: mol_type = other RNA
  modified_base 5: mod_base = OTHER; note = Thymine
actttgatcatacacagcaaaca

SEQ ID NO: 1899 - RNA, 23 nt, synthetic construct
  source 1..23: mol_type = other RNA
  modified_base 12: mod_base = OTHER; note = Thymine
agaagaaaaggtgggagactggg

SEQ ID NO: 1900 - RNA, 23 nt, synthetic construct
  source 1..23: mol_type = other RNA
  modified_base 2: mod_base = OTHER; note = Thymine
atagaagaaaaggtgggagactg

SEQ ID NO: 1901 - RNA, 23 nt, synthetic construct
  source 1..23: mol_type = other RNA
  modified_base 5: mod_base = OTHER; note = Thymine
acattagaagaaaaggtgggaga

SEQ ID NO: 1902 - RNA, 23 nt, synthetic construct
  source 1..23: mol_type = other RNA
  modified_base 2: mod_base = OTHER; note = Thymine
  modified_base 5: mod_base = OTHER; note = Thymine
atcattagaagaaaaggtgggag

SEQ ID NO: 1903 - RNA, 23 nt, synthetic construct
  source 1..23: mol_type = other RNA
  modified_base 7: mod_base = OTHER; note = Thymine
actcattagaagaaaaggtggga

SEQ ID NO: 1904 - RNA, 23 nt, synthetic construct
  source 1..23: mol_type = other RNA
  modified_base 7: mod_base = OTHER; note = Thymine
aactcattagaagaaaaggtggg

SEQ ID NO: 1905 - RNA, 23 nt, synthetic construct
  source 1..23: mol_type = other RNA
  modified_base 5: mod_base = OTHER; note = Thymine
agactcattagaagaaaaggtgg

SEQ ID NO: 1906 - RNA, 23 nt, synthetic construct
  source 1..23: mol_type = other RNA
acttagaccaaggagaaacggct

SEQ ID NO: 1907 - RNA, 23 nt, synthetic construct
  source 1..23: mol_type = other RNA
  modified_base 5: mod_base = OTHER; note = Thymine
aacttagaccaaggagaaacggc

SEQ ID NO: 1908 - RNA, 23 nt, synthetic construct
  source 1..23: mol_type = other RNA
  modified_base 5: mod_base = OTHER; note = Thymine
acacttagaccaaggagaaacgg

SEQ ID NO: 1909 - RNA, 23 nt, synthetic construct
  source 1..23: mol_type = other RNA
  modified_base 2: mod_base = OTHER; note = Thymine
atctaaaataaacccagcaaact

SEQ ID NO: 1910 - RNA, 23 nt, synthetic construct
  source 1..23: mol_type = other RNA
  modified_base 5: mod_base = OTHER; note = Thymine
actctaaaataaacccagcaaac

SEQ ID NO: 1911 - RNA, 23 nt, synthetic construct
  source 1..23: mol_type = other RNA
  modified_base 2: mod_base = OTHER; note = Thymine
atctctaaaataaacccagcaaa

SEQ ID NO: 1912 - RNA, 23 nt, synthetic construct
  source 1..23: mol_type = other RNA
  modified_base 2: mod_base = OTHER; note = Thymine
  modified_base 5: mod_base = OTHER; note = Thymine
  modified_base 7: mod_base = OTHER; note = Thymine
  modified_base 12: mod_base = OTHER; note = Thymine
attctctaaaataaacccagcaa

SEQ ID NO: 1913 - RNA, 23 nt, synthetic construct
  source 1..23: mol_type = other RNA
aattctctaaaataaacccagca

SEQ ID NO: 1914 - RNA, 23 nt, synthetic construct
  source 1..23: mol_type = other RNA
  modified_base 5: mod_base = OTHER; note = Thymine
  modified_base 7: mod_base = OTHER; note = Thymine
acattctctaaaataaacccagc

SEQ ID NO: 1915 - RNA, 23 nt, synthetic construct
  source 1..23: mol_type = other RNA
  modified_base 5: mod_base = OTHER; note = Thymine
accattctctaaaataaacccag

SEQ ID NO: 1916 - RNA, 23 nt, synthetic construct
  source 1..23: mol_type = other RNA
  modified_base 2: mod_base = OTHER; note = Thymine
  modified_base 12: mod_base = OTHER; note = Thymine
ataaacactggttcttgcctccc

SEQ ID NO: 1917 - RNA, 23 nt, synthetic construct
  source 1..23: mol_type = other RNA
  modified_base 5: mod_base = OTHER; note = Thymine
  modified_base 12: mod_base = OTHER; note = Thymine
acgctaaacactggttcttgcct

SEQ ID NO: 1918 - RNA, 23 nt, synthetic construct
  source 1..23: mol_type = other RNA
agcgctaaacactggttcttgcc

SEQ ID NO: 1919 - RNA, 23 nt, synthetic construct
  source 1..23: mol_type = other RNA
  modified_base 7: mod_base = OTHER; note = Thymine
acgcgctaaacactggttcttgc

SEQ ID NO: 1920 - RNA, 23 nt, synthetic construct
  source 1..23: mol_type = other RNA
accgcgctaaacactggttcttg

SEQ ID NO: 1921 - RNA, 23 nt, synthetic construct
  source 1..23: mol_type = other RNA
acccgcgctaaacactggttctt

SEQ ID NO: 1922 - RNA, 23 nt, synthetic construct
  source 1..23: mol_type = other RNA
  modified_base 2: mod_base = OTHER; note = Thymine
atcccgcgctaaacactggttct

SEQ ID NO: 1923 - RNA, 23 nt, synthetic construct
  source 1..23: mol_type = other RNA
  modified_base 2: mod_base = OTHER; note = Thymine
  modified_base 7: mod_base = OTHER; note = Thymine
  modified_base 12: mod_base = OTHER; note = Thymine
atggaattctttttggaacagta

SEQ ID NO: 1924 - RNA, 23 nt, synthetic construct
  source 1..23: mol_type = other RNA
  modified_base 2: mod_base = OTHER; note = Thymine
  modified_base 12: mod_base = OTHER; note = Thymine
attggaattctttttggaacagt

SEQ ID NO: 1925 - RNA, 23 nt, synthetic construct
  source 1..23: mol_type = other RNA
  modified_base 12: mod_base = OTHER; note = Thymine
agttggaattctttttggaacag

SEQ ID NO: 1926 - RNA, 23 nt, synthetic construct
  source 1..23: mol_type = other RNA
  modified_base 5: mod_base = OTHER; note = Thymine
  modified_base 12: mod_base = OTHER; note = Thymine
acggttggaattctttttggaac

SEQ ID NO: 1927 - RNA, 23 nt, synthetic construct
  source 1..23: mol_type = other RNA
  modified_base 2: mod_base = OTHER; note = Thymine
  modified_base 7: mod_base = OTHER; note = Thymine
  modified_base 12: mod_base = OTHER; note = Thymine
atcggttggaattctttttggaa

SEQ ID NO: 1928 - RNA, 23 nt, synthetic construct
  source 1..23: mol_type = other RNA
  modified_base 7: mod_base = OTHER; note = Thymine
agtcggttggaattctttttgga

SEQ ID NO: 1929 - RNA, 23 nt, synthetic construct
  source 1..23: mol_type = other RNA
aggtcggttggaattctttttgg

SEQ ID NO: 1930 - RNA, 23 nt, synthetic construct
  source 1..23: mol_type = other RNA
  modified_base 2: mod_base = OTHER; note = Thymine
  modified_base 5: mod_base = OTHER; note = Thymine
atggtcggttggaattctttttg

SEQ ID NO: 1931 - RNA, 23 nt, synthetic construct
  source 1..23: mol_type = other RNA
actggtcggttggaattcttttt

SEQ ID NO: 1932 - RNA, 23 nt, synthetic construct
  source 1..23: mol_type = other RNA
  modified_base 7: mod_base = OTHER; note = Thymine
  modified_base 12: mod_base = OTHER; note = Thymine
agctggtcggttggaattctttt

SEQ ID NO: 1933 - RNA, 23 nt, synthetic construct
  source 1..23: mol_type = other RNA
  modified_base 5: mod_base = OTHER; note = Thymine
  modified_base 12: mod_base = OTHER; note = Thymine
aagctggtcggttggaattcttt

SEQ ID NO: 1934 - RNA, 23 nt, synthetic construct
  source 1..23: mol_type = other RNA
aaagctggtcggttggaattctt

SEQ ID NO: 1935 - RNA, 23 nt, synthetic construct
  source 1..23: mol_type = other RNA
  modified_base 7: mod_base = OTHER; note = Thymine
acaagctggtcggttggaattct

SEQ ID NO: 1936 - RNA, 23 nt, synthetic construct
  source 1..23: mol_type = other RNA
aacaagctggtcggttggaattc

SEQ ID NO: 1937 - RNA, 23 nt, synthetic construct
  source 1..23: mol_type = other RNA
  modified_base 12: mod_base = OTHER; note = Thymine
aaacaagctggtcggttggaatt

SEQ ID NO: 1938 - RNA, 23 nt, synthetic construct
  source 1..23: mol_type = other RNA
aaaacaagctggtcggttggaat

SEQ ID NO: 1939 - RNA, 23 nt, synthetic construct
  source 1..23: mol_type = other RNA
acaaacaagctggtcggttggaa

SEQ ID NO: 1940 - RNA, 23 nt, synthetic construct
  source 1..23: mol_type = other RNA
  modified_base 12: mod_base = OTHER; note = Thymine
aacaaacaagctggtcggttgga

SEQ ID NO: 1941 - RNA, 23 nt, synthetic construct
  source 1..23: mol_type = other RNA
acacaaacaagctggtcggttgg

SEQ ID NO: 1942 - RNA, 23 nt, synthetic construct
  source 1..23: mol_type = other RNA
  modified_base 2: mod_base = OTHER; note = Thymine
atcacaaacaagctggtcggttg

SEQ ID NO: 1943 - RNA, 23 nt, synthetic construct
  source 1..23: mol_type = other RNA
  modified_base 2: mod_base = OTHER; note = Thymine
attcacaaacaagctggtcggtt

SEQ ID NO: 1944 - RNA, 23 nt, synthetic construct
  source 1..23: mol_type = other RNA
  modified_base 2: mod_base = OTHER; note = Thymine
atttcacaaacaagctggtcggt

SEQ ID NO: 1945 - RNA, 23 nt, synthetic construct
  source 1..23: mol_type = other RNA
  modified_base 5: mod_base = OTHER; note = Thymine
agtttcacaaacaagctggtcgg

SEQ ID NO: 1946 - RNA, 23 nt, synthetic construct
  source 1..23: mol_type = other RNA
  modified_base 2: mod_base = OTHER; note = Thymine
  modified_base 5: mod_base = OTHER; note = Thymine
atgtttcacaaacaagctggtcg

SEQ ID NO: 1947 - RNA, 23 nt, synthetic construct
  source 1..23: mol_type = other RNA
  modified_base 2: mod_base = OTHER; note = Thymine
  modified_base 5: mod_base = OTHER; note = Thymine
  modified_base 7: mod_base = OTHER; note = Thymine
attgtttcacaaacaagctggtc

SEQ ID NO: 1948 - RNA, 23 nt, synthetic construct
  source 1..23: mol_type = other RNA
  modified_base 2: mod_base = OTHER; note = Thymine
  modified_base 7: mod_base = OTHER; note = Thymine
atttgtttcacaaacaagctggt

SEQ ID NO: 1949 - RNA, 23 nt, synthetic construct
  source 1..23: mol_type = other RNA
  modified_base 2: mod_base = OTHER; note = Thymine
  modified_base 5: mod_base = OTHER; note = Thymine
  modified_base 7: mod_base = OTHER; note = Thymine
attttgtttcacaaacaagctgg

SEQ ID NO: 1950 - RNA, 23 nt, synthetic construct
  source 1..23: mol_type = other RNA
  modified_base 2: mod_base = OTHER; note = Thymine
  modified_base 5: mod_base = OTHER; note = Thymine
  modified_base 7: mod_base = OTHER; note = Thymine
attttttgtttcacaaacaagct

SEQ ID NO: 1951 - RNA, 23 nt, synthetic construct
  source 1..23: mol_type = other RNA
  modified_base 5: mod_base = OTHER; note = Thymine
  modified_base 7: mod_base = OTHER; note = Thymine
  modified_base 12: mod_base = OTHER; note = Thymine
acttttttgtttcacaaacaagc

SEQ ID NO: 1952 - RNA, 23 nt, synthetic construct
  source 1..23: mol_type = other RNA
  modified_base 2: mod_base = OTHER; note = Thymine
atctcaacttgaaaagggaacac

SEQ ID NO: 1953 - RNA, 23 nt, synthetic construct
  source 1..23: mol_type = other RNA
  modified_base 2: mod_base = OTHER; note = Thymine
  modified_base 5: mod_base = OTHER; note = Thymine
attctcaacttgaaaagggaaca

SEQ ID NO: 1954 - RNA, 23 nt, synthetic construct
  source 1..23: mol_type = other RNA
  modified_base 5: mod_base = OTHER; note = Thymine
  modified_base 7: mod_base = OTHER; note = Thymine
  modified_base 12: mod_base = OTHER; note = Thymine
acaatttttgttctcaacttgaa

SEQ ID NO: 1955 - RNA, 23 nt, synthetic construct
  source 1..23: mol_type = other RNA
  modified_base 7: mod_base = OTHER; note = Thymine
  modified_base 12: mod_base = OTHER; note = Thymine
accaatttttgttctcaacttga

SEQ ID NO: 1956 - RNA, 23 nt, synthetic construct
  source 1..23: mol_type = other RNA
  modified_base 7: mod_base = OTHER; note = Thymine
acccaatttttgttctcaacttg

SEQ ID NO: 1957 - RNA, 23 nt, synthetic construct
  source 1..23: mol_type = other RNA
  modified_base 12: mod_base = OTHER; note = Thymine
aacccaatttttgttctcaactt

SEQ ID NO: 1958 - RNA, 23 nt, synthetic construct
  source 1..23: mol_type = other RNA
  modified_base 12: mod_base = OTHER; note = Thymine
aaacccaatttttgttctcaact

SEQ ID NO: 1959 - RNA, 23 nt, synthetic construct
  source 1..23: mol_type = other RNA
  modified_base 12: mod_base = OTHER; note = Thymine
aaaacccaatttttgttctcaac

SEQ ID NO: 1960 - RNA, 23 nt, synthetic construct
  source 1..23: mol_type = other RNA
  modified_base 12: mod_base = OTHER; note = Thymine
aaaaacccaatttttgttctcaa

SEQ ID NO: 1961 - RNA, 23 nt, synthetic construct
  source 1..23: mol_type = other RNA
  modified_base 2: mod_base = OTHER; note = Thymine
  modified_base 12: mod_base = OTHER; note = Thymine
ataaaacccaatttttgttctca

SEQ ID NO: 1962 - RNA, 23 nt, synthetic construct
  source 1..23: mol_type = other RNA
  modified_base 2: mod_base = OTHER; note = Thymine
attaaaacccaatttttgttctc

SEQ ID NO: 1963 - RNA, 23 nt, synthetic construct
  source 1..23: mol_type = other RNA
  modified_base 2: mod_base = OTHER; note = Thymine
atttaaaacccaatttttgttct

SEQ ID NO: 1964 - RNA, 23 nt, synthetic construct
  source 1..23: mol_type = other RNA
agcaatgcaaaaatgtatacttt

SEQ ID NO: 1965 - RNA, 23 nt, synthetic construct
  source 1..23: mol_type = other RNA
  modified_base 7: mod_base = OTHER; note = Thymine
aggcaatgcaaaaatgtatactt

SEQ ID NO: 1966 - RNA, 23 nt, synthetic construct
  source 1..23: mol_type = other RNA
aaggcaatgcaaaaatgtatact

SEQ ID NO: 1967 - RNA, 23 nt, synthetic construct
  source 1..23: mol_type = other RNA
  modified_base 12: mod_base = OTHER; note = Thymine
accgaaggcaatgcaaaaatgta

SEQ ID NO: 1968 - RNA, 23 nt, synthetic construct
  source 1..23: mol_type = other RNA
  modified_base 2: mod_base = OTHER; note = Thymine
atacaaaccgaaggcaatgcaaa

SEQ ID NO: 1969 - RNA, 23 nt, synthetic construct
  source 1..23: mol_type = other RNA
  modified_base 5: mod_base = OTHER; note = Thymine
aaaatacaaaccgaaggcaatgc

SEQ ID NO: 1970 - RNA, 23 nt, synthetic construct
  source 1..23: mol_type = other RNA
  modified_base 2: mod_base = OTHER; note = Thymine
ataaatacaaaccgaaggcaatg

SEQ ID NO: 1971 - RNA, 23 nt, synthetic construct
  source 1..23: mol_type = other RNA
  modified_base 7: mod_base = OTHER; note = Thymine
actaaatacaaaccgaaggcaat

SEQ ID NO: 1972 - RNA, 23 nt, synthetic construct
  source 1..23: mol_type = other RNA
  modified_base 5: mod_base = OTHER; note = Thymine
acactaaatacaaaccgaaggca

SEQ ID NO: 1973 - RNA, 23 nt, synthetic construct
  source 1..23: mol_type = other RNA
  modified_base 7: mod_base = OTHER; note = Thymine
agacactaaatacaaaccgaagg

SEQ ID NO: 1974 - RNA, 23 nt, synthetic construct
  source 1..23: mol_type = other RNA
  modified_base 12: mod_base = OTHER; note = Thymine
aagacactaaatacaaaccgaag

SEQ ID NO: 1975 - RNA, 23 nt, synthetic construct
  source 1..23: mol_type = other RNA
aaagacactaaatacaaaccgaa

SEQ ID NO: 1976 - RNA, 23 nt, synthetic construct
  source 1..23: mol_type = other RNA
  modified_base 2: mod_base = OTHER; note = Thymine
atcaagacactaaatacaaaccg

SEQ ID NO: 1977 - RNA, 23 nt, synthetic construct
  source 1..23: mol_type = other RNA
  modified_base 2: mod_base = OTHER; note = Thymine
  modified_base 12: mod_base = OTHER; note = Thymine
attcaagacactaaatacaaacc

SEQ ID NO: 1978 - RNA, 23 nt, synthetic construct
  source 1..23: mol_type = other RNA
aattcaagacactaaatacaaac

SEQ ID NO: 1979 - RNA, 23 nt, synthetic construct
  source 1..23: mol_type = other RNA
  modified_base 5: mod_base = OTHER; note = Thymine
acattcaagacactaaatacaaa

SEQ ID NO: 1980 - RNA, 23 nt, synthetic construct
  source 1..23: mol_type = other RNA
  modified_base 5: mod_base = OTHER; note = Thymine
aacattcaagacactaaatacaa

SEQ ID NO: 1981 - RNA, 23 nt, synthetic construct
  source 1..23: mol_type = other RNA
  modified_base 2: mod_base = OTHER; note = Thymine
  modified_base 7: mod_base = OTHER; note = Thymine
atacattcaagacactaaataca

SEQ ID NO: 1982 - RNA, 23 nt, synthetic construct
  source 1..23: mol_type = other RNA
  modified_base 2: mod_base = OTHER; note = Thymine
  modified_base 7: mod_base = OTHER; note = Thymine
attacattcaagacactaaatac

SEQ ID NO: 1983 - RNA, 23 nt, synthetic construct
  source 1..23: mol_type = other RNA
  modified_base 2: mod_base = OTHER; note = Thymine
  modified_base 5: mod_base = OTHER; note = Thymine
atcttacattcaagacactaaat

SEQ ID NO: 1984 - RNA, 23 nt, synthetic construct
  source 1..23: mol_type = other RNA
  modified_base 2: mod_base = OTHER; note = Thymine
  modified_base 5: mod_base = OTHER; note = Thymine
attcttacattcaagacactaaa

SEQ ID NO: 1985 - RNA, 23 nt, synthetic construct
  source 1..23: mol_type = other RNA
  modified_base 7: mod_base = OTHER; note = Thymine
  modified_base 12: mod_base = OTHER; note = Thymine
agttcttacattcaagacactaa

SEQ ID NO: 1986 - RNA, 23 nt, synthetic construct
  source 1..23: mol_type = other RNA
  modified_base 5: mod_base = OTHER; note = Thymine
aatgttcttacattcaagacact

SEQ ID NO: 1987 - RNA, 23 nt, synthetic construct
  source 1..23: mol_type = other RNA
  modified_base 7: mod_base = OTHER; note = Thymine
acatgttcttacattcaagacac

SEQ ID NO: 1988 - RNA, 23 nt, synthetic construct
  source 1..23: mol_type = other RNA
  modified_base 7: mod_base = OTHER; note = Thymine
  modified_base 12: mod_base = OTHER; note = Thymine
aggtcatgttcttacattcaaga

SEQ ID NO: 1989 - RNA, 23 nt, synthetic construct
  source 1..23: mol_type = other RNA
  modified_base 2: mod_base = OTHER; note = Thymine
  modified_base 12: mod_base = OTHER; note = Thymine
atacacggaggtcatgttcttac

SEQ ID NO: 1990 - RNA, 23 nt, synthetic construct
  source 1..23: mol_type = other RNA
  modified_base 5: mod_base = OTHER; note = Thymine
acactacacggaggtcatgttct

SEQ ID NO: 1991 - RNA, 23 nt, synthetic construct
  source 1..23: mol_type = other RNA
  modified_base 7: mod_base = OTHER; note = Thymine
agacactacacggaggtcatgtt

SEQ ID NO: 1992 - RNA, 23 nt, synthetic construct
  source 1..23: mol_type = other RNA
aagacactacacggaggtcatgt

SEQ ID NO: 1993 - RNA, 23 nt, synthetic construct
  source 1..23: mol_type = other RNA
acatctgtggaaaaaactaaggt

SEQ ID NO: 1994 - RNA, 23 nt, synthetic construct
  source 1..23: mol_type = other RNA
  modified_base 5: mod_base = OTHER; note = Thymine
  modified_base 7: mod_base = OTHER; note = Thymine
agcatctgtggaaaaaactaagg

SEQ ID NO: 1995 - RNA, 23 nt, synthetic construct
  source 1..23: mol_type = other RNA
aagcatctgtggaaaaaactaag

SEQ ID NO: 1996 - RNA, 23 nt, synthetic construct
  source 1..23: mol_type = other RNA
  modified_base 7: mod_base = OTHER; note = Thymine
aaagcatctgtggaaaaaactaa

SEQ ID NO: 1997 - RNA, 23 nt, synthetic construct
  source 1..23: mol_type = other RNA
  modified_base 12: mod_base = OTHER; note = Thymine
acaagcatctgtggaaaaaacta

SEQ ID NO: 1998 - RNA, 23 nt, synthetic construct
  source 1..23: mol_type = other RNA
  modified_base 12: mod_base = OTHER; note = Thymine
acacaagcatctgtggaaaaaac

SEQ ID NO: 1999 - RNA, 23 nt, synthetic construct
  source 1..23: mol_type = other RNA
  modified_base 2: mod_base = OTHER; note = Thymine
atcacaagcatctgtggaaaaaa

SEQ ID NO: 2000 - RNA, 23 nt, synthetic construct
  source 1..23: mol_type = other RNA
  modified_base 12: mod_base = OTHER; note = Thymine
aatcacaagcatctgtggaaaaa

SEQ ID NO: 2001 - RNA, 23 nt, synthetic construct
  source 1..23: mol_type = other RNA
aaatcacaagcatctgtggaaaa

SEQ ID NO: 2002 - RNA, 23 nt, synthetic construct
  source 1..23: mol_type = other RNA
  modified_base 5: mod_base = OTHER; note = Thymine
aaaatcacaagcatctgtggaaa

SEQ ID NO: 2003 - RNA, 23 nt, synthetic construct
  source 1..23: mol_type = other RNA
aaaaatcacaagcatctgtggaa

SEQ ID NO: 2004 - RNA, 23 nt, synthetic construct
  source 1..23: mol_type = other RNA
  modified_base 7: mod_base = OTHER; note = Thymine
aaaaaatcacaagcatctgtgga

SEQ ID NO: 2005 - RNA, 23 nt, synthetic construct
  source 1..23: mol_type = other RNA
  modified_base 5: mod_base = OTHER; note = Thymine
acattcaaacagaaattcaggtg

SEQ ID NO: 2006 - RNA, 23 nt, synthetic construct
  source 1..23: mol_type = other RNA
  modified_base 5: mod_base = OTHER; note = Thymine
aaaataaccagctatggttccgc

SEQ ID NO: 2007 - RNA, 23 nt, synthetic construct
  source 1..23: mol_type = other RNA
  modified_base 7: mod_base = OTHER; note = Thymine
aagaaataaccagctatggttcc

SEQ ID NO: 2008 - RNA, 23 nt, synthetic construct
  source 1..23: mol_type = other RNA
  modified_base 5: mod_base = OTHER; note = Thymine
  modified_base 12: mod_base = OTHER; note = Thymine
acgtttattactaacacaaggga

SEQ ID NO: 2009 - RNA, 23 nt, synthetic construct
  source 1..23: mol_type = other RNA
  modified_base 5: mod_base = OTHER; note = Thymine
  modified_base 7: mod_base = OTHER; note = Thymine
aacgtttattactaacacaaggg

SEQ ID NO: 2010 - RNA, 23 nt, synthetic construct
  source 1..23: mol_type = other RNA
  modified_base 7: mod_base = OTHER; note = Thymine
agacgtttattactaacacaagg

SEQ ID NO: 2011 - RNA, 23 nt, synthetic construct
  source 1..23: mol_type = other RNA
  modified_base 7: mod_base = OTHER; note = Thymine
  modified_base 12: mod_base = OTHER; note = Thymine
aagacgtttattactaacacaag

SEQ ID NO: 2012 - RNA, 23 nt, synthetic construct
  source 1..23: mol_type = other RNA
  modified_base 12: mod_base = OTHER; note = Thymine
aaagacgtttattactaacacaa

SEQ ID NO: 2013 - RNA, 23 nt, synthetic construct
  source 1..23: mol_type = other RNA
  modified_base 12: mod_base = OTHER; note = Thymine
agcaagacgtttattactaacac

SEQ ID NO: 2014 - RNA, 23 nt, synthetic construct
  source 1..23: mol_type = other RNA
  modified_base 2: mod_base = OTHER; note = Thymine
attagaagaaaaggtgggagact

SEQ ID NO: 2015 - RNA, 23 nt, synthetic construct
  source 1..23: mol_type = other RNA
  modified_base 5: mod_base = OTHER; note = Thymine
  modified_base 7: mod_base = OTHER; note = Thymine
agtttcttcatccagttgaggga

SEQ ID NO: 2016 - RNA, 21 nt, synthetic construct
  source 1..21: mol_type = other RNA
  modified_base 1: mod_base = OTHER; note = 2'-O-methyladenosine-3'-phosphorothioate
  modified_base 2: mod_base = OTHER; note = 2'-O-methylguanosine-3'-phosphorothioate
  modified_base 3: mod_base = OTHER; note = 2'-O-methylcytidine-3'-phosphate
  modified_base 4: mod_base = OTHER; note = 2'-O-methylcytidine-3'-phosphate
  modified_base 5: mod_base = OTHER; note = 2'-O-methyluridine-3'-phosphate
  modified_base 6: mod_base = OTHER; note = 2'-O-methylguanosine-3'-phosphate
  modified_base 7: mod_base = OTHER; note = 2'-O-methyladenosine-3'-phosphate
  modified_base 8: mod_base = OTHER; note = 2'-O-methylguanosine-3'-phosphate
  modified_base 9: mod_base = OTHER; note = 2'-fluoroguanosine-3'-phosphate
  modified_base 10: mod_base = OTHER; note = 2'-fluoroguanosine-3'-phosphate
  modified_base 11: mod_base = OTHER; note = 2'-fluorocytidine-3'-phosphate
  modified_base 12: mod_base = OTHER; note = 2'-O-methylcytidine-3'-phosphate
  modified_base 13: mod_base = OTHER; note = 2'-O-methyladenosine-3'-phosphate
  modified_base 14: mod_base = OTHER; note = 2'-O-methylcytidine-3'-phosphate
  modified_base 15: mod_base = OTHER; note = 2'-O-methylcytidine-3'-phosphate
  modified_base 16: mod_base = OTHER; note = 2'-O-methyladenosine-3'-phosphate
  modified_base 17: mod_base = OTHER; note = 2'-O-methyluridine-3'-phosphate
  modified_base 18: mod_base = OTHER; note = 2'-O-methylcytidine-3'-phosphate
  modified_base 19: mod_base = OTHER; note = 2'-O-methylcytidine-3'-phosphate
  modified_base 20: mod_base = OTHER; note = 2'-O-methyluridine-3'-phosphate
  modified_base 21: mod_base = OTHER; note = 2'-O-methyluridine-3'-phosphate N-[tris(GalNAc-alkyl)-amidodecanoyl)]-4-hydroxyprolinol (Hyp-(GalNAc-alkyl)3)
agcctgagggccaccatcctt

SEQ ID NO: 2017 - RNA, 21 nt, synthetic construct
  source 1..21: mol_type = other RNA
  modified_base 1: mod_base = OTHER; note = 2'-O-methylcytidine-3'-phosphorothioate
  modified_base 2: mod_base = OTHER; note = 2'-O-methylcytidine-3'-phosphorothioate
  modified_base 3: mod_base = OTHER; note = 2'-O-methyluridine-3'-phosphate
  modified_base 4: mod_base = OTHER; note = 2'-O-methylguanosine-3'-phosphate
  modified_base 5: mod_base = OTHER; note = 2'-O-methyladenosine-3'-phosphate
  modified_base 6: mod_base = OTHER; note = 2'-O-methylguanosine-3'-phosphate
  modified_base 7: mod_base = OTHER; note = 2'-O-methylguanosine-3'-phosphate
  modified_base 8: mod_base = OTHER; note = 2'-O-methylguanosine-3'-phosphate
  modified_base 9: mod_base = OTHER; note = 2'-fluorocytidine-3'-phosphate
  modified_base 10: mod_base = OTHER; note = 2'-fluorocytidine-3'-phosphate
  modified_base 11: mod_base = OTHER; note = 2'-fluoroadenosine-3'-phosphate
  modified_base 12: mod_base = OTHER; note = 2'-O-methylcytidine-3'-phosphate
  modified_base 13: mod_base = OTHER; note = 2'-O-methylcytidine-3'-phosphate
  modified_base 14: mod_base = OTHER; note = 2'-O-methyladenosine-3'-phosphate
  modified_base 15: mod_base = OTHER; note = 2'-O-methyluridine-3'-phosphate
  modified_base 16: mod_base = OTHER; note = 2'-O-methylcytidine-3'-phosphate
  modified_base 17: mod_base = OTHER; note = 2'-O-methylcytidine-3'-phosphate
  modified_base 18: mod_base = OTHER; note = 2'-O-methyluridine-3'-phosphate
  modified_base 19: mod_base = OTHER; note = 2'-O-methylcytidine-3'-phosphate
  modified_base 20: mod_base = OTHER; note = 2'-O-methyluridine-3'-phosphate
  modified_base 21: mod_base = OTHER; note = 2'-O-methyluridine-3'-phosphate N-[tris(GalNAc-alkyl)-amidodecanoyl)]-4-hydroxyprolinol (Hyp-(GalNAc-alkyl)3)
cctgagggccaccatcctctt

SEQ ID NO: 2018 - RNA, 21 nt, synthetic construct
  source 1..21: mol_type = other RNA
  modified_base 1: mod_base = OTHER; note = 2'-O-methyladenosine-3'-phosphorothioate
  modified_base 2: mod_base = OTHER; note = 2'-O-methylguanosine-3'-phosphorothioate
  modified_base 3: mod_base = OTHER; note = 2'-O-methylguanosine-3'-phosphate
  modified_base 4: mod_base = OTHER; note = 2'-O-methylguanosine-3'-phosphate
  modified_base 5: mod_base = OTHER; note = 2'-O-methylcytidine-3'-phosphate
  modified_base 6: mod_base = OTHER; note = 2'-O-methylcytidine-3'-phosphate
  modified_base 7: mod_base = OTHER; note = 2'-O-methyladenosine-3'-phosphate
  modified_base 8: mod_base = OTHER; note = 2'-O-methylcytidine-3'-phosphate
  modified_base 9: mod_base = OTHER; note = 2'-fluorocytidine-3'-phosphate
  modified_base 10: mod_base = OTHER; note = 2'-fluoroadenosine-3'-phosphate
  modified_base 11: mod_base = OTHER; note = 2'-fluorouridine-3'-phosphate
  modified_base 12: mod_base = OTHER; note = 2'-O-methylcytidine-3'-phosphate
  modified_base 13: mod_base = OTHER; note = 2'-O-methylcytidine-3'-phosphate
  modified_base 14: mod_base = OTHER; note = 2'-O-methyluridine-3'-phosphate
  modified_base 15: mod_base = OTHER; note = 2'-O-methylcytidine-3'-phosphate
  modified_base 16: mod_base = OTHER; note = 2'-O-methyluridine-3'-phosphate
  modified_base 17: mod_base = OTHER; note = 2'-O-methylguanosine-3'-phosphate
  modified_base 18: mod_base = OTHER; note = 2'-O-methylcytidine-3'-phosphate
  modified_base 19: mod_base = OTHER; note = 2'-O-methylcytidine-3'-phosphate
  modified_base 20: mod_base = OTHER; note = 2'-O-methyluridine-3'-phosphate
  modified_base 21: mod_base = OTHER; note = 2'-O-methyluridine-3'-phosphate N-[tris(GalNAc-alkyl)-amidodecanoyl)]-4-hydroxyprolinol (Hyp-(GalNAc-alkyl)3)
agggccaccatcctctgcctt

SEQ ID NO: 2019 - RNA, 21 nt, synthetic construct
  source 1..21: mol_type = other RNA
  modified_base 1: mod_base = OTHER; note = 2'-O-methylguanosine-3'-phosphorothioate
  modified_base 2: mod_base = OTHER; note = 2'-O-methyluridine-3'-phosphorothioate
  modified_base 3: mod_base = OTHER; note = 2'-O-methylguanosine-3'-phosphate
  modified_base 4: mod_base = OTHER; note = 2'-O-methyladenosine-3'-phosphate
  modified_base 5: mod_base = OTHER; note = 2'-O-methylcytidine-3'-phosphate
  modified_base 6: mod_base = OTHER; note = 2'-O-methylcytidine-3'-phosphate
  modified_base 7: mod_base = OTHER; note = 2'-O-methylguanosine-3'-phosphate
  modified_base 8: mod_base = OTHER; note = 2'-O-methylguanosine-3'-phosphate
  modified_base 9: mod_base = OTHER; note = 2'-fluoroguanosine-3'-phosphate
  modified_base 10: mod_base = OTHER; note = 2'-fluorouridine-3'-phosphate
  modified_base 11: mod_base = OTHER; note = 2'-fluoroguanosine-3'-phosphate
  modified_base 12: mod_base = OTHER; note = 2'-O-methyluridine-3'-phosphate
  modified_base 13: mod_base = OTHER; note = 2'-O-methyladenosine-3'-phosphate
  modified_base 14: mod_base = OTHER; note = 2'-O-methylcytidine-3'-phosphate
  modified_base 15: mod_base = OTHER; note = 2'-O-methyladenosine-3'-phosphate
  modified_base 16: mod_base = OTHER; note = 2'-O-methyluridine-3'-phosphate
  modified_base 17: mod_base = OTHER; note = 2'-O-methyladenosine-3'-phosphate
  modified_base 18: mod_base = OTHER; note = 2'-O-methylcytidine-3'-phosphate
  modified_base 19: mod_base = OTHER; note = 2'-O-methyladenosine-3'-phosphate
  modified_base 20: mod_base = OTHER; note = 2'-O-methylcytidine-3'-phosphate
  modified_base 21: mod_base = OTHER; note = 2'-O-methyluridine-3'-phosphate N-[tris(GalNAc-alkyl)-amidodecanoyl)]-4-hydroxyprolinol (Hyp-(GalNAc-alkyl)3)
gtgaccgggtgtacatacact

SEQ ID NO: 2020 - RNA, 21 nt, synthetic construct
  source 1..21: mol_type = other RNA
  modified_base 1: mod_base = OTHER; note = 2'-O-methylcytidine-3'-phosphorothioate
  modified_base 2: mod_base = OTHER; note = 2'-O-methyluridine-3'-phosphorothioate
  modified_base 3: mod_base = OTHER; note = 2'-O-methyluridine-3'-phosphate
  modified_base 4: mod_base = OTHER; note = 2'-O-methylcytidine-3'-phosphate
  modified_base 5: mod_base = OTHER; note = 2'-O-methylcytidine-3'-phosphate
  modified_base 6: mod_base = OTHER; note = 2'-O-methyladenosine-3'-phosphate
  modified_base 7: mod_base = OTHER; note = 2'-O-methylcytidine-3'-phosphate
  modified_base 8: mod_base = OTHER; note = 2'-O-methylcytidine-3'-phosphate
  modified_base 9: mod_base = OTHER; note = 2'-fluorouridine-3'-phosphate
  modified_base 10: mod_base = OTHER; note = 2'-fluorocytidine-3'-phosphate
  modified_base 11: mod_base = OTHER; note = 2'-fluoroguanosine-3'-phosphate
  modified_base 12: mod_base = OTHER; note = 2'-O-methyluridine-3'-phosphate
  modified_base 13: mod_base = OTHER; note = 2'-O-methylcytidine-3'-phosphate
  modified_base 14: mod_base = OTHER; note = 2'-O-methyladenosine-3'-phosphate
  modified_base 15: mod_base = OTHER; note = 2'-O-methyluridine-3'-phosphate
  modified_base 16: mod_base = OTHER; note = 2'-O-methylcytidine-3'-phosphate
  modified_base 17: mod_base = OTHER; note = 2'-O-methylcytidine-3'-phosphate
  modified_base 18: mod_base = OTHER; note = 2'-O-methyladenosine-3'-phosphate
  modified_base 19: mod_base = OTHER; note = 2'-O-methylcytidine-3'-phosphate
  modified_base 20: mod_base = OTHER; note = 2'-O-methyladenosine-3'-phosphate
  modified_base 21: mod_base = OTHER; note = 2'-O-methyluridine-3'-phosphate N-[tris(GalNAc-alkyl)-amidodecanoyl)]-4-hydroxyprolinol (Hyp-(GalNAc-alkyl)3)
cttccacctcgtcatccacat

SEQ ID NO: 2021 - RNA, 21 nt, synthetic construct
  source 1..21: mol_type = other RNA
  modified_base 1: mod_base = OTHER; note = 2'-O-methyluridine-3'-phosphorothioate
  modified_base 2: mod_base = OTHER; note = 2'-O-methyluridine-3'-phosphorothioate
  modified_base 3: mod_base = OTHER; note = 2'-O-methylcytidine-3'-phosphate
  modified_base 4: mod_base = OTHER; note = 2'-O-methylcytidine-3'-phosphate
  modified_base 5: mod_base = OTHER; note = 2'-O-methyladenosine-3'-phosphate
  modified_base 6: mod_base = OTHER; note = 2'-O-methylcytidine-3'-phosphate
  modified_base 7: mod_base = OTHER; note = 2'-O-methylcytidine-3'-phosphate
  modified_base 8: mod_base = OTHER; note = 2'-O-methyluridine-3'-phosphate
  modified_base 9: mod_base = OTHER; note = 2'-fluorocytidine-3'-phosphate
  modified_base 10: mod_base = OTHER; note = 2'-fluoroguanosine-3'-phosphate
  modified_base 11: mod_base = OTHER; note = 2'-fluorouridine-3'-phosphate
  modified_base 12: mod_base = OTHER; note = 2'-O-methylcytidine-3'-phosphate
  modified_base 13: mod_base = OTHER; note = 2'-O-methyladenosine-3'-phosphate
  modified_base 14: mod_base = OTHER; note = 2'-O-methyluridine-3'-phosphate
  modified_base 15: mod_base = OTHER; note = 2'-O-methylcytidine-3'-phosphate
  modified_base 16: mod_base = OTHER; note = 2'-O-methylcytidine-3'-phosphate
  modified_base 17: mod_base = OTHER; note = 2'-O-methyladenosine-3'-phosphate
  modified_base 18: mod_base = OTHER; note = 2'-O-methylcytidine-3'-phosphate
  modified_base 19: mod_base = OTHER; note = 2'-O-methyladenosine-3'-phosphate
  modified_base 20: mod_base = OTHER; note = 2'-O-methyladenosine-3'-phosphate
  modified_base 21: mod_base = OTHER; note = 2'-O-methyluridine-3'-phosphate N-[tris(GalNAc-alkyl)-amidodecanoyl)]-4-hydroxyprolinol (Hyp-(GalNAc-alkyl)3)
ttccacctcgtcatccacaat

SEQ ID NO: 2022 - RNA, 21 nt, synthetic construct
  source 1..21: mol_type = other RNA
  modified_base 1: mod_base = OTHER; note = 2'-O-methyluridine-3'-phosphorothioate
  modified_base 2: mod_base = OTHER; note = 2'-O-methylcytidine-3'-phosphorothioate
  modified_base 3: mod_base = OTHER; note = 2'-O-methylcytidine-3'-phosphate
  modified_base 4: mod_base = OTHER; note = 2'-O-methyladenosine-3'-phosphate
  modified_base 5: mod_base = OTHER; note = 2'-O-methylcytidine-3'-phosphate
  modified_base 6: mod_base = OTHER; note = 2'-O-methylcytidine-3'-phosphate
  modified_base 7: mod_base = OTHER; note = 2'-O-methyluridine-3'-phosphate
  modified_base 8: mod_base = OTHER; note = 2'-O-methylcytidine-3'-phosphate
  modified_base 9: mod_base = OTHER; note = 2'-fluoroguanosine-3'-phosphate
  modified_base 10: mod_base = OTHER; note = 2'-fluorouridine-3'-phosphate
  modified_base 11: mod_base = OTHER; note = 2'-fluorocytidine-3'-phosphate
  modified_base 12: mod_base = OTHER; note = 2'-O-methyladenosine-3'-phosphate
  modified_base 13: mod_base = OTHER; note = 2'-O-methyluridine-3'-phosphate
  modified_base 14: mod_base = OTHER; note = 2'-O-methylcytidine-3'-phosphate
  modified_base 15: mod_base = OTHER; note = 2'-O-methylcytidine-3'-phosphate
  modified_base 16: mod_base = OTHER; note = 2'-O-methyladenosine-3'-phosphate
  modified_base 17: mod_base = OTHER; note = 2'-O-methylcytidine-3'-phosphate
  modified_base 18: mod_base = OTHER; note = 2'-O-methyladenosine-3'-phosphate
  modified_base 19: mod_base = OTHER; note = 2'-O-methyladenosine-3'-phosphate
  modified_base 20: mod_base = OTHER; note = 2'-O-methyluridine-3'-phosphate
  modified_base 21: mod_base = OTHER; note = 2'-O-methyluridine-3'-phosphate N-[tris(GalNAc-alkyl)-amidodecanoyl)]-4-hydroxyprolinol (Hyp-(GalNAc-alkyl)3)
tccacctcgtcatccacaatt

SEQ ID NO: 2023 - RNA, 21 nt, synthetic construct
  source 1..21: mol_type = other RNA
  modified_base 1: mod_base = OTHER; note = 2'-O-methylcytidine-3'-phosphorothioate
  modified_base 2: mod_base = OTHER; note = 2'-O-methylcytidine-3'-phosphorothioate
  modified_base 3: mod_base = OTHER; note = 2'-O-methyladenosine-3'-phosphate
  modified_base 4: mod_base = OTHER; note = 2'-O-methylcytidine-3'-phosphate
  modified_base 5: mod_base = OTHER; note = 2'-O-methylcytidine-3'-phosphate
  modified_base 6: mod_base = OTHER; note = 2'-O-methyluridine-3'-phosphate
  modified_base 7: mod_base = OTHER; note = 2'-O-methylcytidine-3'-phosphate
  modified_base 8: mod_base = OTHER; note = 2'-O-methylguanosine-3'-phosphate
  modified_base 9: mod_base = OTHER; note = 2'-fluorouridine-3'-phosphate
  modified_base 10: mod_base = OTHER; note = 2'-fluorocytidine-3'-phosphate
  modified_base 11: mod_base = OTHER; note = 2'-fluoroadenosine-3'-phosphate
  modified_base 12: mod_base = OTHER; note = 2'-O-methyluridine-3'-phosphate
  modified_base 13: mod_base = OTHER; note = 2'-O-methylcytidine-3'-phosphate
  modified_base 14: mod_base = OTHER; note = 2'-O-methylcytidine-3'-phosphate
  modified_base 15: mod_base = OTHER; note = 2'-O-methyladenosine-3'-phosphate
  modified_base 16: mod_base = OTHER; note = 2'-O-methylcytidine-3'-phosphate
  modified_base 17: mod_base = OTHER; note = 2'-O-methyladenosine-3'-phosphate
  modified_base 18: mod_base = OTHER; note = 2'-O-methyladenosine-3'-phosphate
  modified_base 19: mod_base = OTHER; note = 2'-O-methyluridine-3'-phosphate
  modified_base 20: mod_base = OTHER; note = 2'-O-methylguanosine-3'-phosphate
  modified_base 21: mod_base = OTHER; note = 2'-O-methyluridine-3'-phosphate N-[tris(GalNAc-alkyl)-amidodecanoyl)]-4-hydroxyprolinol (Hyp-(GalNAc-alkyl)3)
ccacctcgtcatccacaatgt

SEQ ID NO: 2024 - RNA, 21 nt, synthetic construct
  source 1..21: mol_type = other RNA
  modified_base 1: mod_base = OTHER; note = 2'-O-methylcytidine-3'-phosphorothioate
  modified_base 2: mod_base = OTHER; note = 2'-O-methyladenosine-3'-phosphorothioate
  modified_base 3: mod_base = OTHER; note = 2'-O-methylcytidine-3'-phosphate
  modified_base 4: mod_base = OTHER; note = 2'-O-methylcytidine-3'-phosphate
  modified_base 5: mod_base = OTHER; note = 2'-O-methyluridine-3'-phosphate
  modified_base 6: mod_base = OTHER; note = 2'-O-methylcytidine-3'-phosphate
  modified_base 7: mod_base = OTHER; note = 2'-O-methylguanosine-3'-phosphate
  modified_base 8: mod_base = OTHER; note = 2'-O-methyluridine-3'-phosphate
  modified_base 9: mod_base = OTHER; note = 2'-fluorocytidine-3'-phosphate
  modified_base 10: mod_base = OTHER; note = 2'-fluoroadenosine-3'-phosphate
  modified_base 11: mod_base = OTHER; note = 2'-fluorouridine-3'-phosphate
  modified_base 12: mod_base = OTHER; note = 2'-O-methylcytidine-3'-phosphate
  modified_base 13: mod_base = OTHER; note = 2'-O-methylcytidine-3'-phosphate
  modified_base 14: mod_base = OTHER; note = 2'-O-methyladenosine-3'-phosphate
  modified_base 15: mod_base = OTHER; note = 2'-O-methylcytidine-3'-phosphate
  modified_base 16: mod_base = OTHER; note = 2'-O-methyladenosine-3'-phosphate
  modified_base 17: mod_base = OTHER; note = 2'-O-methyladenosine-3'-phosphate
  modified_base 18: mod_base = OTHER; note = 2'-O-methyluridine-3'-phosphate
  modified_base 19: mod_base = OTHER; note = 2'-O-methylguanosine-3'-phosphate
  modified_base 20: mod_base = OTHER; note = 2'-O-methyladenosine-3'-phosphate
  modified_base 21: mod_base = OTHER; note = 2'-O-methyluridine-3'-phosphate N-[tris(GalNAc-alkyl)-amidodecanoyl)]-4-hydroxyprolinol (Hyp-(GalNAc-alkyl)3)
cacctcgtcatccacaatgat

SEQ ID NO: 2025 - RNA, 21 nt, synthetic construct
  source 1..21: mol_type = other RNA
  modified_base 1: mod_base = OTHER; note = 2'-O-methyladenosine-3'-phosphorothioate
  modified_base 2: mod_base = OTHER; note = 2'-O-methylcytidine-3'-phosphorothioate
  modified_base 3: mod_base = OTHER; note = 2'-O-methylcytidine-3'-phosphate
  modified_base 4: mod_base = OTHER; note = 2'-O-methyluridine-3'-phosphate
  modified_base 5: mod_base = OTHER; note = 2'-O-methylcytidine-3'-phosphate
  modified_base 6: mod_base = OTHER; note = 2'-O-methylguanosine-3'-phosphate
  modified_base 7: mod_base = OTHER; note = 2'-O-methyluridine-3'-phosphate
  modified_base 8: mod_base = OTHER; note = 2'-O-methylcytidine-3'-phosphate
  modified_base 9: mod_base = OTHER; note = 2'-fluoroadenosine-3'-phosphate
  modified_base 10: mod_base = OTHER; note = 2'-fluorouridine-3'-phosphate
  modified_base 11: mod_base = OTHER; note = 2'-fluorocytidine-3'-phosphate
  modified_base 12: mod_base = OTHER; note = 2'-O-methylcytidine-3'-phosphate
  modified_base 13: mod_base = OTHER; note = 2'-O-methyladenosine-3'-phosphate
  modified_base 14: mod_base = OTHER; note = 2'-O-methylcytidine-3'-phosphate
  modified_base 15: mod_base = OTHER; note = 2'-O-methyladenosine-3'-phosphate
  modified_base 16: mod_base = OTHER; note = 2'-O-methyladenosine-3'-phosphate
  modified_base 17: mod_base = OTHER; note = 2'-O-methyluridine-3'-phosphate
  modified_base 18: mod_base = OTHER; note = 2'-O-methylguanosine-3'-phosphate
  modified_base 19: mod_base = OTHER; note = 2'-O-methyladenosine-3'-phosphate
  modified_base 20: mod_base = OTHER; note = 2'-O-methylguanosine-3'-phosphate
  modified_base 21: mod_base = OTHER; note = 2'-O-methyluridine-3'-phosphate N-[tris(GalNAc-alkyl)-amidodecanoyl)]-4-hydroxyprolinol (Hyp-(GalNAc-alkyl)3)
acctcgtcatccacaatgagt

SEQ ID NO: 2026 - RNA, 21 nt, synthetic construct
  source 1..21: mol_type = other RNA
  modified_base 1: mod_base = OTHER; note = 2'-O-methylcytidine-3'-phosphorothioate
  modified_base 2: mod_base = OTHER; note = 2'-O-methylcytidine-3'-phosphorothioate
  modified_base 3: mod_base = OTHER; note = 2'-O-methyluridine-3'-phosphate
  modified_base 4: mod_base = OTHER; note = 2'-O-methylcytidine-3'-phosphate
  modified_base 5: mod_base = OTHER; note = 2'-O-methylguanosine-3'-phosphate
  modified_base 6: mod_base = OTHER; note = 2'-O-methyluridine-3'-phosphate
  modified_base 7: mod_base = OTHER; note = 2'-O-methylcytidine-3'-phosphate
  modified_base 8: mod_base = OTHER; note = 2'-O-methyladenosine-3'-phosphate
  modified_base 9: mod_base = OTHER; note = 2'-fluorouridine-3'-phosphate
  modified_base 10: mod_base = OTHER; note = 2'-fluorocytidine-3'-phosphate
  modified_base 11: mod_base = OTHER; note = 2'-fluorocytidine-3'-phosphate
  modified_base 12: mod_base = OTHER; note = 2'-O-methyladenosine-3'-phosphate
  modified_base 13: mod_base = OTHER; note = 2'-O-methylcytidine-3'-phosphate
  modified_base 14: mod_base = OTHER; note = 2'-O-methyladenosine-3'-phosphate
  modified_base 15: mod_base = OTHER; note = 2'-O-methyladenosine-3'-phosphate
  modified_base 16: mod_base = OTHER; note = 2'-O-methyluridine-3'-phosphate
  modified_base 17: mod_base = OTHER; note = 2'-O-methylguanosine-3'-phosphate
  modified_base 18: mod_base = OTHER; note = 2'-O-methyladenosine-3'-phosphate
  modified_base 19: mod_base = OTHER; note = 2'-O-methylguanosine-3'-phosphate
  modified_base 20: mod_base = OTHER; note = 2'-O-methyladenosine-3'-phosphate
  modified_base 21: mod_base = OTHER; note = 2'-O-methyluridine-3'-phosphate N-[tris(GalNAc-alkyl)-amidodecanoyl)]-4-hydroxyprolinol (Hyp-(GalNAc-alkyl)3)
cctcgtcatccacaatgagat

SEQ ID NO: 2027 - RNA, 21 nt, synthetic construct
  source 1..21: mol_type = other RNA
  modified_base 1: mod_base = OTHER; note = 2'-O-methylcytidine-3'-phosphorothioate
  modified_base 2: mod_base = OTHER; note = 2'-O-methyluridine-3'-phosphorothioate
  modified_base 3: mod_base = OTHER; note = 2'-O-methylcytidine-3'-phosphate
  modified_base 4: mod_base = OTHER; note = 2'-O-methylguanosine-3'-phosphate
  modified_base 5: mod_base = OTHER; note = 2'-O-methyluridine-3'-phosphate
  modified_base 6: mod_base = OTHER; note = 2'-O-methylcytidine-3'-phosphate
  modified_base 7: mod_base = OTHER; note = 2'-O-methyladenosine-3'-phosphate
  modified_base 8: mod_base = OTHER; note = 2'-O-methyluridine-3'-phosphate
  modified_base 9: mod_base = OTHER; note = 2'-fluorocytidine-3'-phosphate
  modified_base 10: mod_base = OTHER; note = 2'-fluorocytidine-3'-phosphate
  modified_base 11: mod_base = OTHER; note = 2'-fluoroadenosine-3'-phosphate
  modified_base 12: mod_base = OTHER; note = 2'-O-methylcytidine-3'-phosphate
  modified_base 13: mod_base = OTHER; note = 2'-O-methyladenosine-3'-phosphate
  modified_base 14: mod_base = OTHER; note = 2'-O-methyladenosine-3'-phosphate
  modified_base 15: mod_base = OTHER; note = 2'-O-methyluridine-3'-phosphate
  modified_base 16: mod_base = OTHER; note = 2'-O-methylguanosine-3'-phosphate
  modified_base 17: mod_base = OTHER; note = 2'-O-methyladenosine-3'-phosphate
  modified_base 18: mod_base = OTHER; note = 2'-O-methylguanosine-3'-phosphate
  modified_base 19: mod_base = OTHER; note = 2'-O-methyladenosine-3'-phosphate
  modified_base 20: mod_base = OTHER; note = 2'-O-methylguanosine-3'-phosphate
  modified_base 21: mod_base = OTHER; note = 2'-O-methyluridine-3'-phosphate N-[tris(GalNAc-alkyl)-amidodecanoyl)]-4-hydroxyprolinol (Hyp-(GalNAc-alkyl)3)
ctcgtcatccacaatgagagt

SEQ ID NO: 2028 - RNA, 21 nt, synthetic construct
  source 1..21: mol_type = other RNA
  modified_base 1: mod_base = OTHER; note = 2'-O-methyluridine-3'-phosphorothioate
  modified_base 2: mod_base = OTHER; note = 2'-O-methylcytidine-3'-phosphorothioate
  modified_base 3: mod_base = OTHER; note = 2'-O-methylguanosine-3'-phosphate
  modified_base 4: mod_base = OTHER; note = 2'-O-methyluridine-3'-phosphate
  modified_base 5: mod_base = OTHER; note = 2'-O-methylcytidine-3'-phosphate
  modified_base 6: mod_base = OTHER; note = 2'-O-methyladenosine-3'-phosphate
  modified_base 7: mod_base = OTHER; note = 2'-O-methyluridine-3'-phosphate
  modified_base 8: mod_base = OTHER; note = 2'-O-methylcytidine-3'-phosphate
  modified_base 9: mod_base = OTHER; note = 2'-fluorocytidine-3'-phosphate
  modified_base 10: mod_base = OTHER; note = 2'-fluoroadenosine-3'-phosphate
  modified_base 11: mod_base = OTHER; note = 2'-fluorocytidine-3'-phosphate
  modified_base 12: mod_base = OTHER; note = 2'-O-methyladenosine-3'-phosphate
  modified_base 13: mod_base = OTHER; note = 2'-O-methyladenosine-3'-phosphate
  modified_base 14: mod_base = OTHER; note = 2'-O-methyluridine-3'-phosphate
  modified_base 15: mod_base = OTHER; note = 2'-O-methylguanosine-3'-phosphate
  modified_base 16: mod_base = OTHER; note = 2'-O-methyladenosine-3'-phosphate
  modified_base 17: mod_base = OTHER; note = 2'-O-methylguanosine-3'-phosphate
  modified_base 18: mod_base = OTHER; note = 2'-O-methyladenosine-3'-phosphate
  modified_base 19: mod_base = OTHER; note = 2'-O-methylguanosine-3'-phosphate
  modified_base 20: mod_base = OTHER; note = 2'-O-methyluridine-3'-phosphate
  modified_base 21: mod_base = OTHER; note = 2'-O-methyluridine-3'-phosphate N-[tris(GalNAc-alkyl)-amidodecanoyl)]-4-hydroxyprolinol (Hyp-(GalNAc-alkyl)3)
tcgtcatccacaatgagagtt

SEQ ID NO: 2029 - RNA, 21 nt, synthetic construct
  source 1..21: mol_type = other RNA
  modified_base 1: mod_base = OTHER; note = 2'-O-methylcytidine-3'-phosphorothioate
  modified_base 2: mod_base = OTHER; note = 2'-O-methylguanosine-3'-phosphorothioate
  modified_base 3: mod_base = OTHER; note = 2'-O-methyluridine-3'-phosphate
  modified_base 4: mod_base = OTHER; note = 2'-O-methylcytidine-3'-phosphate
  modified_base 5: mod_base = OTHER; note = 2'-O-methyladenosine-3'-phosphate
  modified_base 6: mod_base = OTHER; note = 2'-O-methyluridine-3'-phosphate
  modified_base 7: mod_base = OTHER; note = 2'-O-methylcytidine-3'-phosphate
  modified_base 8: mod_base = OTHER; note = 2'-O-methylcytidine-3'-phosphate
  modified_base 9: mod_base = OTHER; note = 2'-fluoroadenosine-3'-phosphate
  modified_base 10: mod_base = OTHER; note = 2'-fluorocytidine-3'-phosphate
  modified_base 11: mod_base = OTHER; note = 2'-fluoroadenosine-3'-phosphate
  modified_base 12: mod_base = OTHER; note = 2'-O-methyladenosine-3'-phosphate
  modified_base 13: mod_base = OTHER; note = 2'-O-methyluridine-3'-phosphate
  modified_base 14: mod_base = OTHER; note = 2'-O-methylguanosine-3'-phosphate
  modified_base 15: mod_base = OTHER; note = 2'-O-methyladenosine-3'-phosphate
  modified_base 16: mod_base = OTHER; note = 2'-O-methylguanosine-3'-phosphate
  modified_base 17: mod_base = OTHER; note = 2'-O-methyladenosine-3'-phosphate
  modified_base 18: mod_base = OTHER; note = 2'-O-methylguanosine-3'-phosphate
  modified_base 19: mod_base = OTHER; note = 2'-O-methyluridine-3'-phosphate
  modified_base 20: mod_base = OTHER; note = 2'-O-methyladenosine-3'-phosphate
  modified_base 21: mod_base = OTHER; note = 2'-O-methyluridine-3'-phosphate N-[tris(GalNAc-alkyl)-amidodecanoyl)]-4-hydroxyprolinol (Hyp-(GalNAc-alkyl)3)
cgtcatccacaatgagagtat

SEQ ID NO: 2030 - RNA, 21 nt, synthetic construct
  source 1..21: mol_type = other RNA
  modified_base 1: mod_base = OTHER; note = 2'-O-methylguanosine-3'-phosphorothioate
  modified_base 2: mod_base = OTHER; note = 2'-O-methyluridine-3'-phosphorothioate
  modified_base 3: mod_base = OTHER; note = 2'-O-methylcytidine-3'-phosphate
  modified_base 4: mod_base = OTHER; note = 2'-O-methyladenosine-3'-phosphate
  modified_base 5: mod_base = OTHER; note = 2'-O-methyluridine-3'-phosphate
  modified_base 6: mod_base = OTHER; note = 2'-O-methylcytidine-3'-phosphate
  modified_base 7: mod_base = OTHER; note = 2'-O-methylcytidine-3'-phosphate
  modified_base 8: mod_base = OTHER; note = 2'-O-methyladenosine-3'-phosphate
  modified_base 9: mod_base = OTHER; note = 2'-fluorocytidine-3'-phosphate
  modified_base 10: mod_base = OTHER; note = 2'-fluoroadenosine-3'-phosphate
  modified_base 11: mod_base = OTHER; note = 2'-fluoroadenosine-3'-phosphate
  modified_base 12: mod_base = OTHER; note = 2'-O-methyluridine-3'-phosphate
  modified_base 13: mod_base = OTHER; note = 2'-O-methylguanosine-3'-phosphate
  modified_base 14: mod_base = OTHER; note = 2'-O-methyladenosine-3'-phosphate
  modified_base 15: mod_base = OTHER; note = 2'-O-methylguanosine-3'-phosphate
  modified_base 16: mod_base = OTHER; note = 2'-O-methyladenosine-3'-phosphate
  modified_base 17: mod_base = OTHER; note = 2'-O-methylguanosine-3'-phosphate
  modified_base 18: mod_base = OTHER; note = 2'-O-methyluridine-3'-phosphate
  modified_base 19: mod_base = OTHER; note = 2'-O-methyladenosine-3'-phosphate
  modified_base 20: mod_base = OTHER; note = 2'-O-methylcytidine-3'-phosphate
  modified_base 21: mod_base = OTHER; note = 2'-O-methyluridine-3'-phosphate N-[tris(GalNAc-alkyl)-amidodecanoyl)]-4-hydroxyprolinol (Hyp-(GalNAc-alkyl)3)
gtcatccacaatgagagtact

SEQ ID NO: 2031 - RNA, 21 nt, synthetic construct
  source 1..21: mol_type = other RNA
  modified_base 1: mod_base = OTHER; note = 2'-O-methyluridine-3'-phosphorothioate
  modified_base 2: mod_base = OTHER; note = 2'-O-methylcytidine-3'-phosphorothioate
  modified_base 3: mod_base = OTHER; note = 2'-O-methyladenosine-3'-phosphate
  modified_base 4: mod_base = OTHER; note = 2'-O-methyluridine-3'-phosphate
  modified_base 5: mod_base = OTHER; note = 2'-O-methylcytidine-3'-phosphate
  modified_base 6: mod_base = OTHER; note = 2'-O-methylcytidine-3'-phosphate
  modified_base 7: mod_base = OTHER; note = 2'-O-methyladenosine-3'-phosphate
  modified_base 8: mod_base = OTHER; note = 2'-O-methylcytidine-3'-phosphate
  modified_base 9: mod_base = OTHER; note = 2'-fluoroadenosine-3'-phosphate
  modified_base 10: mod_base = OTHER; note = 2'-fluoroadenosine-3'-phosphate
  modified_base 11: mod_base = OTHER; note = 2'-fluorouridine-3'-phosphate
  modified_base 12: mod_base = OTHER; note = 2'-O-methylguanosine-3'-phosphate
  modified_base 13: mod_base = OTHER; note = 2'-O-methyladenosine-3'-phosphate
  modified_base 14: mod_base = OTHER; note = 2'-O-methylguanosine-3'-phosphate
  modified_base 15: mod_base = OTHER; note = 2'-O-methyladenosine-3'-phosphate
  modified_base 16: mod_base = OTHER; note = 2'-O-methylguanosine-3'-phosphate
  modified_base 17: mod_base = OTHER; note = 2'-O-methyluridine-3'-phosphate
  modified_base 18: mod_base = OTHER; note = 2'-O-methyladenosine-3'-phosphate
  modified_base 19: mod_base = OTHER; note = 2'-O-methylcytidine-3'-phosphate
  modified_base 20: mod_base = OTHER; note = 2'-O-methylcytidine-3'-phosphate
  modified_base 21: mod_base = OTHER; note = 2'-O-methyluridine-3'-phosphate N-[tris(GalNAc-alkyl)-amidodecanoyl)]-4-hydroxyprolinol (Hyp-(GalNAc-alkyl)3)
tcatccacaatgagagtacct

SEQ ID NO: 2032 - RNA, 21 nt, synthetic construct
  source 1..21: mol_type = other RNA
  modified_base 1: mod_base = OTHER; note = 2'-O-methylcytidine-3'-phosphorothioate
  modified_base 2: mod_base = OTHER; note = 2'-O-methyladenosine-3'-phosphorothioate
  modified_base 3: mod_base = OTHER; note = 2'-O-methyluridine-3'-phosphate
  modified_base 4: mod_base = OTHER; note = 2'-O-methylcytidine-3'-phosphate
  modified_base 5: mod_base = OTHER; note = 2'-O-methylcytidine-3'-phosphate
  modified_base 6: mod_base = OTHER; note = 2'-O-methyladenosine-3'-phosphate
  modified_base 7: mod_base = OTHER; note = 2'-O-methylcytidine-3'-phosphate
  modified_base 8: mod_base = OTHER; note = 2'-O-methyladenosine-3'-phosphate
  modified_base 9: mod_base = OTHER; note = 2'-fluoroadenosine-3'-phosphate
  modified_base 10: mod_base = OTHER; note = 2'-fluorouridine-3'-phosphate
  modified_base 11: mod_base = OTHER; note = 2'-fluoroguanosine-3'-phosphate
  modified_base 12: mod_base = OTHER; note = 2'-O-methyladenosine-3'-phosphate
  modified_base 13: mod_base = OTHER; note = 2'-O-methylguanosine-3'-phosphate
  modified_base 14: mod_base = OTHER; note = 2'-O-methyladenosine-3'-phosphate
  modified_base 15: mod_base = OTHER; note = 2'-O-methylguanosine-3'-phosphate
  modified_base 16: mod_base = OTHER; note = 2'-O-methyluridine-3'-phosphate
  modified_base 17: mod_base = OTHER; note = 2'-O-methyladenosine-3'-phosphate
  modified_base 18: mod_base = OTHER; note = 2'-O-methylcytidine-3'-phosphate
  modified_base 19: mod_base = OTHER; note = 2'-O-methylcytidine-3'-phosphate
  modified_base 20: mod_base = OTHER; note = 2'-O-methyluridine-3'-phosphate
  modified_base 21: mod_base = OTHER; note = 2'-O-methyluridine-3'-phosphate N-[tris(GalNAc-alkyl)-amidodecanoyl)]-4-hydroxyprolinol (Hyp-(GalNAc-alkyl)3)
catccacaatgagagtacctt

SEQ ID NO: 2033 - RNA, 21 nt, synthetic construct
  source 1..21: mol_type = other RNA
  modified_base 1: mod_base = OTHER; note = 2'-O-methyladenosine-3'-phosphorothioate
  modified_base 2: mod_base = OTHER; note = 2'-O-methyluridine-3'-phosphorothioate
  modified_base 3: mod_base = OTHER; note = 2'-O-methylcytidine-3'-phosphate
  modified_base 4: mod_base = OTHER; note = 2'-O-methylcytidine-3'-phosphate
  modified_base 5: mod_base = OTHER; note = 2'-O-methyladenosine-3'-phosphate
  modified_base 6: mod_base = OTHER; note = 2'-O-methylcytidine-3'-phosphate
  modified_base 7: mod_base = OTHER; note = 2'-O-methyladenosine-3'-phosphate
  modified_base 8: mod_base = OTHER; note = 2'-O-methyladenosine-3'-phosphate
  modified_base 9: mod_base = OTHER; note = 2'-fluorouridine-3'-phosphate
  modified_base 10: mod_base = OTHER; note = 2'-fluoroguanosine-3'-phosphate
  modified_base 11: mod_base = OTHER; note = 2'-fluoroadenosine-3'-phosphate
  modified_base 12: mod_base = OTHER; note = 2'-O-methylguanosine-3'-phosphate
  modified_base 13: mod_base = OTHER; note = 2'-O-methyladenosine-3'-phosphate
  modified_base 14: mod_base = OTHER; note = 2'-O-methylguanosine-3'-phosphate
  modified_base 15: mod_base = OTHER; note = 2'-O-methyluridine-3'-phosphate
  modified_base 16: mod_base = OTHER; note = 2'-O-methyladenosine-3'-phosphate
  modified_base 17: mod_base = OTHER; note = 2'-O-methylcytidine-3'-phosphate
  modified_base 18: mod_base = OTHER; note = 2'-O-methylcytidine-3'-phosphate
  modified_base 19: mod_base = OTHER; note = 2'-O-methyluridine-3'-phosphate
  modified_base 20: mod_base = OTHER; note = 2'-O-methylguanosine-3'-phosphate
  modified_base 21: mod_base = OTHER; note = 2'-O-methyluridine-3'-phosphate N-[tris(GalNAc-alkyl)-amidodecanoyl)]-4-hydroxyprolinol (Hyp-(GalNAc-alkyl)3)
atccacaatgagagtacctgt

SEQ ID NO: 2034 - RNA, 21 nt, synthetic construct
  source 1..21: mol_type = other RNA
  modified_base 1: mod_base = OTHER; note = 2'-O-methyluridine-3'-phosphorothioate
  modified_base 2: mod_base = OTHER; note = 2'-O-methylcytidine-3'-phosphorothioate
  modified_base 3: mod_base = OTHER; note = 2'-O-methylcytidine-3'-phosphate
  modified_base 4: mod_base = OTHER; note = 2'-O-methyladenosine-3'-phosphate
  modified_base 5: mod_base = OTHER; note = 2'-O-methylcytidine-3'-phosphate
  modified_base 6: mod_base = OTHER; note = 2'-O-methyladenosine-3'-phosphate
  modified_base 7: mod_base = OTHER; note = 2'-O-methyladenosine-3'-phosphate
  modified_base 8: mod_base = OTHER; note = 2'-O-methyluridine-3'-phosphate
  modified_base 9: mod_base = OTHER; note = 2'-fluoroguanosine-3'-phosphate
  modified_base 10: mod_base = OTHER; note = 2'-fluoroadenosine-3'-phosphate
  modified_base 11: mod_base = OTHER; note = 2'-fluoroguanosine-3'-phosphate
  modified_base 12: mod_base = OTHER; note = 2'-O-methyladenosine-3'-phosphate
  modified_base 13: mod_base = OTHER; note = 2'-O-methylguanosine-3'-phosphate
  modified_base 14: mod_base = OTHER; note = 2'-O-methyluridine-3'-phosphate
  modified_base 15: mod_base = OTHER; note = 2'-O-methyladenosine-3'-phosphate
  modified_base 16: mod_base = OTHER; note = 2'-O-methylcytidine-3'-phosphate
  modified_base 17: mod_base = OTHER; note = 2'-O-methylcytidine-3'-phosphate
  modified_base 18: mod_base = OTHER; note = 2'-O-methyluridine-3'-phosphate
  modified_base 19: mod_base = OTHER; note = 2'-O-methylguanosine-3'-phosphate
  modified_base 20: mod_base = OTHER; note = 2'-O-methyluridine-3'-phosphate
  modified_base 21: mod_base = OTHER; note = 2'-O-methyluridine-3'-phosphate N-[tris(GalNAc-alkyl)-amidodecanoyl)]-4-hydroxyprolinol (Hyp-(GalNAc-alkyl)3)
tccacaatgagagtacctgtt

SEQ ID NO: 2035 - RNA, 21 nt, synthetic construct
  source 1..21: mol_type = other RNA
  modified_base 1: mod_base = OTHER; note = 2'-O-methylcytidine-3'-phosphorothioate
  modified_base 2: mod_base = OTHER; note = 2'-O-methylcytidine-3'-phosphorothioate
  modified_base 3: mod_base = OTHER; note = 2'-O-methyladenosine-3'-phosphate
  modified_base 4: mod_base = OTHER; note = 2'-O-methylcytidine-3'-phosphate
  modified_base 5: mod_base = OTHER; note = 2'-O-methyladenosine-3'-phosphate
  modified_base 6: mod_base = OTHER; note = 2'-O-methyladenosine-3'-phosphate
  modified_base 7: mod_base = OTHER; note = 2'-O-methyluridine-3'-phosphate
  modified_base 8: mod_base = OTHER; note = 2'-O-methylguanosine-3'-phosphate
  modified_base 9: mod_base = OTHER; note = 2'-fluoroadenosine-3'-phosphate
  modified_base 10: mod_base = OTHER; note = 2'-fluoroguanosine-3'-phosphate
  modified_base 11: mod_base = OTHER; note = 2'-fluoroadenosine-3'-phosphate
  modified_base 12: mod_base = OTHER; note = 2'-O-methylguanosine-3'-phosphate
  modified_base 13: mod_base = OTHER; note = 2'-O-methyluridine-3'-phosphate
  modified_base 14: mod_base = OTHER; note = 2'-O-methyladenosine-3'-phosphate
  modified_base 15: mod_base = OTHER; note = 2'-O-methylcytidine-3'-phosphate
  modified_base 16: mod_base = OTHER; note = 2'-O-methylcytidine-3'-phosphate
  modified_base 17: mod_base = OTHER; note = 2'-O-methyluridine-3'-phosphate
  modified_base 18: mod_base = OTHER; note = 2'-O-methylguanosine-3'-phosphate
  modified_base 19: mod_base = OTHER; note = 2'-O-methyluridine-3'-phosphate
  modified_base 20: mod_base = OTHER; note = 2'-O-methylguanosine-3'-phosphate
  modified_base 21: mod_base = OTHER; note = 2'-O-methyluridine-3'-phosphate N-[tris(GalNAc-alkyl)-amidodecanoyl)]-4-hydroxyprolinol (Hyp-(GalNAc-alkyl)3)
ccacaatgagagtacctgtgt

SEQ ID NO: 2036 - RNA, 21 nt, synthetic construct
  source 1..21: mol_type = other RNA
  modified_base 1: mod_base = OTHER; note = 2'-O-methylcytidine-3'-phosphorothioate
  modified_base 2: mod_base = OTHER; note = 2'-O-methyladenosine-3'-phosphorothioate
  modified_base 3: mod_base = OTHER; note = 2'-O-methylcytidine-3'-phosphate
  modified_base 4: mod_base = OTHER; note = 2'-O-methyladenosine-3'-phosphate
  modified_base 5: mod_base = OTHER; note = 2'-O-methyladenosine-3'-phosphate
  modified_base 6: mod_base = OTHER; note = 2'-O-methyluridine-3'-phosphate
  modified_base 7: mod_base = OTHER; note = 2'-O-methylguanosine-3'-phosphate
  modified_base 8: mod_base = OTHER; note = 2'-O-methyladenosine-3'-phosphate
  modified_base 9: mod_base = OTHER; note = 2'-fluoroguanosine-3'-phosphate
  modified_base 10: mod_base = OTHER; note = 2'-fluoroadenosine-3'-phosphate
  modified_base 11: mod_base = OTHER; note = 2'-fluoroguanosine-3'-phosphate
  modified_base 12: mod_base = OTHER; note = 2'-O-methyluridine-3'-phosphate
  modified_base 13: mod_base = OTHER; note = 2'-O-methyladenosine-3'-phosphate
  modified_base 14: mod_base = OTHER; note = 2'-O-methylcytidine-3'-phosphate
  modified_base 15: mod_base = OTHER; note = 2'-O-methylcytidine-3'-phosphate
  modified_base 16: mod_base = OTHER; note = 2'-O-methyluridine-3'-phosphate
  modified_base 17: mod_base = OTHER; note = 2'-O-methylguanosine-3'-phosphate
  modified_base 18: mod_base = OTHER; note = 2'-O-methyluridine-3'-phosphate
  modified_base 19: mod_base = OTHER; note = 2'-O-methylguanosine-3'-phosphate
  modified_base 20: mod_base = OTHER; note = 2'-O-methyladenosine-3'-phosphate
  modified_base 21: mod_base = OTHER; note = 2'-O-methyluridine-3'-phosphate N-[tris(GalNAc-alkyl)-amidodecanoyl)]-4-hydroxyprolinol (Hyp-(GalNAc-alkyl)3)
cacaatgagagtacctgtgat

SEQ ID NO: 2037 - RNA, 21 nt, synthetic construct
  source 1..21: mol_type = other RNA
  modified_base 1: mod_base = OTHER; note = 2'-O-methyladenosine-3'-phosphorothioate
  modified_base 2: mod_base = OTHER; note = 2'-O-methylcytidine-3'-phosphorothioate
  modified_base 3: mod_base = OTHER; note = 2'-O-methyladenosine-3'-phosphate
  modified_base 4: mod_base = OTHER; note = 2'-O-methyladenosine-3'-phosphate
  modified_base 5: mod_base = OTHER; note = 2'-O-methyluridine-3'-phosphate
  modified_base 6: mod_base = OTHER; note = 2'-O-methylguanosine-3'-phosphate
  modified_base 7: mod_base = OTHER; note = 2'-O-methyladenosine-3'-phosphate
  modified_base 8: mod_base = OTHER; note = 2'-O-methylguanosine-3'-phosphate
  modified_base 9: mod_base = OTHER; note = 2'-fluoroadenosine-3'-phosphate
  modified_base 10: mod_base = OTHER; note = 2'-fluoroguanosine-3'-phosphate
  modified_base 11: mod_base = OTHER; note = 2'-fluorouridine-3'-phosphate
  modified_base 12: mod_base = OTHER; note = 2'-O-methyladenosine-3'-phosphate
  modified_base 13: mod_base = OTHER; note = 2'-O-methylcytidine-3'-phosphate
  modified_base 14: mod_base = OTHER; note = 2'-O-methylcytidine-3'-phosphate
  modified_base 15: mod_base = OTHER; note = 2'-O-methyluridine-3'-phosphate
  modified_base 16: mod_base = OTHER; note = 2'-O-methylguanosine-3'-phosphate
  modified_base 17: mod_base = OTHER; note = 2'-O-methyluridine-3'-phosphate
  modified_base 18: mod_base = OTHER; note = 2'-O-methylguanosine-3'-phosphate
  modified_base 19: mod_base = OTHER; note = 2'-O-methyladenosine-3'-phosphate
  modified_base 20: mod_base = OTHER; note = 2'-O-methylguanosine-3'-phosphate
  modified_base 21: mod_base = OTHER; note = 2'-O-methyluridine-3'-phosphate N-[tris(GalNAc-alkyl)-amidodecanoyl)]-4-hydroxyprolinol (Hyp-(GalNAc-alkyl)3)
acaatgagagtacctgtgagt

SEQ ID NO: 2038 - RNA, 21 nt, synthetic construct
  source 1..21: mol_type = other RNA
  modified_base 1: mod_base = OTHER; note = 2'-O-methylcytidine-3'-phosphorothioate
  modified_base 2: mod_base = OTHER; note = 2'-O-methyladenosine-3'-phosphorothioate
  modified_base 3: mod_base = OTHER; note = 2'-O-methyladenosine-3'-phosphate
  modified_base 4: mod_base = OTHER; note = 2'-O-methyluridine-3'-phosphate
  modified_base 5: mod_base = OTHER; note = 2'-O-methylguanosine-3'-phosphate
  modified_base 6: mod_base = OTHER; note = 2'-O-methyladenosine-3'-phosphate
  modified_base 7: mod_base = OTHER; note = 2'-O-methylguanosine-3'-phosphate
  modified_base 8: mod_base = OTHER; note = 2'-O-methyladenosine-3'-phosphate
  modified_base 9: mod_base = OTHER; note = 2'-fluoroguanosine-3'-phosphate
  modified_base 10: mod_base = OTHER; note = 2'-fluorouridine-3'-phosphate
  modified_base 11: mod_base = OTHER; note = 2'-fluoroadenosine-3'-phosphate
  modified_base 12: mod_base = OTHER; note = 2'-O-methylcytidine-3'-phosphate
  modified_base 13: mod_base = OTHER; note = 2'-O-methylcytidine-3'-phosphate
  modified_base 14: mod_base = OTHER; note = 2'-O-methyluridine-3'-phosphate
  modified_base 15: mod_base = OTHER; note = 2'-O-methylguanosine-3'-phosphate
  modified_base 16: mod_base = OTHER; note = 2'-O-methyluridine-3'-phosphate
  modified_base 17: mod_base = OTHER; note = 2'-O-methylguanosine-3'-phosphate
  modified_base 18: mod_base = OTHER; note = 2'-O-methyladenosine-3'-phosphate
  modified_base 19: mod_base = OTHER; note = 2'-O-methylguanosine-3'-phosphate
  modified_base 20: mod_base = OTHER; note = 2'-O-methylcytidine-3'-phosphate
  modified_base 21: mod_base = OTHER; note = 2'-O-methyluridine-3'-phosphate N-[tris(GalNAc-alkyl)-amidodecanoyl)]-4-hydroxyprolinol (Hyp-(GalNAc-alkyl)3)
caatgagagtacctgtgagct

SEQ ID NO: 2039 - RNA, 21 nt, synthetic construct
  source 1..21: mol_type = other RNA
  modified_base 1: mod_base = OTHER; note = 2'-O-methyladenosine-3'-phosphorothioate
  modified_base 2: mod_base = OTHER; note = 2'-O-methyladenosine-3'-phosphorothioate
  modified_base 3: mod_base = OTHER; note = 2'-O-methyluridine-3'-phosphate
  modified_base 4: mod_base = OTHER; note = 2'-O-methylguanosine-3'-phosphate
  modified_base 5: mod_base = OTHER; note = 2'-O-methyladenosine-3'-phosphate
  modified_base 6: mod_base = OTHER; note = 2'-O-methylguanosine-3'-phosphate
  modified_base 7: mod_base = OTHER; note = 2'-O-methyladenosine-3'-phosphate
  modified_base 8: mod_base = OTHER; note = 2'-O-methylguanosine-3'-phosphate
  modified_base 9: mod_base = OTHER; note = 2'-fluorouridine-3'-phosphate
  modified_base 10: mod_base = OTHER; note = 2'-fluoroadenosine-3'-phosphate
  modified_base 11: mod_base = OTHER; note = 2'-fluorocytidine-3'-phosphate
  modified_base 12: mod_base = OTHER; note = 2'-O-methylcytidine-3'-phosphate
  modified_base 13: mod_base = OTHER; note = 2'-O-methyluridine-3'-phosphate
  modified_base 14: mod_base = OTHER; note = 2'-O-methylguanosine-3'-phosphate
  modified_base 15: mod_base = OTHER; note = 2'-O-methyluridine-3'-phosphate
  modified_base 16: mod_base = OTHER; note = 2'-O-methylguanosine-3'-phosphate
  modified_base 17: mod_base = OTHER; note = 2'-O-methyladenosine-3'-phosphate
  modified_base 18: mod_base = OTHER; note = 2'-O-methylguanosine-3'-phosphate
  modified_base 19: mod_base = OTHER; note = 2'-O-methylcytidine-3'-phosphate
  modified_base 20: mod_base = OTHER; note = 2'-O-methyladenosine-3'-phosphate
  modified_base 21: mod_base = OTHER; note = 2'-O-methyluridine-3'-phosphate N-[tris(GalNAc-alkyl)-amidodecanoyl)]-4-hydroxyprolinol (Hyp-(GalNAc-alkyl)3)
aatgagagtacctgtgagcat

SEQ ID NO: 2040 - RNA, 21 nt, synthetic construct
  source 1..21: mol_type = other RNA
  modified_base 1: mod_base = OTHER; note = 2'-O-methyladenosine-3'-phosphorothioate
  modified_base 2: mod_base = OTHER; note = 2'-O-methyluridine-3'-phosphorothioate
  modified_base 3: mod_base = OTHER; note = 2'-O-methylguanosine-3'-phosphate
  modified_base 4: mod_base = OTHER; note = 2'-O-methyladenosine-3'-phosphate
  modified_base 5: mod_base = OTHER; note = 2'-O-methylguanosine-3'-phosphate
  modified_base 6: mod_base = OTHER; note = 2'-O-methyladenosine-3'-phosphate
  modified_base 7: mod_base = OTHER; note = 2'-O-methylguanosine-3'-phosphate
  modified_base 8: mod_base = OTHER; note = 2'-O-methyluridine-3'-phosphate
  modified_base 9: mod_base = OTHER; note = 2'-fluoroadenosine-3'-phosphate
  modified_base 10: mod_base = OTHER; note = 2'-fluorocytidine-3'-phosphate
  modified_base 11: mod_base = OTHER; note = 2'-fluorocytidine-3'-phosphate
  modified_base 12: mod_base = OTHER; note = 2'-O-methyluridine-3'-phosphate
  modified_base 13: mod_base = OTHER; note = 2'-O-methylguanosine-3'-phosphate
  modified_base 14: mod_base = OTHER; note = 2'-O-methyluridine-3'-phosphate
  modified_base 15: mod_base = OTHER; note = 2'-O-methylguanosine-3'-phosphate
  modified_base 16: mod_base = OTHER; note = 2'-O-methyladenosine-3'-phosphate
  modified_base 17: mod_base = OTHER; note = 2'-O-methylguanosine-3'-phosphate
  modified_base 18: mod_base = OTHER; note = 2'-O-methylcytidine-3'-phosphate
  modified_base 19: mod_base = OTHER; note = 2'-O-methyladenosine-3'-phosphate
  modified_base 20: mod_base = OTHER; note = 2'-O-methylguanosine-3'-phosphate
  modified_base 21: mod_base = OTHER; note = 2'-O-methyluridine-3'-phosphate N-[tris(GalNAc-alkyl)-amidodecanoyl)]-4-hydroxyprolinol (Hyp-(GalNAc-alkyl)3)
atgagagtacctgtgagcagt

SEQ ID NO: 2041 - RNA, 21 nt, synthetic construct
  source 1..21: mol_type = other RNA
  modified_base 1: mod_base = OTHER; note = 2'-O-methyluridine-3'-phosphorothioate
  modified_base 2: mod_base = OTHER; note = 2'-O-methylguanosine-3'-phosphorothioate
  modified_base 3: mod_base = OTHER; note = 2'-O-methyladenosine-3'-phosphate
  modified_base 4: mod_base = OTHER; note = 2'-O-methylguanosine-3'-phosphate
  modified_base 5: mod_base = OTHER; note = 2'-O-methyladenosine-3'-phosphate
  modified_base 6: mod_base = OTHER; note = 2'-O-methylguanosine-3'-phosphate
  modified_base 7: mod_base = OTHER; note = 2'-O-methyluridine-3'-phosphate
  modified_base 8: mod_base = OTHER; note = 2'-O-methyladenosine-3'-phosphate
  modified_base 9: mod_base = OTHER; note = 2'-fluorocytidine-3'-phosphate
  modified_base 10: mod_base = OTHER; note = 2'-fluorocytidine-3'-phosphate
  modified_base 11: mod_base = OTHER; note = 2'-fluorouridine-3'-phosphate
  modified_base 12: mod_base = OTHER; note = 2'-O-methylguanosine-3'-phosphate
  modified_base 13: mod_base = OTHER; note = 2'-O-methyluridine-3'-phosphate
  modified_base 14: mod_base = OTHER; note = 2'-O-methylguanosine-3'-phosphate
  modified_base 15: mod_base = OTHER; note = 2'-O-methyladenosine-3'-phosphate
  modified_base 16: mod_base = OTHER; note = 2'-O-methylguanosine-3'-phosphate
  modified_base 17: mod_base = OTHER; note = 2'-O-methylcytidine-3'-phosphate
  modified_base 18: mod_base = OTHER; note = 2'-O-methyladenosine-3'-phosphate
  modified_base 19: mod_base = OTHER; note = 2'-O-methylguanosine-3'-phosphate
  modified_base 20: mod_base = OTHER; note = 2'-O-methylcytidine-3'-phosphate
  modified_base 21: mod_base = OTHER; note = 2'-O-methyluridine-3'-phosphate N-[tris(GalNAc-alkyl)-amidodecanoyl)]-4-hydroxyprolinol (Hyp-(GalNAc-alkyl)3)
tgagagtacctgtgagcagct

SEQ ID NO: 2042 - RNA, 21 nt, synthetic construct
  source 1..21: mol_type = other RNA
  modified_base 1: mod_base = OTHER; note = 2'-O-methylguanosine-3'-phosphorothioate
  modified_base 2: mod_base = OTHER; note = 2'-O-methyladenosine-3'-phosphorothioate
  modified_base 3: mod_base = OTHER; note = 2'-O-methylguanosine-3'-phosphate
  modified_base 4: mod_base = OTHER; note = 2'-O-methyladenosine-3'-phosphate
  modified_base 5: mod_base = OTHER; note = 2'-O-methylguanosine-3'-phosphate
  modified_base 6: mod_base = OTHER; note = 2'-O-methyluridine-3'-phosphate
  modified_base 7: mod_base = OTHER; note = 2'-O-methyladenosine-3'-phosphate
  modified_base 8: mod_base = OTHER; note = 2'-O-methylcytidine-3'-phosphate
  modified_base 9: mod_base = OTHER; note = 2'-fluorocytidine-3'-phosphate
  modified_base 10: mod_base = OTHER; note = 2'-fluorouridine-3'-phosphate
  modified_base 11: mod_base = OTHER; note = 2'-fluoroguanosine-3'-phosphate
  modified_base 12: mod_base = OTHER; note = 2'-O-methyluridine-3'-phosphate
  modified_base 13: mod_base = OTHER; note = 2'-O-methylguanosine-3'-phosphate
  modified_base 14: mod_base = OTHER; note = 2'-O-methyladenosine-3'-phosphate
  modified_base 15: mod_base = OTHER; note = 2'-O-methylguanosine-3'-phosphate
  modified_base 16: mod_base = OTHER; note = 2'-O-methylcytidine-3'-phosphate
  modified_base 17: mod_base = OTHER; note = 2'-O-methyladenosine-3'-phosphate
  modified_base 18: mod_base = OTHER; note = 2'-O-methylguanosine-3'-phosphate
  modified_base 19: mod_base = OTHER; note = 2'-O-methylcytidine-3'-phosphate
  modified_base 20: mod_base = OTHER; note = 2'-O-methyluridine-3'-phosphate
  modified_base 21: mod_base = OTHER; note = 2'-O-methyluridine-3'-phosphate N-[tris(GalNAc-alkyl)-amidodecanoyl)]-4-hydroxyprolinol (Hyp-(GalNAc-alkyl)3)
gagagtacctgtgagcagctt

SEQ ID NO: 2043 - RNA, 21 nt, synthetic construct
  source 1..21: mol_type = other RNA
  modified_base 1: mod_base = OTHER; note = 2'-O-methyladenosine-3'-phosphorothioate
  modified_base 2: mod_base = OTHER; note = 2'-O-methylguanosine-3'-phosphorothioate
  modified_base 3: mod_base = OTHER; note = 2'-O-methyladenosine-3'-phosphate
  modified_base 4: mod_base = OTHER; note = 2'-O-methylguanosine-3'-phosphate
  modified_base 5: mod_base = OTHER; note = 2'-O-methyluridine-3'-phosphate
  modified_base 6: mod_base = OTHER; note = 2'-O-methyladenosine-3'-phosphate
  modified_base 7: mod_base = OTHER; note = 2'-O-methylcytidine-3'-phosphate
  modified_base 8: mod_base = OTHER; note = 2'-O-methylcytidine-3'-phosphate
  modified_base 9: mod_base = OTHER; note = 2'-fluorouridine-3'-phosphate
  modified_base 10: mod_base = OTHER; note = 2'-fluoroguanosine-3'-phosphate
  modified_base 11: mod_base = OTHER; note = 2'-fluorouridine-3'-phosphate
  modified_base 12: mod_base = OTHER; note = 2'-O-methylguanosine-3'-phosphate
  modified_base 13: mod_base = OTHER; note = 2'-O-methyladenosine-3'-phosphate
  modified_base 14: mod_base = OTHER; note = 2'-O-methylguanosine-3'-phosphate
  modified_base 15: mod_base = OTHER; note = 2'-O-methylcytidine-3'-phosphate
  modified_base 16: mod_base = OTHER; note = 2'-O-methyladenosine-3'-phosphate
  modified_base 17: mod_base = OTHER; note = 2'-O-methylguanosine-3'-phosphate
  modified_base 18: mod_base = OTHER; note = 2'-O-methylcytidine-3'-phosphate
  modified_base 19: mod_base = OTHER; note = 2'-O-methyluridine-3'-phosphate
  modified_base 20: mod_base = OTHER; note = 2'-O-methylguanosine-3'-phosphate
  modified_base 21: mod_base = OTHER; note = 2'-O-methyluridine-3'-phosphate N-[tris(GalNAc-alkyl)-amidodecanoyl)]-4-hydroxyprolinol (Hyp-(GalNAc-alkyl)3)
agagtacctgtgagcagctgt

SEQ ID NO: 2044 - RNA, 21 nt, synthetic construct
  source 1..21: mol_type = other RNA
  modified_base 1: mod_base = OTHER; note = 2'-O-methylguanosine-3'-phosphorothioate
  modified_base 2: mod_base = OTHER; note = 2'-O-methyladenosine-3'-phosphorothioate
  modified_base 3: mod_base = OTHER; note = 2'-O-methylguanosine-3'-phosphate
  modified_base 4: mod_base = OTHER; note = 2'-O-methyluridine-3'-phosphate
  modified_base 5: mod_base = OTHER; note = 2'-O-methyladenosine-3'-phosphate
  modified_base 6: mod_base = OTHER; note = 2'-O-methylcytidine-3'-phosphate
  modified_base 7: mod_base = OTHER; note = 2'-O-methylcytidine-3'-phosphate
  modified_base 8: mod_base = OTHER; note = 2'-O-methyluridine-3'-phosphate
  modified_base 9: mod_base = OTHER; note = 2'-fluoroguanosine-3'-phosphate
  modified_base 10: mod_base = OTHER; note = 2'-fluorouridine-3'-phosphate
  modified_base 11: mod_base = OTHER; note = 2'-fluoroguanosine-3'-phosphate
  modified_base 12: mod_base = OTHER; note = 2'-O-methyladenosine-3'-phosphate
  modified_base 13: mod_base = OTHER; note = 2'-O-methylguanosine-3'-phosphate
  modified_base 14: mod_base = OTHER; note = 2'-O-methylcytidine-3'-phosphate
  modified_base 15: mod_base = OTHER; note = 2'-O-methyladenosine-3'-phosphate
  modified_base 16: mod_base = OTHER; note = 2'-O-methylguanosine-3'-phosphate
  modified_base 17: mod_base = OTHER; note = 2'-O-methylcytidine-3'-phosphate
  modified_base 18: mod_base = OTHER; note = 2'-O-methyluridine-3'-phosphate
  modified_base 19: mod_base = OTHER; note = 2'-O-methylguanosine-3'-phosphate
  modified_base 20: mod_base = OTHER; note = 2'-O-methylguanosine-3'-phosphate
  modified_base 21: mod_base = OTHER; note = 2'-O-methyluridine-3'-phosphate N-[tris(GalNAc-alkyl)-amidodecanoyl)]-4-hydroxyprolinol (Hyp-(GalNAc-alkyl)3)
gagtacctgtgagcagctggt

SEQ ID NO: 2045 - RNA, 21 nt, synthetic construct
  source 1..21: mol_type = other RNA
  modified_base 1: mod_base = OTHER; note = 2'-O-methyladenosine-3'-phosphorothioate
  modified_base 2: mod_base = OTHER; note = 2'-O-methylguanosine-3'-phosphorothioate
  modified_base 3: mod_base = OTHER; note = 2'-O-methyluridine-3'-phosphate
  modified_base 4: mod_base = OTHER; note = 2'-O-methyladenosine-3'-phosphate
  modified_base 5: mod_base = OTHER; note = 2'-O-methylcytidine-3'-phosphate
  modified_base 6: mod_base = OTHER; note = 2'-O-methylcytidine-3'-phosphate
  modified_base 7: mod_base = OTHER; note = 2'-O-methyluridine-3'-phosphate
  modified_base 8: mod_base = OTHER; note = 2'-O-methylguanosine-3'-phosphate
  modified_base 9: mod_base = OTHER; note = 2'-fluorouridine-3'-phosphate
  modified_base 10: mod_base = OTHER; note = 2'-fluoroguanosine-3'-phosphate
  modified_base 11: mod_base = OTHER; note = 2'-fluoroadenosine-3'-phosphate
  modified_base 12: mod_base = OTHER; note = 2'-O-methylguanosine-3'-phosphate
  modified_base 13: mod_base = OTHER; note = 2'-O-methylcytidine-3'-phosphate
  modified_base 14: mod_base = OTHER; note = 2'-O-methyladenosine-3'-phosphate
  modified_base 15: mod_base = OTHER; note = 2'-O-methylguanosine-3'-phosphate
  modified_base 16: mod_base = OTHER; note = 2'-O-methylcytidine-3'-phosphate
  modified_base 17: mod_base = OTHER; note = 2'-O-methyluridine-3'-phosphate
  modified_base 18: mod_base = OTHER; note = 2'-O-methylguanosine-3'-phosphate
  modified_base 19: mod_base = OTHER; note = 2'-O-methylguanosine-3'-phosphate
  modified_base 20: mod_base = OTHER; note = 2'-O-methylcytidine-3'-phosphate
  modified_base 21: mod_base = OTHER; note = 2'-O-methyluridine-3'-phosphate N-[tris(GalNAc-alkyl)-amidodecanoyl)]-4-hydroxyprolinol (Hyp-(GalNAc-alkyl)3)
agtacctgtgagcagctggct

SEQ ID NO: 2046 - RNA, 21 nt, synthetic construct
  source 1..21: mol_type = other RNA
  modified_base 1: mod_base = OTHER; note = 2'-O-methylguanosine-3'-phosphorothioate
  modified_base 2: mod_base = OTHER; note = 2'-O-methyluridine-3'-phosphorothioate
  modified_base 3: mod_base = OTHER; note = 2'-O-methyladenosine-3'-phosphate
  modified_base 4: mod_base = OTHER; note = 2'-O-methylcytidine-3'-phosphate
  modified_base 5: mod_base = OTHER; note = 2'-O-methylcytidine-3'-phosphate
  modified_base 6: mod_base = OTHER; note = 2'-O-methyluridine-3'-phosphate
  modified_base 7: mod_base = OTHER; note = 2'-O-methylguanosine-3'-phosphate
  modified_base 8: mod_base = OTHER; note = 2'-O-methyluridine-3'-phosphate
  modified_base 9: mod_base = OTHER; note = 2'-fluoroguanosine-3'-phosphate
  modified_base 10: mod_base = OTHER; note = 2'-fluoroadenosine-3'-phosphate
  modified_base 11: mod_base = OTHER; note = 2'-fluoroguanosine-3'-phosphate
  modified_base 12: mod_base = OTHER; note = 2'-O-methylcytidine-3'-phosphate
  modified_base 13: mod_base = OTHER; note = 2'-O-methyladenosine-3'-phosphate
  modified_base 14: mod_base = OTHER; note = 2'-O-methylguanosine-3'-phosphate
  modified_base 15: mod_base = OTHER; note = 2'-O-methylcytidine-3'-phosphate
  modified_base 16: mod_base = OTHER; note = 2'-O-methyluridine-3'-phosphate
  modified_base 17: mod_base = OTHER; note = 2'-O-methylguanosine-3'-phosphate
  modified_base 18: mod_base = OTHER; note = 2'-O-methylguanosine-3'-phosphate
  modified_base 19: mod_base = OTHER; note = 2'-O-methylcytidine-3'-phosphate
  modified_base 20: mod_base = OTHER; note = 2'-O-methyladenosine-3'-phosphate
  modified_base 21: mod_base = OTHER; note = 2'-O-methyluridine-3'-phosphate N-[tris(GalNAc-alkyl)-amidodecanoyl)]-4-hydroxyprolinol (Hyp-(GalNAc-alkyl)3)
gtacctgtgagcagctggcat

SEQ ID NO: 2047 - RNA, 21 nt, synthetic construct
  source 1..21: mol_type = other RNA
  modified_base 1: mod_base = OTHER; note = 2'-O-methyluridine-3'-phosphorothioate
  modified_base 2: mod_base = OTHER; note = 2'-O-methyladenosine-3'-phosphorothioate
  modified_base 3: mod_base = OTHER; note = 2'-O-methylcytidine-3'-phosphate
  modified_base 4: mod_base = OTHER; note = 2'-O-methylcytidine-3'-phosphate
  modified_base 5: mod_base = OTHER; note = 2'-O-methyluridine-3'-phosphate
  modified_base 6: mod_base = OTHER; note = 2'-O-methylguanosine-3'-phosphate
  modified_base 7: mod_base = OTHER; note = 2'-O-methyluridine-3'-phosphate
  modified_base 8: mod_base = OTHER; note = 2'-O-methylguanosine-3'-phosphate
  modified_base 9: mod_base = OTHER; note = 2'-fluoroadenosine-3'-phosphate
  modified_base 10: mod_base = OTHER; note = 2'-fluoroguanosine-3'-phosphate
  modified_base 11: mod_base = OTHER; note = 2'-fluorocytidine-3'-phosphate
  modified_base 12: mod_base = OTHER; note = 2'-O-methyladenosine-3'-phosphate
  modified_base 13: mod_base = OTHER; note = 2'-O-methylguanosine-3'-phosphate
  modified_base 14: mod_base = OTHER; note = 2'-O-methylcytidine-3'-phosphate
  modified_base 15: mod_base = OTHER; note = 2'-O-methyluridine-3'-phosphate
  modified_base 16: mod_base = OTHER; note = 2'-O-methylguanosine-3'-phosphate
  modified_base 17: mod_base = OTHER; note = 2'-O-methylguanosine-3'-phosphate
  modified_base 18: mod_base = OTHER; note = 2'-O-methylcytidine-3'-phosphate
  modified_base 19: mod_base = OTHER; note = 2'-O-methyladenosine-3'-phosphate
  modified_base 20: mod_base = OTHER; note = 2'-O-methyladenosine-3'-phosphate
  modified_base 21: mod_base = OTHER; note = 2'-O-methyluridine-3'-phosphate N-[tris(GalNAc-alkyl)-amidodecanoyl)]-4-hydroxyprolinol (Hyp-(GalNAc-alkyl)3)
tacctgtgagcagctggcaat

SEQ ID NO: 2048 - RNA, 21 nt, synthetic construct
  source 1..21: mol_type = other RNA
  modified_base 1: mod_base = OTHER; note = 2'-O-methyladenosine-3'-phosphorothioate
  modified_base 2: mod_base = OTHER; note = 2'-O-methyladenosine-3'-phosphorothioate
  modified_base 3: mod_base = OTHER; note = 2'-O-methyluridine-3'-phosphate
  modified_base 4: mod_base = OTHER; note = 2'-O-methylguanosine-3'-phosphate
  modified_base 5: mod_base = OTHER; note = 2'-O-methylguanosine-3'-phosphate
  modified_base 6: mod_base = OTHER; note = 2'-O-methyluridine-3'-phosphate
  modified_base 7: mod_base = OTHER; note = 2'-O-methylcytidine-3'-phosphate
  modified_base 8: mod_base = OTHER; note = 2'-O-methylguanosine-3'-phosphate
  modified_base 9: mod_base = OTHER; note = 2'-fluoroguanosine-3'-phosphate
  modified_base 10: mod_base = OTHER; note = 2'-fluoroguanosine-3'-phosphate
  modified_base 11: mod_base = OTHER; note = 2'-fluoroadenosine-3'-phosphate
  modified_base 12: mod_base = OTHER; note = 2'-O-methyluridine-3'-phosphate
  modified_base 13: mod_base = OTHER; note = 2'-O-methylguanosine-3'-phosphate
  modified_base 14: mod_base = OTHER; note = 2'-O-methylcytidine-3'-phosphate
  modified_base 15: mod_base = OTHER; note = 2'-O-methyluridine-3'-phosphate
  modified_base 16: mod_base = OTHER; note = 2'-O-methylguanosine-3'-phosphate
  modified_base 17: mod_base = OTHER; note = 2'-O-methylguanosine-3'-phosphate
  modified_base 18: mod_base = OTHER; note = 2'-O-methylcytidine-3'-phosphate
  modified_base 19: mod_base = OTHER; note = 2'-O-methylcytidine-3'-phosphate
  modified_base 20: mod_base = OTHER; note = 2'-O-methyladenosine-3'-phosphate
  modified_base 21: mod_base = OTHER; note = 2'-O-methyluridine-3'-phosphate N-[tris(GalNAc-alkyl)-amidodecanoyl)]-4-hydroxyprolinol (Hyp-(GalNAc-alkyl)3)
aatggtcgggatgctggccat

SEQ ID NO: 2049 - RNA, 21 nt, synthetic construct
  source 1..21: mol_type = other RNA
  modified_base 1: mod_base = OTHER; note = 2'-O-methyladenosine-3'-phosphorothioate
  modified_base 2: mod_base = OTHER; note = 2'-O-methyluridine-3'-phosphorothioate
  modified_base 3: mod_base = OTHER; note = 2'-O-methylguanosine-3'-phosphate
  modified_base 4: mod_base = OTHER; note = 2'-O-methylguanosine-3'-phosphate
  modified_base 5: mod_base = OTHER; note = 2'-O-methyluridine-3'-phosphate
  modified_base 6: mod_base = OTHER; note = 2'-O-methylcytidine-3'-phosphate
  modified_base 7: mod_base = OTHER; note = 2'-O-methylguanosine-3'-phosphate
  modified_base 8: mod_base = OTHER; note = 2'-O-methylguanosine-3'-phosphate
  modified_base 9: mod_base = OTHER; note = 2'-fluoroguanosine-3'-phosphate
  modified_base 10: mod_base = OTHER; note = 2'-fluoroadenosine-3'-phosphate
  modified_base 11: mod_base = OTHER; note = 2'-fluorouridine-3'-phosphate
  modified_base 12: mod_base = OTHER; note = 2'-O-methylguanosine-3'-phosphate
  modified_base 13: mod_base = OTHER; note = 2'-O-methylcytidine-3'-phosphate
  modified_base 14: mod_base = OTHER; note = 2'-O-methyluridine-3'-phosphate
  modified_base 15: mod_base = OTHER; note = 2'-O-methylguanosine-3'-phosphate
  modified_base 16: mod_base = OTHER; note = 2'-O-methylguanosine-3'-phosphate
  modified_base 17: mod_base = OTHER; note = 2'-O-methylcytidine-3'-phosphate
  modified_base 18: mod_base = OTHER; note = 2'-O-methylcytidine-3'-phosphate
  modified_base 19: mod_base = OTHER; note = 2'-O-methyladenosine-3'-phosphate
  modified_base 20: mod_base = OTHER; note = 2'-O-methyladenosine-3'-phosphate
  modified_base 21: mod_base = OTHER; note = 2'-O-methyluridine-3'-phosphate N-[tris(GalNAc-alkyl)-amidodecanoyl)]-4-hydroxyprolinol (Hyp-(GalNAc-alkyl)3)
atggtcgggatgctggccaat

SEQ ID NO: 2050 - RNA, 21 nt, synthetic construct
  source 1..21: mol_type = other RNA
  modified_base 1: mod_base = OTHER; note = 2'-O-methyluridine-3'-phosphorothioate
  modified_base 2: mod_base = OTHER; note = 2'-O-methylguanosine-3'-phosphorothioate
  modified_base 3: mod_base = OTHER; note = 2'-O-methylguanosine-3'-phosphate
  modified_base 4: mod_base = OTHER; note = 2'-O-methyluridine-3'-phosphate
  modified_base 5: mod_base = OTHER; note = 2'-O-methylcytidine-3'-phosphate
  modified_base 6: mod_base = OTHER; note = 2'-O-methylguanosine-3'-phosphate
  modified_base 7: mod_base = OTHER; note = 2'-O-methylguanosine-3'-phosphate
  modified_base 8: mod_base = OTHER; note = 2'-O-methylguanosine-3'-phosphate
  modified_base 9: mod_base = OTHER; note = 2'-fluoroadenosine-3'-phosphate
  modified_base 10: mod_base = OTHER; note = 2'-fluorouridine-3'-phosphate
  modified_base 11: mod_base = OTHER; note = 2'-fluoroguanosine-3'-phosphate
  modified_base 12: mod_base = OTHER; note = 2'-O-methylcytidine-3'-phosphate
  modified_base 13: mod_base = OTHER; note = 2'-O-methyluridine-3'-phosphate
  modified_base 14: mod_base = OTHER; note = 2'-O-methylguanosine-3'-phosphate
  modified_base 15: mod_base = OTHER; note = 2'-O-methylguanosine-3'-phosphate
  modified_base 16: mod_base = OTHER; note = 2'-O-methylcytidine-3'-phosphate
  modified_base 17: mod_base = OTHER; note = 2'-O-methylcytidine-3'-phosphate
  modified_base 18: mod_base = OTHER; note = 2'-O-methyladenosine-3'-phosphate
  modified_base 19: mod_base = OTHER; note = 2'-O-methyladenosine-3'-phosphate
  modified_base 20: mod_base = OTHER; note = 2'-O-methylcytidine-3'-phosphate
  modified_base 21: mod_base = OTHER; note = 2'-O-methyluridine-3'-phosphate N-[tris(GalNAc-alkyl)-amidodecanoyl)]-4-hydroxyprolinol (Hyp-(GalNAc-alkyl)3)
tggtcgggatgctggccaact

SEQ ID NO: 2051 - RNA, 21 nt, synthetic construct
  source 1..21: mol_type = other RNA
  modified_base 1: mod_base = OTHER; note = 2'-O-methylguanosine-3'-phosphorothioate
  modified_base 2: mod_base = OTHER; note = 2'-O-methylguanosine-3'-phosphorothioate
  modified_base 3: mod_base = OTHER; note = 2'-O-methyluridine-3'-phosphate
  modified_base 4: mod_base = OTHER; note = 2'-O-methylcytidine-3'-phosphate
  modified_base 5: mod_base = OTHER; note = 2'-O-methylguanosine-3'-phosphate
  modified_base 6: mod_base = OTHER; note = 2'-O-methylguanosine-3'-phosphate
  modified_base 7: mod_base = OTHER; note = 2'-O-methylguanosine-3'-phosphate
  modified_base 8: mod_base = OTHER; note = 2'-O-methyladenosine-3'-phosphate
  modified_base 9: mod_base = OTHER; note = 2'-fluorouridine-3'-phosphate
  modified_base 10: mod_base = OTHER; note = 2'-fluoroguanosine-3'-phosphate
  modified_base 11: mod_base = OTHER; note = 2'-fluorocytidine-3'-phosphate
  modified_base 12: mod_base = OTHER; note = 2'-O-methyluridine-3'-phosphate
  modified_base 13: mod_base = OTHER; note = 2'-O-methylguanosine-3'-phosphate
  modified_base 14: mod_base = OTHER; note = 2'-O-methylguanosine-3'-phosphate
  modified_base 15: mod_base = OTHER; note = 2'-O-methylcytidine-3'-phosphate
  modified_base 16: mod_base = OTHER; note = 2'-O-methylcytidine-3'-phosphate
  modified_base 17: mod_base = OTHER; note = 2'-O-methyladenosine-3'-phosphate
  modified_base 18: mod_base = OTHER; note = 2'-O-methyladenosine-3'-phosphate
  modified_base 19: mod_base = OTHER; note = 2'-O-methylcytidine-3'-phosphate
  modified_base 20: mod_base = OTHER; note = 2'-O-methyluridine-3'-phosphate
  modified_base 21: mod_base = OTHER; note = 2'-O-methyluridine-3'-phosphate N-[tris(GalNAc-alkyl)-amidodecanoyl)]-4-hydroxyprolinol (Hyp-(GalNAc-alkyl)3)
ggtcgggatgctggccaactt

SEQ ID NO: 2052 - RNA, 21 nt, synthetic construct
  source 1..21: mol_type = other RNA
  modified_base 1: mod_base = OTHER; note = 2'-O-methylguanosine-3'-phosphorothioate
  modified_base 2: mod_base = OTHER; note = 2'-O-methyluridine-3'-phosphorothioate
  modified_base 3: mod_base = OTHER; note = 2'-O-methylcytidine-3'-phosphate
  modified_base 4: mod_base = OTHER; note = 2'-O-methylguanosine-3'-phosphate
  modified_base 5: mod_base = OTHER; note = 2'-O-methylguanosine-3'-phosphate
  modified_base 6: mod_base = OTHER; note = 2'-O-methylguanosine-3'-phosphate
  modified_base 7: mod_base = OTHER; note = 2'-O-methyladenosine-3'-phosphate
  modified_base 8: mod_base = OTHER; note = 2'-O-methyluridine-3'-phosphate
  modified_base 9: mod_base = OTHER; note = 2'-fluoroguanosine-3'-phosphate
  modified_base 10: mod_base = OTHER; note = 2'-fluorocytidine-3'-phosphate
  modified_base 11: mod_base = OTHER; note = 2'-fluorouridine-3'-phosphate
  modified_base 12: mod_base = OTHER; note = 2'-O-methylguanosine-3'-phosphate
  modified_base 13: mod_base = OTHER; note = 2'-O-methylguanosine-3'-phosphate
  modified_base 14: mod_base = OTHER; note = 2'-O-methylcytidine-3'-phosphate
  modified_base 15: mod_base = OTHER; note = 2'-O-methylcytidine-3'-phosphate
  modified_base 16: mod_base = OTHER; note = 2'-O-methyladenosine-3'-phosphate
  modified_base 17: mod_base = OTHER; note = 2'-O-methyladenosine-3'-phosphate
  modified_base 18: mod_base = OTHER; note = 2'-O-methylcytidine-3'-phosphate
  modified_base 19: mod_base = OTHER; note = 2'-O-methyluridine-3'-phosphate
  modified_base 20: mod_base = OTHER; note = 2'-O-methyluridine-3'-phosphate
  modified_base 21: mod_base = OTHER; note = 2'-O-methyluridine-3'-phosphate N-[tris(GalNAc-alkyl)-amidodecanoyl)]-4-hydroxyprolinol (Hyp-(GalNAc-alkyl)3)
gtcgggatgctggccaacttt

SEQ ID NO: 2053 - RNA, 21 nt, synthetic construct
  source 1..21: mol_type = other RNA
  modified_base 1: mod_base = OTHER; note = 2'-O-methyluridine-3'-phosphorothioate
  modified_base 2: mod_base = OTHER; note = 2'-O-methylcytidine-3'-phosphorothioate
  modified_base 3: mod_base = OTHER; note = 2'-O-methylguanosine-3'-phosphate
  modified_base 4: mod_base = OTHER; note = 2'-O-methylguanosine-3'-phosphate
  modified_base 5: mod_base = OTHER; note = 2'-O-methylguanosine-3'-phosphate
  modified_base 6: mod_base = OTHER; note = 2'-O-methyladenosine-3'-phosphate
  modified_base 7: mod_base = OTHER; note = 2'-O-methyluridine-3'-phosphate
  modified_base 8: mod_base = OTHER; note = 2'-O-methylguanosine-3'-phosphate
  modified_base 9: mod_base = OTHER; note = 2'-fluorocytidine-3'-phosphate
  modified_base 10: mod_base = OTHER; note = 2'-fluorouridine-3'-phosphate
  modified_base 11: mod_base = OTHER; note = 2'-fluoroguanosine-3'-phosphate
  modified_base 12: mod_base = OTHER; note = 2'-O-methylguanosine-3'-phosphate
  modified_base 13: mod_base = OTHER; note = 2'-O-methylcytidine-3'-phosphate
  modified_base 14: mod_base = OTHER; note = 2'-O-methylcytidine-3'-phosphate
  modified_base 15: mod_base = OTHER; note = 2'-O-methyladenosine-3'-phosphate
  modified_base 16: mod_base = OTHER; note = 2'-O-methyladenosine-3'-phosphate
  modified_base 17: mod_base = OTHER; note = 2'-O-methylcytidine-3'-phosphate
  modified_base 18: mod_base = OTHER; note = 2'-O-methyluridine-3'-phosphate
  modified_base 19: mod_base = OTHER; note = 2'-O-methyluridine-3'-phosphate
  modified_base 20: mod_base = OTHER; note = 2'-O-methylcytidine-3'-phosphate
  modified_base 21: mod_base = OTHER; note = 2'-O-methyluridine-3'-phosphate N-[tris(GalNAc-alkyl)-amidodecanoyl)]-4-hydroxyprolinol (Hyp-(GalNAc-alkyl)3)
tcgggatgctggccaacttct

SEQ ID NO: 2054 - RNA, 21 nt, synthetic construct
  source 1..21: mol_type = other RNA
  modified_base 1: mod_base = OTHER; note = 2'-O-methylcytidine-3'-phosphorothioate
  modified_base 2: mod_base = OTHER; note = 2'-O-methylguanosine-3'-phosphorothioate
  modified_base 3: mod_base = OTHER; note = 2'-O-methylguanosine-3'-phosphate
  modified_base 4: mod_base = OTHER; note = 2'-O-methylguanosine-3'-phosphate
  modified_base 5: mod_base = OTHER; note = 2'-O-methyladenosine-3'-phosphate
  modified_base 6: mod_base = OTHER; note = 2'-O-methyluridine-3'-phosphate
  modified_base 7: mod_base = OTHER; note = 2'-O-methylguanosine-3'-phosphate
  modified_base 8: mod_base = OTHER; note = 2'-O-methylcytidine-3'-phosphate
  modified_base 9: mod_base = OTHER; note = 2'-fluorouridine-3'-phosphate
  modified_base 10: mod_base = OTHER; note = 2'-fluoroguanosine-3'-phosphate
  modified_base 11: mod_base = OTHER; note = 2'-fluoroguanosine-3'-phosphate
  modified_base 12: mod_base = OTHER; note = 2'-O-methylcytidine-3'-phosphate
  modified_base 13: mod_base = OTHER; note = 2'-O-methylcytidine-3'-phosphate
  modified_base 14: mod_base = OTHER; note = 2'-O-methyladenosine-3'-phosphate
  modified_base 15: mod_base = OTHER; note = 2'-O-methyladenosine-3'-phosphate
  modified_base 16: mod_base = OTHER; note = 2'-O-methylcytidine-3'-phosphate
  modified_base 17: mod_base = OTHER; note = 2'-O-methyluridine-3'-phosphate
  modified_base 18: mod_base = OTHER; note = 2'-O-methyluridine-3'-phosphate
  modified_base 19: mod_base = OTHER; note = 2'-O-methylcytidine-3'-phosphate
  modified_base 20: mod_base = OTHER; note = 2'-O-methyluridine-3'-phosphate
  modified_base 21: mod_base = OTHER; note = 2'-O-methyluridine-3'-phosphate N-[tris(GalNAc-alkyl)-amidodecanoyl)]-4-hydroxyprolinol (Hyp-(GalNAc-alkyl)3)
cgggatgctggccaacttctt

SEQ ID NO: 2055 - RNA, 21 nt, synthetic construct
  source 1..21: mol_type = other RNA
  modified_base 1: mod_base = OTHER; note = 2'-O-methylguanosine-3'-phosphorothioate
  modified_base 2: mod_base = OTHER; note = 2'-O-methylguanosine-3'-phosphorothioate
  modified_base 3: mod_base = OTHER; note = 2'-O-methylguanosine-3'-phosphate
  modified_base 4: mod_base = OTHER; note = 2'-O-methyladenosine-3'-phosphate
  modified_base 5: mod_base = OTHER; note = 2'-O-methyluridine-3'-phosphate
  modified_base 6: mod_base = OTHER; note = 2'-O-methylguanosine-3'-phosphate
  modified_base 7: mod_base = OTHER; note = 2'-O-methylcytidine-3'-phosphate
  modified_base 8: mod_base = OTHER; note = 2'-O-methyluridine-3'-phosphate
  modified_base 9: mod_base = OTHER; note = 2'-fluoroguanosine-3'-phosphate
  modified_base 10: mod_base = OTHER; note = 2'-fluoroguanosine-3'-phosphate
  modified_base 11: mod_base = OTHER; note = 2'-fluorocytidine-3'-phosphate
  modified_base 12: mod_base = OTHER; note = 2'-O-methylcytidine-3'-phosphate
  modified_base 13: mod_base = OTHER; note = 2'-O-methyladenosine-3'-phosphate
  modified_base 14: mod_base = OTHER; note = 2'-O-methyladenosine-3'-phosphate
  modified_base 15: mod_base = OTHER; note = 2'-O-methylcytidine-3'-phosphate
  modified_base 16: mod_base = OTHER; note = 2'-O-methyluridine-3'-phosphate
  modified_base 17: mod_base = OTHER; note = 2'-O-methyluridine-3'-phosphate
  modified_base 18: mod_base = OTHER; note = 2'-O-methylcytidine-3'-phosphate
  modified_base 19: mod_base = OTHER; note = 2'-O-methyluridine-3'-phosphate
  modified_base 20: mod_base = OTHER; note = 2'-O-methyluridine-3'-phosphate
  modified_base 21: mod_base = OTHER; note = 2'-O-methyluridine-3'-phosphate N-[tris(GalNAc-alkyl)-amidodecanoyl)]-4-hydroxyprolinol (Hyp-(GalNAc-alkyl)3)
gggatgctggccaacttcttt

SEQ ID NO: 2056 - RNA, 21 nt, synthetic construct
  source 1..21: mol_type = other RNA
  modified_base 1: mod_base = OTHER; note = 2'-O-methylguanosine-3'-phosphorothioate
  modified_base 2: mod_base = OTHER; note = 2'-O-methylguanosine-3'-phosphorothioate
  modified_base 3: mod_base = OTHER; note = 2'-O-methyladenosine-3'-phosphate
  modified_base 4: mod_base = OTHER; note = 2'-O-methyluridine-3'-phosphate
  modified_base 5: mod_base = OTHER; note = 2'-O-methylguanosine-3'-phosphate
  modified_base 6: mod_base = OTHER; note = 2'-O-methylcytidine-3'-phosphate
  modified_base 7: mod_base = OTHER; note = 2'-O-methyluridine-3'-phosphate
  modified_base 8: mod_base = OTHER; note = 2'-O-methylguanosine-3'-phosphate
  modified_base 9: mod_base = OTHER; note = 2'-fluoroguanosine-3'-phosphate
  modified_base 10: mod_base = OTHER; note = 2'-fluorocytidine-3'-phosphate
  modified_base 11: mod_base = OTHER; note = 2'-fluorocytidine-3'-phosphate
  modified_base 12: mod_base = OTHER; note = 2'-O-methyladenosine-3'-phosphate
  modified_base 13: mod_base = OTHER; note = 2'-O-methyladenosine-3'-phosphate
  modified_base 14: mod_base = OTHER; note = 2'-O-methylcytidine-3'-phosphate
  modified_base 15: mod_base = OTHER; note = 2'-O-methyluridine-3'-phosphate
  modified_base 16: mod_base = OTHER; note = 2'-O-methyluridine-3'-phosphate
  modified_base 17: mod_base = OTHER; note = 2'-O-methylcytidine-3'-phosphate
  modified_base 18: mod_base = OTHER; note = 2'-O-methyluridine-3'-phosphate
  modified_base 19: mod_base = OTHER; note = 2'-O-methyluridine-3'-phosphate
  modified_base 20: mod_base = OTHER; note = 2'-O-methylguanosine-3'-phosphate
  modified_base 21: mod_base = OTHER; note = 2'-O-methyluridine-3'-phosphate N-[tris(GalNAc-alkyl)-amidodecanoyl)]-4-hydroxyprolinol (Hyp-(GalNAc-alkyl)3)
ggatgctggccaacttcttgt

SEQ ID NO: 2057 - RNA, 21 nt, synthetic construct
  source 1..21: mol_type = other RNA
  modified_base 1: mod_base = OTHER; note = 2'-O-methylguanosine-3'-phosphorothioate
  modified_base 2: mod_base = OTHER; note = 2'-O-methyladenosine-3'-phosphorothioate
  modified_base 3: mod_base = OTHER; note = 2'-O-methyluridine-3'-phosphate
  modified_base 4: mod_base = OTHER; note = 2'-O-methylguanosine-3'-phosphate
  modified_base 5: mod_base = OTHER; note = 2'-O-methylcytidine-3'-phosphate
  modified_base 6: mod_base = OTHER; note = 2'-O-methyluridine-3'-phosphate
  modified_base 7: mod_base = OTHER; note = 2'-O-methylguanosine-3'-phosphate
  modified_base 8: mod_base = OTHER; note = 2'-O-methylguanosine-3'-phosphate
  modified_base 9: mod_base = OTHER; note = 2'-fluorocytidine-3'-phosphate
  modified_base 10: mod_base = OTHER; note = 2'-fluorocytidine-3'-phosphate
  modified_base 11: mod_base = OTHER; note = 2'-fluoroadenosine-3'-phosphate
  modified_base 12: mod_base = OTHER; note = 2'-O-methyladenosine-3'-phosphate
  modified_base 13: mod_base = OTHER; note = 2'-O-methylcytidine-3'-phosphate
  modified_base 14: mod_base = OTHER; note = 2'-O-methyluridine-3'-phosphate
  modified_base 15: mod_base = OTHER; note = 2'-O-methyluridine-3'-phosphate
  modified_base 16: mod_base = OTHER; note = 2'-O-methylcytidine-3'-phosphate
  modified_base 17: mod_base = OTHER; note = 2'-O-methyluridine-3'-phosphate
  modified_base 18: mod_base = OTHER; note = 2'-O-methyluridine-3'-phosphate
  modified_base 19: mod_base = OTHER; note = 2'-O-methylguanosine-3'-phosphate
  modified_base 20: mod_base = OTHER; note = 2'-O-methylguanosine-3'-phosphate
  modified_base 21: mod_base = OTHER; note = 2'-O-methyluridine-3'-phosphate N-[tris(GalNAc-alkyl)-amidodecanoyl)]-4-hydroxyprolinol (Hyp-(GalNAc-alkyl)3)
gatgctggccaacttcttggt

SEQ ID NO: 2058 - RNA, 21 nt, synthetic construct
  source 1..21: mol_type = other RNA
  modified_base 1: mod_base = OTHER; note = 2'-O-methylguanosine-3'-phosphorothioate
  modified_base 2: mod_base = OTHER; note = 2'-O-methylcytidine-3'-phosphorothioate
  modified_base 3: mod_base = OTHER; note = 2'-O-methyluridine-3'-phosphate
  modified_base 4: mod_base = OTHER; note = 2'-O-methylguanosine-3'-phosphate
  modified_base 5: mod_base = OTHER; note = 2'-O-methylguanosine-3'-phosphate
  modified_base 6: mod_base = OTHER; note = 2'-O-methylcytidine-3'-phosphate
  modified_base 7: mod_base = OTHER; note = 2'-O-methylcytidine-3'-phosphate
  modified_base 8: mod_base = OTHER; note = 2'-O-methyladenosine-3'-phosphate
  modified_base 9: mod_base = OTHER; note = 2'-fluoroadenosine-3'-phosphate
  modified_base 10: mod_base = OTHER; note = 2'-fluorocytidine-3'-phosphate
  modified_base 11: mod_base = OTHER; note = 2'-fluorouridine-3'-phosphate
  modified_base 12: mod_base = OTHER; note = 2'-O-methyluridine-3'-phosphate
  modified_base 13: mod_base = OTHER; note = 2'-O-methylcytidine-3'-phosphate
  modified_base 14: mod_base = OTHER; note = 2'-O-methyluridine-3'-phosphate
  modified_base 15: mod_base = OTHER; note = 2'-O-methyluridine-3'-phosphate
  modified_base 16: mod_base = OTHER; note = 2'-O-methylguanosine-3'-phosphate
  modified_base 17: mod_base = OTHER; note = 2'-O-methylguanosine-3'-phosphate
  modified_base 18: mod_base = OTHER; note = 2'-O-methylguanosine-3'-phosphate
  modified_base 19: mod_base = OTHER; note = 2'-O-methylcytidine-3'-phosphate
  modified_base 20: mod_base = OTHER; note = 2'-O-methyluridine-3'-phosphate
  modified_base 21: mod_base = OTHER; note = 2'-O-methyluridine-3'-phosphate N-[tris(GalNAc-alkyl)-amidodecanoyl)]-4-hydroxyprolinol (Hyp-(GalNAc-alkyl)3)
gctggccaacttcttgggctt

SEQ ID NO: 2059 - RNA, 21 nt, synthetic construct
  source 1..21: mol_type = other RNA
  modified_base 1: mod_base = OTHER; note = 2'-O-methylcytidine-3'-phosphorothioate
  modified_base 2: mod_base = OTHER; note = 2'-O-methyluridine-3'-phosphorothioate
  modified_base 3: mod_base = OTHER; note = 2'-O-methylguanosine-3'-phosphate
  modified_base 4: mod_base = OTHER; note = 2'-O-methylguanosine-3'-phosphate
  modified_base 5: mod_base = OTHER; note = 2'-O-methylcytidine-3'-phosphate
  modified_base 6: mod_base = OTHER; note = 2'-O-methylcytidine-3'-phosphate
  modified_base 7: mod_base = OTHER; note = 2'-O-methyladenosine-3'-phosphate
  modified_base 8: mod_base = OTHER; note = 2'-O-methyladenosine-3'-phosphate
  modified_base 9: mod_base = OTHER; note = 2'-fluorocytidine-3'-phosphate
  modified_base 10: mod_base = OTHER; note = 2'-fluorouridine-3'-phosphate
  modified_base 11: mod_base = OTHER; note = 2'-fluorouridine-3'-phosphate
  modified_base 12: mod_base = OTHER; note = 2'-O-methylcytidine-3'-phosphate
  modified_base 13: mod_base = OTHER; note = 2'-O-methyluridine-3'-phosphate
  modified_base 14: mod_base = OTHER; note = 2'-O-methyluridine-3'-phosphate
  modified_base 15: mod_base = OTHER; note = 2'-O-methylguanosine-3'-phosphate
  modified_base 16: mod_base = OTHER; note = 2'-O-methylguanosine-3'-phosphate
  modified_base 17: mod_base = OTHER; note = 2'-O-methylguanosine-3'-phosphate
  modified_base 18: mod_base = OTHER; note = 2'-O-methylcytidine-3'-phosphate
  modified_base 19: mod_base = OTHER; note = 2'-O-methyluridine-3'-phosphate
  modified_base 20: mod_base = OTHER; note = 2'-O-methyluridine-3'-phosphate
  modified_base 21: mod_base = OTHER; note = 2'-O-methyluridine-3'-phosphate N-[tris(GalNAc-alkyl)-amidodecanoyl)]-4-hydroxyprolinol (Hyp-(GalNAc-alkyl)3)
ctggccaacttcttgggcttt

SEQ ID NO: 2060 - RNA, 21 nt, synthetic construct
  source 1..21: mol_type = other RNA
  modified_base 1: mod_base = OTHER; note = 2'-O-methylguanosine-3'-phosphorothioate
  modified_base 2: mod_base = OTHER; note = 2'-O-methylcytidine-3'-phosphorothioate
  modified_base 3: mod_base = OTHER; note = 2'-O-methylcytidine-3'-phosphate
  modified_base 4: mod_base = OTHER; note = 2'-O-methyladenosine-3'-phosphate
  modified_base 5: mod_base = OTHER; note = 2'-O-methyladenosine-3'-phosphate
  modified_base 6: mod_base = OTHER; note = 2'-O-methylcytidine-3'-phosphate
  modified_base 7: mod_base = OTHER; note = 2'-O-methyluridine-3'-phosphate
  modified_base 8: mod_base = OTHER; note = 2'-O-methyluridine-3'-phosphate
  modified_base 9: mod_base = OTHER; note = 2'-fluorocytidine-3'-phosphate
  modified_base 10: mod_base = OTHER; note = 2'-fluorouridine-3'-phosphate
  modified_base 11: mod_base = OTHER; note = 2'-fluorouridine-3'-phosphate
  modified_base 12: mod_base = OTHER; note = 2'-O-methylguanosine-3'-phosphate
  modified_base 13: mod_base = OTHER; note = 2'-O-methylguanosine-3'-phosphate
  modified_base 14: mod_base = OTHER; note = 2'-O-methylguanosine-3'-phosphate
  modified_base 15: mod_base = OTHER; note = 2'-O-methylcytidine-3'-phosphate
  modified_base 16: mod_base = OTHER; note = 2'-O-methyluridine-3'-phosphate
  modified_base 17: mod_base = OTHER; note = 2'-O-methyluridine-3'-phosphate
  modified_base 18: mod_base = OTHER; note = 2'-O-methylcytidine-3'-phosphate
  modified_base 19: mod_base = OTHER; note = 2'-O-methylcytidine-3'-phosphate
  modified_base 20: mod_base = OTHER; note = 2'-O-methylguanosine-3'-phosphate
  modified_base 21: mod_base = OTHER; note = 2'-O-methyluridine-3'-phosphate N-[tris(GalNAc-alkyl)-amidodecanoyl)]-4-hydroxyprolinol (Hyp-(GalNAc-alkyl)3)
gccaacttcttgggcttccgt

SEQ ID NO: 2061 - RNA, 21 nt, synthetic construct
  source 1..21: mol_type = other RNA
  modified_base 1: mod_base = OTHER; note = 2'-O-methylcytidine-3'-phosphorothioate
  modified_base 2: mod_base = OTHER; note = 2'-O-methylcytidine-3'-phosphorothioate
  modified_base 3: mod_base = OTHER; note = 2'-O-methyladenosine-3'-phosphate
  modified_base 4: mod_base = OTHER; note = 2'-O-methyladenosine-3'-phosphate
  modified_base 5: mod_base = OTHER; note = 2'-O-methylcytidine-3'-phosphate
  modified_base 6: mod_base = OTHER; note = 2'-O-methyluridine-3'-phosphate
  modified_base 7: mod_base = OTHER; note = 2'-O-methyluridine-3'-phosphate
  modified_base 8: mod_base = OTHER; note = 2'-O-methylcytidine-3'-phosphate
  modified_base 9: mod_base = OTHER; note = 2'-fluorouridine-3'-phosphate
  modified_base 10: mod_base = OTHER; note = 2'-fluorouridine-3'-phosphate
  modified_base 11: mod_base = OTHER; note = 2'-fluoroguanosine-3'-phosphate
  modified_base 12: mod_base = OTHER; note = 2'-O-methylguanosine-3'-phosphate
  modified_base 13: mod_base = OTHER; note = 2'-O-methylguanosine-3'-phosphate
  modified_base 14: mod_base = OTHER; note = 2'-O-methylcytidine-3'-phosphate
  modified_base 15: mod_base = OTHER; note = 2'-O-methyluridine-3'-phosphate
  modified_base 16: mod_base = OTHER; note = 2'-O-methyluridine-3'-phosphate
  modified_base 17: mod_base = OTHER; note = 2'-O-methylcytidine-3'-phosphate
  modified_base 18: mod_base = OTHER; note = 2'-O-methylcytidine-3'-phosphate
  modified_base 19: mod_base = OTHER; note = 2'-O-methylguanosine-3'-phosphate
  modified_base 20: mod_base = OTHER; note = 2'-O-methyluridine-3'-phosphate
  modified_base 21: mod_base = OTHER; note = 2'-O-methyluridine-3'-phosphate N-[tris(GalNAc-alkyl)-amidodecanoyl)]-4-hydroxyprolinol (Hyp-(GalNAc-alkyl)3)
ccaacttcttgggcttccgtt

SEQ ID NO: 2062 - RNA, 21 nt, synthetic construct
  source 1..21: mol_type = other RNA
  modified_base 1: mod_base = OTHER; note = 2'-O-methylcytidine-3'-phosphorothioate
  modified_base 2: mod_base = OTHER; note = 2'-O-methyladenosine-3'-phosphorothioate
  modified_base 3: mod_base = OTHER; note = 2'-O-methyladenosine-3'-phosphate
  modified_base 4: mod_base = OTHER; note = 2'-O-methylcytidine-3'-phosphate
  modified_base 5: mod_base = OTHER; note = 2'-O-methyluridine-3'-phosphate
  modified_base 6: mod_base = OTHER; note = 2'-O-methyluridine-3'-phosphate
  modified_base 7: mod_base = OTHER; note = 2'-O-methylcytidine-3'-phosphate
  modified_base 8: mod_base = OTHER; note = 2'-O-methyluridine-3'-phosphate
  modified_base 9: mod_base = OTHER; note = 2'-fluorouridine-3'-phosphate
  modified_base 10: mod_base = OTHER; note = 2'-fluoroguanosine-3'-phosphate
  modified_base 11: mod_base = OTHER; note = 2'-fluoroguanosine-3'-phosphate
  modified_base 12: mod_base = OTHER; note = 2'-O-methylguanosine-3'-phosphate
  modified_base 13: mod_base = OTHER; note = 2'-O-methylcytidine-3'-phosphate
  modified_base 14: mod_base = OTHER; note = 2'-O-methyluridine-3'-phosphate
  modified_base 15: mod_base = OTHER; note = 2'-O-methyluridine-3'-phosphate
  modified_base 16: mod_base = OTHER; note = 2'-O-methylcytidine-3'-phosphate
  modified_base 17: mod_base = OTHER; note = 2'-O-methylcytidine-3'-phosphate
  modified_base 18: mod_base = OTHER; note = 2'-O-methylguanosine-3'-phosphate
  modified_base 19: mod_base = OTHER; note = 2'-O-methyluridine-3'-phosphate
  modified_base 20: mod_base = OTHER; note = 2'-O-methyladenosine-3'-phosphate
  modified_base 21: mod_base = OTHER; note = 2'-O-methyluridine-3'-phosphate N-[tris(GalNAc-alkyl)-amidodecanoyl)]-4-hydroxyprolinol (Hyp-(GalNAc-alkyl)3)
caacttcttgggcttccgtat

SEQ ID NO: 2063 - RNA, 21 nt, synthetic construct
  source 1..21: mol_type = other RNA
  modified_base 1: mod_base = OTHER; note = 2'-O-methyladenosine-3'-phosphorothioate
  modified_base 2: mod_base = OTHER; note = 2'-O-methyladenosine-3'-phosphorothioate
  modified_base 3: mod_base = OTHER; note = 2'-O-methylcytidine-3'-phosphate
  modified_base 4: mod_base = OTHER; note = 2'-O-methyluridine-3'-phosphate
  modified_base 5: mod_base = OTHER; note = 2'-O-methyluridine-3'-phosphate
  modified_base 6: mod_base = OTHER; note = 2'-O-methylcytidine-3'-phosphate
  modified_base 7: mod_base = OTHER; note = 2'-O-methyluridine-3'-phosphate
  modified_base 8: mod_base = OTHER; note = 2'-O-methyluridine-3'-phosphate
  modified_base 9: mod_base = OTHER; note = 2'-fluoroguanosine-3'-phosphate
  modified_base 10: mod_base = OTHER; note = 2'-fluoroguanosine-3'-phosphate
  modified_base 11: mod_base = OTHER; note = 2'-fluoroguanosine-3'-phosphate
  modified_base 12: mod_base = OTHER; note = 2'-O-methylcytidine-3'-phosphate
  modified_base 13: mod_base = OTHER; note = 2'-O-methyluridine-3'-phosphate
  modified_base 14: mod_base = OTHER; note = 2'-O-methyluridine-3'-phosphate
  modified_base 15: mod_base = OTHER; note = 2'-O-methylcytidine-3'-phosphate
  modified_base 16: mod_base = OTHER; note = 2'-O-methylcytidine-3'-phosphate
  modified_base 17: mod_base = OTHER; note = 2'-O-methylguanosine-3'-phosphate
  modified_base 18: mod_base = OTHER; note = 2'-O-methyluridine-3'-phosphate
  modified_base 19: mod_base = OTHER; note = 2'-O-methyladenosine-3'-phosphate
  modified_base 20: mod_base = OTHER; note = 2'-O-methyluridine-3'-phosphate
  modified_base 21: mod_base = OTHER; note = 2'-O-methyluridine-3'-phosphate N-[tris(GalNAc-alkyl)-amidodecanoyl)]-4-hydroxyprolinol (Hyp-(GalNAc-alkyl)3)
aacttcttgggcttccgtatt

SEQ ID NO: 2064 - RNA, 21 nt, synthetic construct
  source 1..21: mol_type = other RNA
  modified_base 1: mod_base = OTHER; note = 2'-O-methyladenosine-3'-phosphorothioate
  modified_base 2: mod_base = OTHER; note = 2'-O-methylcytidine-3'-phosphorothioate
  modified_base 3: mod_base = OTHER; note = 2'-O-methyluridine-3'-phosphate
  modified_base 4: mod_base = OTHER; note = 2'-O-methyluridine-3'-phosphate
  modified_base 5: mod_base = OTHER; note = 2'-O-methylcytidine-3'-phosphate
  modified_base 6: mod_base = OTHER; note = 2'-O-methyluridine-3'-phosphate
  modified_base 7: mod_base = OTHER; note = 2'-O-methyluridine-3'-phosphate
  modified_base 8: mod_base = OTHER; note = 2'-O-methylguanosine-3'-phosphate
  modified_base 9: mod_base = OTHER; note = 2'-fluoroguanosine-3'-phosphate
  modified_base 10: mod_base = OTHER; note = 2'-fluoroguanosine-3'-phosphate
  modified_base 11: mod_base = OTHER; note = 2'-fluorocytidine-3'-phosphate
  modified_base 12: mod_base = OTHER; note = 2'-O-methyluridine-3'-phosphate
  modified_base 13: mod_base = OTHER; note = 2'-O-methyluridine-3'-phosphate
  modified_base 14: mod_base = OTHER; note = 2'-O-methylcytidine-3'-phosphate
  modified_base 15: mod_base = OTHER; note = 2'-O-methylcytidine-3'-phosphate
  modified_base 16: mod_base = OTHER; note = 2'-O-methylguanosine-3'-phosphate
  modified_base 17: mod_base = OTHER; note = 2'-O-methyluridine-3'-phosphate
  modified_base 18: mod_base = OTHER; note = 2'-O-methyladenosine-3'-phosphate
  modified_base 19: mod_base = OTHER; note = 2'-O-methyluridine-3'-phosphate
  modified_base 20: mod_base = OTHER; note = 2'-O-methyladenosine-3'-phosphate
  modified_base 21: mod_base = OTHER; note = 2'-O-methyluridine-3'-phosphate N-[tris(GalNAc-alkyl)-amidodecanoyl)]-4-hydroxyprolinol (Hyp-(GalNAc-alkyl)3)
acttcttgggcttccgtatat

SEQ ID NO: 2065 - RNA, 21 nt, synthetic construct
  source 1..21: mol_type = other RNA
  modified_base 1: mod_base = OTHER; note = 2'-O-methylcytidine-3'-phosphorothioate
  modified_base 2: mod_base = OTHER; note = 2'-O-methyluridine-3'-phosphorothioate
  modified_base 3: mod_base = OTHER; note = 2'-O-methyluridine-3'-phosphate
  modified_base 4: mod_base = OTHER; note = 2'-O-methylcytidine-3'-phosphate
  modified_base 5: mod_base = OTHER; note = 2'-O-methyluridine-3'-phosphate
  modified_base 6: mod_base = OTHER; note = 2'-O-methyluridine-3'-phosphate
  modified_base 7: mod_base = OTHER; note = 2'-O-methylguanosine-3'-phosphate
  modified_base 8: mod_base = OTHER; note = 2'-O-methylguanosine-3'-phosphate
  modified_base 9: mod_base = OTHER; note = 2'-fluoroguanosine-3'-phosphate
  modified_base 10: mod_base = OTHER; note = 2'-fluorocytidine-3'-phosphate
  modified_base 11: mod_base = OTHER; note = 2'-fluorouridine-3'-phosphate
  modified_base 12: mod_base = OTHER; note = 2'-O-methyluridine-3'-phosphate
  modified_base 13: mod_base = OTHER; note = 2'-O-methylcytidine-3'-phosphate
  modified_base 14: mod_base = OTHER; note = 2'-O-methylcytidine-3'-phosphate
  modified_base 15: mod_base = OTHER; note = 2'-O-methylguanosine-3'-phosphate
  modified_base 16: mod_base = OTHER; note = 2'-O-methyluridine-3'-phosphate
  modified_base 17: mod_base = OTHER; note = 2'-O-methyladenosine-3'-phosphate
  modified_base 18: mod_base = OTHER; note = 2'-O-methyluridine-3'-phosphate
  modified_base 19: mod_base = OTHER; note = 2'-O-methyladenosine-3'-phosphate
  modified_base 20: mod_base = OTHER; note = 2'-O-methyluridine-3'-phosphate
  modified_base 21: mod_base = OTHER; note = 2'-O-methyluridine-3'-phosphate N-[tris(GalNAc-alkyl)-amidodecanoyl)]-4-hydroxyprolinol (Hyp-(GalNAc-alkyl)3)
cttcttgggcttccgtatatt

SEQ ID NO: 2066 - RNA, 21 nt, synthetic construct
  source 1..21: mol_type = other RNA
  modified_base 1: mod_base = OTHER; note = 2'-O-methyluridine-3'-phosphorothioate
  modified_base 2: mod_base = OTHER; note = 2'-O-methyluridine-3'-phosphorothioate
  modified_base 3: mod_base = OTHER; note = 2'-O-methylcytidine-3'-phosphate
  modified_base 4: mod_base = OTHER; note = 2'-O-methyluridine-3'-phosphate
  modified_base 5: mod_base = OTHER; note = 2'-O-methyluridine-3'-phosphate
  modified_base 6: mod_base = OTHER; note = 2'-O-methylguanosine-3'-phosphate
  modified_base 7: mod_base = OTHER; note = 2'-O-methylguanosine-3'-phosphate
  modified_base 8: mod_base = OTHER; note = 2'-O-methylguanosine-3'-phosphate
  modified_base 9: mod_base = OTHER; note = 2'-fluorocytidine-3'-phosphate
  modified_base 10: mod_base = OTHER; note = 2'-fluorouridine-3'-phosphate
  modified_base 11: mod_base = OTHER; note = 2'-fluorouridine-3'-phosphate
  modified_base 12: mod_base = OTHER; note = 2'-O-methylcytidine-3'-phosphate
  modified_base 13: mod_base = OTHER; note = 2'-O-methylcytidine-3'-phosphate
  modified_base 14: mod_base = OTHER; note = 2'-O-methylguanosine-3'-phosphate
  modified_base 15: mod_base = OTHER; note = 2'-O-methyluridine-3'-phosphate
  modified_base 16: mod_base = OTHER; note = 2'-O-methyladenosine-3'-phosphate
  modified_base 17: mod_base = OTHER; note = 2'-O-methyluridine-3'-phosphate
  modified_base 18: mod_base = OTHER; note = 2'-O-methyladenosine-3'-phosphate
  modified_base 19: mod_base = OTHER; note = 2'-O-methyluridine-3'-phosphate
  modified_base 20: mod_base = OTHER; note = 2'-O-methyladenosine-3'-phosphate
  modified_base 21: mod_base = OTHER; note = 2'-O-methyluridine-3'-phosphate N-[tris(GalNAc-alkyl)-amidodecanoyl)]-4-hydroxyprolinol (Hyp-(GalNAc-alkyl)3)
ttcttgggcttccgtatatat

SEQ ID NO: 2067 - RNA, 21 nt, synthetic construct
  source 1..21: mol_type = other RNA
  modified_base 1: mod_base = OTHER; note = 2'-O-methyluridine-3'-phosphorothioate
  modified_base 2: mod_base = OTHER; note = 2'-O-methylcytidine-3'-phosphorothioate
  modified_base 3: mod_base = OTHER; note = 2'-O-methyluridine-3'-phosphate
  modified_base 4: mod_base = OTHER; note = 2'-O-methyluridine-3'-phosphate
  modified_base 5: mod_base = OTHER; note = 2'-O-methylguanosine-3'-phosphate
  modified_base 6: mod_base = OTHER; note = 2'-O-methylguanosine-3'-phosphate
  modified_base 7: mod_base = OTHER; note = 2'-O-methylguanosine-3'-phosphate
  modified_base 8: mod_base = OTHER; note = 2'-O-methylcytidine-3'-phosphate
  modified_base 9: mod_base = OTHER; note = 2'-fluorouridine-3'-phosphate
  modified_base 10: mod_base = OTHER; note = 2'-fluorouridine-3'-phosphate
  modified_base 11: mod_base = OTHER; note = 2'-fluorocytidine-3'-phosphate
  modified_base 12: mod_base = OTHER; note = 2'-O-methylcytidine-3'-phosphate
  modified_base 13: mod_base = OTHER; note = 2'-O-methylguanosine-3'-phosphate
  modified_base 14: mod_base = OTHER; note = 2'-O-methyluridine-3'-phosphate
  modified_base 15: mod_base = OTHER; note = 2'-O-methyladenosine-3'-phosphate
  modified_base 16: mod_base = OTHER; note = 2'-O-methyluridine-3'-phosphate
  modified_base 17: mod_base = OTHER; note = 2'-O-methyladenosine-3'-phosphate
  modified_base 18: mod_base = OTHER; note = 2'-O-methyluridine-3'-phosphate
  modified_base 19: mod_base = OTHER; note = 2'-O-methyladenosine-3'-phosphate
  modified_base 20: mod_base = OTHER; note = 2'-O-methyluridine-3'-phosphate
  modified_base 21: mod_base = OTHER; note = 2'-O-methyluridine-3'-phosphate N-[tris(GalNAc-alkyl)-amidodecanoyl)]-4-hydroxyprolinol (Hyp-(GalNAc-alkyl)3)
tcttgggcttccgtatatatt

SEQ ID NO: 2068 - RNA, 21 nt, synthetic construct
  source 1..21: mol_type = other RNA
  modified_base 1: mod_base = OTHER; note = 2'-O-methylcytidine-3'-phosphorothioate
  modified_base 2: mod_base = OTHER; note = 2'-O-methyluridine-3'-phosphorothioate
  modified_base 3: mod_base = OTHER; note = 2'-O-methyluridine-3'-phosphate
  modified_base 4: mod_base = OTHER; note = 2'-O-methylguanosine-3'-phosphate
  modified_base 5: mod_base = OTHER; note = 2'-O-methylguanosine-3'-phosphate
  modified_base 6: mod_base = OTHER; note = 2'-O-methylguanosine-3'-phosphate
  modified_base 7: mod_base = OTHER; note = 2'-O-methylcytidine-3'-phosphate
  modified_base 8: mod_base = OTHER; note = 2'-O-methyluridine-3'-phosphate
  modified_base 9: mod_base = OTHER; note = 2'-fluorouridine-3'-phosphate
  modified_base 10: mod_base = OTHER; note = 2'-fluorocytidine-3'-phosphate
  modified_base 11: mod_base = OTHER; note = 2'-fluorocytidine-3'-phosphate
  modified_base 12: mod_base = OTHER; note = 2'-O-methylguanosine-3'-phosphate
  modified_base 13: mod_base = OTHER; note = 2'-O-methyluridine-3'-phosphate
  modified_base 14: mod_base = OTHER; note = 2'-O-methyladenosine-3'-phosphate
  modified_base 15: mod_base = OTHER; note = 2'-O-methyluridine-3'-phosphate
  modified_base 16: mod_base = OTHER; note = 2'-O-methyladenosine-3'-phosphate
  modified_base 17: mod_base = OTHER; note = 2'-O-methyluridine-3'-phosphate
  modified_base 18: mod_base = OTHER; note = 2'-O-methyladenosine-3'-phosphate
  modified_base 19: mod_base = OTHER; note = 2'-O-methyluridine-3'-phosphate
  modified_base 20: mod_base = OTHER; note = 2'-O-methylguanosine-3'-phosphate
  modified_base 21: mod_base = OTHER; note = 2'-O-methyluridine-3'-phosphate N-[tris(GalNAc-alkyl)-amidodecanoyl)]-4-hydroxyprolinol (Hyp-(GalNAc-alkyl)3)
cttgggcttccgtatatatgt

SEQ ID NO: 2069 - RNA, 21 nt, synthetic construct
  source 1..21: mol_type = other RNA
  modified_base 1: mod_base = OTHER; note = 2'-O-methyluridine-3'-phosphorothioate
  modified_base 2: mod_base = OTHER; note = 2'-O-methyluridine-3'-phosphorothioate
  modified_base 3: mod_base = OTHER; note = 2'-O-methylguanosine-3'-phosphate
  modified_base 4: mod_base = OTHER; note = 2'-O-methylguanosine-3'-phosphate
  modified_base 5: mod_base = OTHER; note = 2'-O-methylguanosine-3'-phosphate
  modified_base 6: mod_base = OTHER; note = 2'-O-methylcytidine-3'-phosphate
  modified_base 7: mod_base = OTHER; note = 2'-O-methyluridine-3'-phosphate
  modified_base 8: mod_base = OTHER; note = 2'-O-methyluridine-3'-phosphate
  modified_base 9: mod_base = OTHER; note = 2'-fluorocytidine-3'-phosphate
  modified_base 10: mod_base = OTHER; note = 2'-fluorocytidine-3'-phosphate
  modified_base 11: mod_base = OTHER; note = 2'-fluoroguanosine-3'-phosphate
  modified_base 12: mod_base = OTHER; note = 2'-O-methyluridine-3'-phosphate
  modified_base 13: mod_base = OTHER; note = 2'-O-methyladenosine-3'-phosphate
  modified_base 14: mod_base = OTHER; note = 2'-O-methyluridine-3'-phosphate
  modified_base 15: mod_base = OTHER; note = 2'-O-methyladenosine-3'-phosphate
  modified_base 16: mod_base = OTHER; note = 2'-O-methyluridine-3'-phosphate
  modified_base 17: mod_base = OTHER; note = 2'-O-methyladenosine-3'-phosphate
  modified_base 18: mod_base = OTHER; note = 2'-O-methyluridine-3'-phosphate
  modified_base 19: mod_base = OTHER; note = 2'-O-methylguanosine-3'-phosphate
  modified_base 20: mod_base = OTHER; note = 2'-O-methylguanosine-3'-phosphate
  modified_base 21: mod_base = OTHER; note = 2'-O-methyluridine-3'-phosphate N-[tris(GalNAc-alkyl)-amidodecanoyl)]-4-hydroxyprolinol (Hyp-(GalNAc-alkyl)3)
ttgggcttccgtatatatggt

SEQ ID NO: 2070 - RNA, 21 nt, synthetic construct
  source 1..21: mol_type = other RNA
  modified_base 1: mod_base = OTHER; note = 2'-O-methyluridine-3'-phosphorothioate
  modified_base 2: mod_base = OTHER; note = 2'-O-methylguanosine-3'-phosphorothioate
  modified_base 3: mod_base = OTHER; note = 2'-O-methylguanosine-3'-phosphate
  modified_base 4: mod_base = OTHER; note = 2'-O-methylguanosine-3'-phosphate
  modified_base 5: mod_base = OTHER; note = 2'-O-methylcytidine-3'-phosphate
  modified_base 6: mod_base = OTHER; note = 2'-O-methyluridine-3'-phosphate
  modified_base 7: mod_base = OTHER; note = 2'-O-methyluridine-3'-phosphate
  modified_base 8: mod_base = OTHER; note = 2'-O-methylcytidine-3'-phosphate
  modified_base 9: mod_base = OTHER; note = 2'-fluorocytidine-3'-phosphate
  modified_base 10: mod_base = OTHER; note = 2'-fluoroguanosine-3'-phosphate
  modified_base 11: mod_base = OTHER; note = 2'-fluorouridine-3'-phosphate
  modified_base 12: mod_base = OTHER; note = 2'-O-methyladenosine-3'-phosphate
  modified_base 13: mod_base = OTHER; note = 2'-O-methyluridine-3'-phosphate
  modified_base 14: mod_base = OTHER; note = 2'-O-methyladenosine-3'-phosphate
  modified_base 15: mod_base = OTHER; note = 2'-O-methyluridine-3'-phosphate
  modified_base 16: mod_base = OTHER; note = 2'-O-methyladenosine-3'-phosphate
  modified_base 17: mod_base = OTHER; note = 2'-O-methyluridine-3'-phosphate
  modified_base 18: mod_base = OTHER; note = 2'-O-methylguanosine-3'-phosphate
  modified_base 19: mod_base = OTHER; note = 2'-O-methylguanosine-3'-phosphate
  modified_base 20: mod_base = OTHER; note = 2'-O-methylcytidine-3'-phosphate
  modified_base 21: mod_base = OTHER; note = 2'-O-methyluridine-3'-phosphate N-[tris(GalNAc-alkyl)-amidodecanoyl)]-4-hydroxyprolinol (Hyp-(GalNAc-alkyl)3)
tgggcttccgtatatatggct

SEQ ID NO: 2071 - RNA, 21 nt, synthetic construct
  source 1..21: mol_type = other RNA
  modified_base 1: mod_base = OTHER; note = 2'-O-methylguanosine-3'-phosphorothioate
  modified_base 2: mod_base = OTHER; note = 2'-O-methylguanosine-3'-phosphorothioate
  modified_base 3: mod_base = OTHER; note = 2'-O-methylguanosine-3'-phosphate
  modified_base 4: mod_base = OTHER; note = 2'-O-methylcytidine-3'-phosphate
  modified_base 5: mod_base = OTHER; note = 2'-O-methyluridine-3'-phosphate
  modified_base 6: mod_base = OTHER; note = 2'-O-methyluridine-3'-phosphate
  modified_base 7: mod_base = OTHER; note = 2'-O-methylcytidine-3'-phosphate
  modified_base 8: mod_base = OTHER; note = 2'-O-methylcytidine-3'-phosphate
  modified_base 9: mod_base = OTHER; note = 2'-fluoroguanosine-3'-phosphate
  modified_base 10: mod_base = OTHER; note = 2'-fluorouridine-3'-phosphate
  modified_base 11: mod_base = OTHER; note = 2'-fluoroadenosine-3'-phosphate
  modified_base 12: mod_base = OTHER; note = 2'-O-methyluridine-3'-phosphate
  modified_base 13: mod_base = OTHER; note = 2'-O-methyladenosine-3'-phosphate
  modified_base 14: mod_base = OTHER; note = 2'-O-methyluridine-3'-phosphate
  modified_base 15: mod_base = OTHER; note = 2'-O-methyladenosine-3'-phosphate
  modified_base 16: mod_base = OTHER; note = 2'-O-methyluridine-3'-phosphate
  modified_base 17: mod_base = OTHER; note = 2'-O-methylguanosine-3'-phosphate
  modified_base 18: mod_base = OTHER; note = 2'-O-methylguanosine-3'-phosphate
  modified_base 19: mod_base = OTHER; note = 2'-O-methylcytidine-3'-phosphate
  modified_base 20: mod_base = OTHER; note = 2'-O-methyladenosine-3'-phosphate
  modified_base 21: mod_base = OTHER; note = 2'-O-methyluridine-3'-phosphate N-[tris(GalNAc-alkyl)-amidodecanoyl)]-4-hydroxyprolinol (Hyp-(GalNAc-alkyl)3)
gggcttccgtatatatggcat

SEQ ID NO: 2072 - RNA, 21 nt, synthetic construct
  source 1..21: mol_type = other RNA
  modified_base 1: mod_base = OTHER; note = 2'-O-methylguanosine-3'-phosphorothioate
  modified_base 2: mod_base = OTHER; note = 2'-O-methylguanosine-3'-phosphorothioate
  modified_base 3: mod_base = OTHER; note = 2'-O-methylcytidine-3'-phosphate
  modified_base 4: mod_base = OTHER; note = 2'-O-methyluridine-3'-phosphate
  modified_base 5: mod_base = OTHER; note = 2'-O-methyluridine-3'-phosphate
  modified_base 6: mod_base = OTHER; note = 2'-O-methylcytidine-3'-phosphate
  modified_base 7: mod_base = OTHER; note = 2'-O-methylcytidine-3'-phosphate
  modified_base 8: mod_base = OTHER; note = 2'-O-methylguanosine-3'-phosphate
  modified_base 9: mod_base = OTHER; note = 2'-fluorouridine-3'-phosphate
  modified_base 10: mod_base = OTHER; note = 2'-fluoroadenosine-3'-phosphate
  modified_base 11: mod_base = OTHER; note = 2'-fluorouridine-3'-phosphate
  modified_base 12: mod_base = OTHER; note = 2'-O-methyladenosine-3'-phosphate
  modified_base 13: mod_base = OTHER; note = 2'-O-methyluridine-3'-phosphate
  modified_base 14: mod_base = OTHER; note = 2'-O-methyladenosine-3'-phosphate
  modified_base 15: mod_base = OTHER; note = 2'-O-methyluridine-3'-phosphate
  modified_base 16: mod_base = OTHER; note = 2'-O-methylguanosine-3'-phosphate
  modified_base 17: mod_base = OTHER; note = 2'-O-methylguanosine-3'-phosphate
  modified_base 18: mod_base = OTHER; note = 2'-O-methylcytidine-3'-phosphate
  modified_base 19: mod_base = OTHER; note = 2'-O-methyladenosine-3'-phosphate
  modified_base 20: mod_base = OTHER; note = 2'-O-methyluridine-3'-phosphate
  modified_base 21: mod_base = OTHER; note = 2'-O-methyluridine-3'-phosphate N-[tris(GalNAc-alkyl)-amidodecanoyl)]-4-hydroxyprolinol (Hyp-(GalNAc-alkyl)3)
ggcttccgtatatatggcatt

SEQ ID NO: 2073 - RNA, 21 nt, synthetic construct
  source 1..21: mol_type = other RNA
  modified_base 1: mod_base = OTHER; note = 2'-O-methylguanosine-3'-phosphorothioate
  modified_base 2: mod_base = OTHER; note = 2'-O-methylcytidine-3'-phosphorothioate
  modified_base 3: mod_base = OTHER; note = 2'-O-methyluridine-3'-phosphate
  modified_base 4: mod_base = OTHER; note = 2'-O-methyluridine-3'-phosphate
  modified_base 5: mod_base = OTHER; note = 2'-O-methylcytidine-3'-phosphate
  modified_base 6: mod_base = OTHER; note = 2'-O-methylcytidine-3'-phosphate
  modified_base 7: mod_base = OTHER; note = 2'-O-methylguanosine-3'-phosphate
  modified_base 8: mod_base = OTHER; note = 2'-O-methyluridine-3'-phosphate
  modified_base 9: mod_base = OTHER; note = 2'-fluoroadenosine-3'-phosphate
  modified_base 10: mod_base = OTHER; note = 2'-fluorouridine-3'-phosphate
  modified_base 11: mod_base = OTHER; note = 2'-fluoroadenosine-3'-phosphate
  modified_base 12: mod_base = OTHER; note = 2'-O-methyluridine-3'-phosphate
  modified_base 13: mod_base = OTHER; note = 2'-O-methyladenosine-3'-phosphate
  modified_base 14: mod_base = OTHER; note = 2'-O-methyluridine-3'-phosphate
  modified_base 15: mod_base = OTHER; note = 2'-O-methylguanosine-3'-phosphate
  modified_base 16: mod_base = OTHER; note = 2'-O-methylguanosine-3'-phosphate
  modified_base 17: mod_base = OTHER; note = 2'-O-methylcytidine-3'-phosphate
  modified_base 18: mod_base = OTHER; note = 2'-O-methyladenosine-3'-phosphate
  modified_base 19: mod_base = OTHER; note = 2'-O-methyluridine-3'-phosphate
  modified_base 20: mod_base = OTHER; note = 2'-O-methylguanosine-3'-phosphate
  modified_base 21: mod_base = OTHER; note = 2'-O-methyluridine-3'-phosphate N-[tris(GalNAc-alkyl)-amidodecanoyl)]-4-hydroxyprolinol (Hyp-(GalNAc-alkyl)3)
gcttccgtatatatggcatgt

SEQ ID NO: 2074 - RNA, 21 nt, synthetic construct
  source 1..21: mol_type = other RNA
  modified_base 1: mod_base = OTHER; note = 2'-O-methyluridine-3'-phosphorothioate
  modified_base 2: mod_base = OTHER; note = 2'-O-methyladenosine-3'-phosphorothioate
  modified_base 3: mod_base = OTHER; note = 2'-O-methyluridine-3'-phosphate
  modified_base 4: mod_base = OTHER; note = 2'-O-methyladenosine-3'-phosphate
  modified_base 5: mod_base = OTHER; note = 2'-O-methyluridine-3'-phosphate
  modified_base 6: mod_base = OTHER; note = 2'-O-methyladenosine-3'-phosphate
  modified_base 7: mod_base = OTHER; note = 2'-O-methyluridine-3'-phosphate
  modified_base 8: mod_base = OTHER; note = 2'-O-methylguanosine-3'-phosphate
  modified_base 9: mod_base = OTHER; note = 2'-fluoroguanosine-3'-phosphate
  modified_base 10: mod_base = OTHER; note = 2'-fluorocytidine-3'-phosphate
  modified_base 11: mod_base = OTHER; note = 2'-fluoroadenosine-3'-phosphate
  modified_base 12: mod_base = OTHER; note = 2'-O-methyluridine-3'-phosphate
  modified_base 13: mod_base = OTHER; note = 2'-O-methylguanosine-3'-phosphate
  modified_base 14: mod_base = OTHER; note = 2'-O-methylcytidine-3'-phosphate
  modified_base 15: mod_base = OTHER; note = 2'-O-methyladenosine-3'-phosphate
  modified_base 16: mod_base = OTHER; note = 2'-O-methylcytidine-3'-phosphate
  modified_base 17: mod_base = OTHER; note = 2'-O-methyladenosine-3'-phosphate
  modified_base 18: mod_base = OTHER; note = 2'-O-methylguanosine-3'-phosphate
  modified_base 19: mod_base = OTHER; note = 2'-O-methyluridine-3'-phosphate
  modified_base 20: mod_base = OTHER; note = 2'-O-methylguanosine-3'-phosphate
  modified_base 21: mod_base = OTHER; note = 2'-O-methyluridine-3'-phosphate N-[tris(GalNAc-alkyl)-amidodecanoyl)]-4-hydroxyprolinol (Hyp-(GalNAc-alkyl)3)
tatatatggcatgcacagtgt

SEQ ID NO: 2075 - RNA, 21 nt, synthetic construct
  source 1..21: mol_type = other RNA
  modified_base 1: mod_base = OTHER; note = 2'-O-methyladenosine-3'-phosphorothioate
  modified_base 2: mod_base = OTHER; note = 2'-O-methyluridine-3'-phosphorothioate
  modified_base 3: mod_base = OTHER; note = 2'-O-methyladenosine-3'-phosphate
  modified_base 4: mod_base = OTHER; note = 2'-O-methyluridine-3'-phosphate
  modified_base 5: mod_base = OTHER; note = 2'-O-methyladenosine-3'-phosphate
  modified_base 6: mod_base = OTHER; note = 2'-O-methyluridine-3'-phosphate
  modified_base 7: mod_base = OTHER; note = 2'-O-methylguanosine-3'-phosphate
  modified_base 8: mod_base = OTHER; note = 2'-O-methylguanosine-3'-phosphate
  modified_base 9: mod_base = OTHER; note = 2'-fluorocytidine-3'-phosphate
  modified_base 10: mod_base = OTHER; note = 2'-fluoroadenosine-3'-phosphate
  modified_base 11: mod_base = OTHER; note = 2'-fluorouridine-3'-phosphate
  modified_base 12: mod_base = OTHER; note = 2'-O-methylguanosine-3'-phosphate
  modified_base 13: mod_base = OTHER; note = 2'-O-methylcytidine-3'-phosphate
  modified_base 14: mod_base = OTHER; note = 2'-O-methyladenosine-3'-phosphate
  modified_base 15: mod_base = OTHER; note = 2'-O-methylcytidine-3'-phosphate
  modified_base 16: mod_base = OTHER; note = 2'-O-methyladenosine-3'-phosphate
  modified_base 17: mod_base = OTHER; note = 2'-O-methylguanosine-3'-phosphate
  modified_base 18: mod_base = OTHER; note = 2'-O-methyluridine-3'-phosphate
  modified_base 19: mod_base = OTHER; note = 2'-O-methylguanosine-3'-phosphate
  modified_base 20: mod_base = OTHER; note = 2'-O-methyladenosine-3'-phosphate
  modified_base 21: mod_base = OTHER; note = 2'-O-methyluridine-3'-phosphate N-[tris(GalNAc-alkyl)-amidodecanoyl)]-4-hydroxyprolinol (Hyp-(GalNAc-alkyl)3)
atatatggcatgcacagtgat

SEQ ID NO: 2076 - RNA, 21 nt, synthetic construct
  source 1..21: mol_type = other RNA
  modified_base 1: mod_base = OTHER; note = 2'-O-methyluridine-3'-phosphorothioate
  modified_base 2: mod_base = OTHER; note = 2'-O-methyladenosine-3'-phosphorothioate
  modified_base 3: mod_base = OTHER; note = 2'-O-methyluridine-3'-phosphate
  modified_base 4: mod_base = OTHER; note = 2'-O-methyladenosine-3'-phosphate
  modified_base 5: mod_base = OTHER; note = 2'-O-methyluridine-3'-phosphate
  modified_base 6: mod_base = OTHER; note = 2'-O-methylguanosine-3'-phosphate
  modified_base 7: mod_base = OTHER; note = 2'-O-methylguanosine-3'-phosphate
  modified_base 8: mod_base = OTHER; note = 2'-O-methylcytidine-3'-phosphate
  modified_base 9: mod_base = OTHER; note = 2'-fluoroadenosine-3'-phosphate
  modified_base 10: mod_base = OTHER; note = 2'-fluorouridine-3'-phosphate
  modified_base 11: mod_base = OTHER; note = 2'-fluoroguanosine-3'-phosphate
  modified_base 12: mod_base = OTHER; note = 2'-O-methylcytidine-3'-phosphate
  modified_base 13: mod_base = OTHER; note = 2'-O-methyladenosine-3'-phosphate
  modified_base 14: mod_base = OTHER; note = 2'-O-methylcytidine-3'-phosphate
  modified_base 15: mod_base = OTHER; note = 2'-O-methyladenosine-3'-phosphate
  modified_base 16: mod_base = OTHER; note = 2'-O-methylguanosine-3'-phosphate
  modified_base 17: mod_base = OTHER; note = 2'-O-methyluridine-3'-phosphate
  modified_base 18: mod_base = OTHER; note = 2'-O-methylguanosine-3'-phosphate
  modified_base 19: mod_base = OTHER; note = 2'-O-methyladenosine-3'-phosphate
  modified_base 20: mod_base = OTHER; note = 2'-O-methylguanosine-3'-phosphate
  modified_base 21: mod_base = OTHER; note = 2'-O-methyluridine-3'-phosphate N-[tris(GalNAc-alkyl)-amidodecanoyl)]-4-hydroxyprolinol (Hyp-(GalNAc-alkyl)3)
tatatggcatgcacagtgagt

SEQ ID NO: 2077 - RNA, 21 nt, synthetic construct
  source 1..21: mol_type = other RNA
  modified_base 1: mod_base = OTHER; note = 2'-O-methyladenosine-3'-phosphorothioate
  modified_base 2: mod_base = OTHER; note = 2'-O-methyluridine-3'-phosphorothioate
  modified_base 3: mod_base = OTHER; note = 2'-O-methyladenosine-3'-phosphate
  modified_base 4: mod_base = OTHER; note = 2'-O-methyluridine-3'-phosphate
  modified_base 5: mod_base = OTHER; note = 2'-O-methylguanosine-3'-phosphate
  modified_base 6: mod_base = OTHER; note = 2'-O-methylguanosine-3'-phosphate
  modified_base 7: mod_base = OTHER; note = 2'-O-methylcytidine-3'-phosphate
  modified_base 8: mod_base = OTHER; note = 2'-O-methyladenosine-3'-phosphate
  modified_base 9: mod_base = OTHER; note = 2'-fluorouridine-3'-phosphate
  modified_base 10: mod_base = OTHER; note = 2'-fluoroguanosine-3'-phosphate
  modified_base 11: mod_base = OTHER; note = 2'-fluorocytidine-3'-phosphate
  modified_base 12: mod_base = OTHER; note = 2'-O-methyladenosine-3'-phosphate
  modified_base 13: mod_base = OTHER; note = 2'-O-methylcytidine-3'-phosphate
  modified_base 14: mod_base = OTHER; note = 2'-O-methyladenosine-3'-phosphate
  modified_base 15: mod_base = OTHER; note = 2'-O-methylguanosine-3'-phosphate
  modified_base 16: mod_base = OTHER; note = 2'-O-methyluridine-3'-phosphate
  modified_base 17: mod_base = OTHER; note = 2'-O-methylguanosine-3'-phosphate
  modified_base 18: mod_base = OTHER; note = 2'-O-methyladenosine-3'-phosphate
  modified_base 19: mod_base = OTHER; note = 2'-O-methylguanosine-3'-phosphate
  modified_base 20: mod_base = OTHER; note = 2'-O-methylcytidine-3'-phosphate
  modified_base 21: mod_base = OTHER; note = 2'-O-methyluridine-3'-phosphate N-[tris(GalNAc-alkyl)-amidodecanoyl)]-4-hydroxyprolinol (Hyp-(GalNAc-alkyl)3)
atatggcatgcacagtgagct

SEQ ID NO: 2078 - RNA, 21 nt, synthetic construct
  source 1..21: mol_type = other RNA
  modified_base 1: mod_base = OTHER; note = 2'-O-methyluridine-3'-phosphorothioate
  modified_base 2: mod_base = OTHER; note = 2'-O-methyladenosine-3'-phosphorothioate
  modified_base 3: mod_base = OTHER; note = 2'-O-methyluridine-3'-phosphate
  modified_base 4: mod_base = OTHER; note = 2'-O-methylguanosine-3'-phosphate
  modified_base 5: mod_base = OTHER; note = 2'-O-methylguanosine-3'-phosphate
  modified_base 6: mod_base = OTHER; note = 2'-O-methylcytidine-3'-phosphate
  modified_base 7: mod_base = OTHER; note = 2'-O-methyladenosine-3'-phosphate
  modified_base 8: mod_base = OTHER; note = 2'-O-methyluridine-3'-phosphate
  modified_base 9: mod_base = OTHER; note = 2'-fluoroguanosine-3'-phosphate
  modified_base 10: mod_base = OTHER; note = 2'-fluorocytidine-3'-phosphate
  modified_base 11: mod_base = OTHER; note = 2'-fluoroadenosine-3'-phosphate
  modified_base 12: mod_base = OTHER; note = 2'-O-methylcytidine-3'-phosphate
  modified_base 13: mod_base = OTHER; note = 2'-O-methyladenosine-3'-phosphate
  modified_base 14: mod_base = OTHER; note = 2'-O-methylguanosine-3'-phosphate
  modified_base 15: mod_base = OTHER; note = 2'-O-methyluridine-3'-phosphate
  modified_base 16: mod_base = OTHER; note = 2'-O-methylguanosine-3'-phosphate
  modified_base 17: mod_base = OTHER; note = 2'-O-methyladenosine-3'-phosphate
  modified_base 18: mod_base = OTHER; note = 2'-O-methylguanosine-3'-phosphate
  modified_base 19: mod_base = OTHER; note = 2'-O-methylcytidine-3'-phosphate
  modified_base 20: mod_base = OTHER; note = 2'-O-methyluridine-3'-phosphate
  modified_base 21: mod_base = OTHER; note = 2'-O-methyluridine-3'-phosphate N-[tris(GalNAc-alkyl)-amidodecanoyl)]-4-hydroxyprolinol (Hyp-(GalNAc-alkyl)3)
tatggcatgcacagtgagctt

SEQ ID NO: 2079 - RNA, 21 nt, synthetic construct
  source 1..21: mol_type = other RNA
  modified_base 1: mod_base = OTHER; note = 2'-O-methyladenosine-3'-phosphorothioate
  modified_base 2: mod_base = OTHER; note = 2'-O-methyluridine-3'-phosphorothioate
  modified_base 3: mod_base = OTHER; note = 2'-O-methylguanosine-3'-phosphate
  modified_base 4: mod_base = OTHER; note = 2'-O-methylguanosine-3'-phosphate
  modified_base 5: mod_base = OTHER; note = 2'-O-methylcytidine-3'-phosphate
  modified_base 6: mod_base = OTHER; note = 2'-O-methyladenosine-3'-phosphate
  modified_base 7: mod_base = OTHER; note = 2'-O-methyluridine-3'-phosphate
  modified_base 8: mod_base = OTHER; note = 2'-O-methylguanosine-3'-phosphate
  modified_base 9: mod_base = OTHER; note = 2'-fluorocytidine-3'-phosphate
  modified_base 10: mod_base = OTHER; note = 2'-fluoroadenosine-3'-phosphate
  modified_base 11: mod_base = OTHER; note = 2'-fluorocytidine-3'-phosphate
  modified_base 12: mod_base = OTHER; note = 2'-O-methyladenosine-3'-phosphate
  modified_base 13: mod_base = OTHER; note = 2'-O-methylguanosine-3'-phosphate
  modified_base 14: mod_base = OTHER; note = 2'-O-methyluridine-3'-phosphate
  modified_base 15: mod_base = OTHER; note = 2'-O-methylguanosine-3'-phosphate
  modified_base 16: mod_base = OTHER; note = 2'-O-methyladenosine-3'-phosphate
  modified_base 17: mod_base = OTHER; note = 2'-O-methylguanosine-3'-phosphate
  modified_base 18: mod_base = OTHER; note = 2'-O-methylcytidine-3'-phosphate
  modified_base 19: mod_base = OTHER; note = 2'-O-methyluridine-3'-phosphate
  modified_base 20: mod_base = OTHER; note = 2'-O-methyladenosine-3'-phosphate
  modified_base 21: mod_base = OTHER; note = 2'-O-methyluridine-3'-phosphate N-[tris(GalNAc-alkyl)-amidodecanoyl)]-4-hydroxyprolinol (Hyp-(GalNAc-alkyl)3)
atggcatgcacagtgagctat

SEQ ID NO: 2080 - RNA, 21 nt, synthetic construct
  source 1..21: mol_type = other RNA
  modified_base 1: mod_base = OTHER; note = 2'-O-methyluridine-3'-phosphorothioate
  modified_base 2: mod_base = OTHER; note = 2'-O-methylguanosine-3'-phosphorothioate
  modified_base 3: mod_base = OTHER; note = 2'-O-methylguanosine-3'-phosphate
  modified_base 4: mod_base = OTHER; note = 2'-O-methylcytidine-3'-phosphate
  modified_base 5: mod_base = OTHER; note = 2'-O-methyladenosine-3'-phosphate
  modified_base 6: mod_base = OTHER; note = 2'-O-methyluridine-3'-phosphate
  modified_base 7: mod_base = OTHER; note = 2'-O-methylguanosine-3'-phosphate
  modified_base 8: mod_base = OTHER; note = 2'-O-methylcytidine-3'-phosphate
  modified_base 9: mod_base = OTHER; note = 2'-fluoroadenosine-3'-phosphate
  modified_base 10: mod_base = OTHER; note = 2'-fluorocytidine-3'-phosphate
  modified_base 11: mod_base = OTHER; note = 2'-fluoroadenosine-3'-phosphate
  modified_base 12: mod_base = OTHER; note = 2'-O-methylguanosine-3'-phosphate
  modified_base 13: mod_base = OTHER; note = 2'-O-methyluridine-3'-phosphate
  modified_base 14: mod_base = OTHER; note = 2'-O-methylguanosine-3'-phosphate
  modified_base 15: mod_base = OTHER; note = 2'-O-methyladenosine-3'-phosphate
  modified_base 16: mod_base = OTHER; note = 2'-O-methylguanosine-3'-phosphate
  modified_base 17: mod_base = OTHER; note = 2'-O-methylcytidine-3'-phosphate
  modified_base 18: mod_base = OTHER; note = 2'-O-methyluridine-3'-phosphate
  modified_base 19: mod_base = OTHER; note = 2'-O-methyladenosine-3'-phosphate
  modified_base 20: mod_base = OTHER; note = 2'-O-methyluridine-3'-phosphate
  modified_base 21: mod_base = OTHER; note = 2'-O-methyluridine-3'-phosphate N-[tris(GalNAc-alkyl)-amidodecanoyl)]-4-hydroxyprolinol (Hyp-(GalNAc-alkyl)3)
tggcatgcacagtgagctatt

SEQ ID NO: 2081 - RNA, 21 nt, synthetic construct
  source 1..21: mol_type = other RNA
  modified_base 1: mod_base = OTHER; note = 2'-O-methylguanosine-3'-phosphorothioate
  modified_base 2: mod_base = OTHER; note = 2'-O-methylguanosine-3'-phosphorothioate
  modified_base 3: mod_base = OTHER; note = 2'-O-methylcytidine-3'-phosphate
  modified_base 4: mod_base = OTHER; note = 2'-O-methyladenosine-3'-phosphate
  modified_base 5: mod_base = OTHER; note = 2'-O-methyluridine-3'-phosphate
  modified_base 6: mod_base = OTHER; note = 2'-O-methylguanosine-3'-phosphate
  modified_base 7: mod_base = OTHER; note = 2'-O-methylcytidine-3'-phosphate
  modified_base 8: mod_base = OTHER; note = 2'-O-methyladenosine-3'-phosphate
  modified_base 9: mod_base = OTHER; note = 2'-fluorocytidine-3'-phosphate
  modified_base 10: mod_base = OTHER; note = 2'-fluoroadenosine-3'-phosphate
  modified_base 11: mod_base = OTHER; note = 2'-fluoroguanosine-3'-phosphate
  modified_base 12: mod_base = OTHER; note = 2'-O-methyluridine-3'-phosphate
  modified_base 13: mod_base = OTHER; note = 2'-O-methylguanosine-3'-phosphate
  modified_base 14: mod_base = OTHER; note = 2'-O-methyladenosine-3'-phosphate
  modified_base 15: mod_base = OTHER; note = 2'-O-methylguanosine-3'-phosphate
  modified_base 16: mod_base = OTHER; note = 2'-O-methylcytidine-3'-phosphate
  modified_base 17: mod_base = OTHER; note = 2'-O-methyluridine-3'-phosphate
  modified_base 18: mod_base = OTHER; note = 2'-O-methyladenosine-3'-phosphate
  modified_base 19: mod_base = OTHER; note = 2'-O-methyluridine-3'-phosphate
  modified_base 20: mod_base = OTHER; note = 2'-O-methylguanosine-3'-phosphate
  modified_base 21: mod_base = OTHER; note = 2'-O-methyluridine-3'-phosphate N-[tris(GalNAc-alkyl)-amidodecanoyl)]-4-hydroxyprolinol (Hyp-(GalNAc-alkyl)3)
ggcatgcacagtgagctatgt

SEQ ID NO: 2082 - RNA, 21 nt, synthetic construct
  source 1..21: mol_type = other RNA
  modified_base 1: mod_base = OTHER; note = 2'-O-methylguanosine-3'-phosphorothioate
  modified_base 2: mod_base = OTHER; note = 2'-O-methylcytidine-3'-phosphorothioate
  modified_base 3: mod_base = OTHER; note = 2'-O-methyladenosine-3'-phosphate
  modified_base 4: mod_base = OTHER; note = 2'-O-methyluridine-3'-phosphate
  modified_base 5: mod_base = OTHER; note = 2'-O-methylguanosine-3'-phosphate
  modified_base 6: mod_base = OTHER; note = 2'-O-methylcytidine-3'-phosphate
  modified_base 7: mod_base = OTHER; note = 2'-O-methyladenosine-3'-phosphate
  modified_base 8: mod_base = OTHER; note = 2'-O-methylcytidine-3'-phosphate
  modified_base 9: mod_base = OTHER; note = 2'-fluoroadenosine-3'-phosphate
  modified_base 10: mod_base = OTHER; note = 2'-fluoroguanosine-3'-phosphate
  modified_base 11: mod_base = OTHER; note = 2'-fluorouridine-3'-phosphate
  modified_base 12: mod_base = OTHER; note = 2'-O-methylguanosine-3'-phosphate
  modified_base 13: mod_base = OTHER; note = 2'-O-methyladenosine-3'-phosphate
  modified_base 14: mod_base = OTHER; note = 2'-O-methylguanosine-3'-phosphate
  modified_base 15: mod_base = OTHER; note = 2'-O-methylcytidine-3'-phosphate
  modified_base 16: mod_base = OTHER; note = 2'-O-methyluridine-3'-phosphate
  modified_base 17: mod_base = OTHER; note = 2'-O-methyladenosine-3'-phosphate
  modified_base 18: mod_base = OTHER; note = 2'-O-methyluridine-3'-phosphate
  modified_base 19: mod_base = OTHER; note = 2'-O-methylguanosine-3'-phosphate
  modified_base 20: mod_base = OTHER; note = 2'-O-methylguanosine-3'-phosphate
  modified_base 21: mod_base = OTHER; note = 2'-O-methyluridine-3'-phosphate N-[tris(GalNAc-alkyl)-amidodecanoyl)]-4-hydroxyprolinol (Hyp-(GalNAc-alkyl)3)
gcatgcacagtgagctatggt

SEQ ID NO: 2083 - RNA, 21 nt, synthetic construct
  source 1..21: mol_type = other RNA
  modified_base 1: mod_base = OTHER; note = 2'-O-methyluridine-3'-phosphorothioate
  modified_base 2: mod_base = OTHER; note = 2'-O-methylguanosine-3'-phosphorothioate
  modified_base 3: mod_base = OTHER; note = 2'-O-methylguanosine-3'-phosphate
  modified_base 4: mod_base = OTHER; note = 2'-O-methylcytidine-3'-phosphate
  modified_base 5: mod_base = OTHER; note = 2'-O-methyladenosine-3'-phosphate
  modified_base 6: mod_base = OTHER; note = 2'-O-methylcytidine-3'-phosphate
  modified_base 7: mod_base = OTHER; note = 2'-O-methylcytidine-3'-phosphate
  modified_base 8: mod_base = OTHER; note = 2'-O-methylcytidine-3'-phosphate
  modified_base 9: mod_base = OTHER; note = 2'-fluorouridine-3'-phosphate
  modified_base 10: mod_base = OTHER; note = 2'-fluoroguanosine-3'-phosphate
  modified_base 11: mod_base = OTHER; note = 2'-fluoroguanosine-3'-phosphate
  modified_base 12: mod_base = OTHER; note = 2'-O-methylcytidine-3'-phosphate
  modified_base 13: mod_base = OTHER; note = 2'-O-methylcytidine-3'-phosphate
  modified_base 14: mod_base = OTHER; note = 2'-O-methyluridine-3'-phosphate
  modified_base 15: mod_base = OTHER; note = 2'-O-methylcytidine-3'-phosphate
  modified_base 16: mod_base = OTHER; note = 2'-O-methyluridine-3'-phosphate
  modified_base 17: mod_base = OTHER; note = 2'-O-methylcytidine-3'-phosphate
  modified_base 18: mod_base = OTHER; note = 2'-O-methyluridine-3'-phosphate
  modified_base 19: mod_base = OTHER; note = 2'-O-methylcytidine-3'-phosphate
  modified_base 20: mod_base = OTHER; note = 2'-O-methyluridine-3'-phosphate
  modified_base 21: mod_base = OTHER; note = 2'-O-methyluridine-3'-phosphate N-[tris(GalNAc-alkyl)-amidodecanoyl)]-4-hydroxyprolinol (Hyp-(GalNAc-alkyl)3)
tggcaccctggcctctctctt

SEQ ID NO: 2084 - RNA, 21 nt, synthetic construct
  source 1..21: mol_type = other RNA
  modified_base 1: mod_base = OTHER; note = 2'-O-methylguanosine-3'-phosphorothioate
  modified_base 2: mod_base = OTHER; note = 2'-O-methylguanosine-3'-phosphorothioate
  modified_base 3: mod_base = OTHER; note = 2'-O-methylcytidine-3'-phosphate
  modified_base 4: mod_base = OTHER; note = 2'-O-methyladenosine-3'-phosphate
  modified_base 5: mod_base = OTHER; note = 2'-O-methylcytidine-3'-phosphate
  modified_base 6: mod_base = OTHER; note = 2'-O-methylcytidine-3'-phosphate
  modified_base 7: mod_base = OTHER; note = 2'-O-methylcytidine-3'-phosphate
  modified_base 8: mod_base = OTHER; note = 2'-O-methyluridine-3'-phosphate
  modified_base 9: mod_base = OTHER; note = 2'-fluoroguanosine-3'-phosphate
  modified_base 10: mod_base = OTHER; note = 2'-fluoroguanosine-3'-phosphate
  modified_base 11: mod_base = OTHER; note = 2'-fluorocytidine-3'-phosphate
  modified_base 12: mod_base = OTHER; note = 2'-O-methylcytidine-3'-phosphate
  modified_base 13: mod_base = OTHER; note = 2'-O-methyluridine-3'-phosphate
  modified_base 14: mod_base = OTHER; note = 2'-O-methylcytidine-3'-phosphate
  modified_base 15: mod_base = OTHER; note = 2'-O-methyluridine-3'-phosphate
  modified_base 16: mod_base = OTHER; note = 2'-O-methylcytidine-3'-phosphate
  modified_base 17: mod_base = OTHER; note = 2'-O-methyluridine-3'-phosphate
  modified_base 18: mod_base = OTHER; note = 2'-O-methylcytidine-3'-phosphate
  modified_base 19: mod_base = OTHER; note = 2'-O-methyluridine-3'-phosphate
  modified_base 20: mod_base = OTHER; note = 2'-O-methyladenosine-3'-phosphate
  modified_base 21: mod_base = OTHER; note = 2'-O-methyluridine-3'-phosphate N-[tris(GalNAc-alkyl)-amidodecanoyl)]-4-hydroxyprolinol (Hyp-(GalNAc-alkyl)3)
ggcaccctggcctctctctat

SEQ ID NO: 2085 - RNA, 21 nt, synthetic construct
  source 1..21: mol_type = other RNA
  modified_base 1: mod_base = OTHER; note = 2'-O-methylguanosine-3'-phosphorothioate
  modified_base 2: mod_base = OTHER; note = 2'-O-methyladenosine-3'-phosphorothioate
  modified_base 3: mod_base = OTHER; note = 2'-O-methylcytidine-3'-phosphate
  modified_base 4: mod_base = OTHER; note = 2'-O-methyladenosine-3'-phosphate
  modified_base 5: mod_base = OTHER; note = 2'-O-methylguanosine-3'-phosphate
  modified_base 6: mod_base = OTHER; note = 2'-O-methylguanosine-3'-phosphate
  modified_base 7: mod_base = OTHER; note = 2'-O-methylcytidine-3'-phosphate
  modified_base 8: mod_base = OTHER; note = 2'-O-methyluridine-3'-phosphate
  modified_base 9: mod_base = OTHER; note = 2'-fluoroadenosine-3'-phosphate
  modified_base 10: mod_base = OTHER; note = 2'-fluorocytidine-3'-phosphate
  modified_base 11: mod_base = OTHER; note = 2'-fluoroadenosine-3'-phosphate
  modified_base 12: mod_base = OTHER; note = 2'-O-methylguanosine-3'-phosphate
  modified_base 13: mod_base = OTHER; note = 2'-O-methylguanosine-3'-phosphate
  modified_base 14: mod_base = OTHER; note = 2'-O-methylcytidine-3'-phosphate
  modified_base 15: mod_base = OTHER; note = 2'-O-methyladenosine-3'-phosphate
  modified_base 16: mod_base = OTHER; note = 2'-O-methyladenosine-3'-phosphate
  modified_base 17: mod_base = OTHER; note = 2'-O-methyluridine-3'-phosphate
  modified_base 18: mod_base = OTHER; note = 2'-O-methylcytidine-3'-phosphate
  modified_base 19: mod_base = OTHER; note = 2'-O-methylcytidine-3'-phosphate
  modified_base 20: mod_base = OTHER; note = 2'-O-methyluridine-3'-phosphate
  modified_base 21: mod_base = OTHER; note = 2'-O-methyluridine-3'-phosphate N-[tris(GalNAc-alkyl)-amidodecanoyl)]-4-hydroxyprolinol (Hyp-(GalNAc-alkyl)3)
gacaggctacaggcaatcctt

SEQ ID NO: 2086 - RNA, 21 nt, synthetic construct
  source 1..21: mol_type = other RNA
  modified_base 1: mod_base = OTHER; note = 2'-O-methyladenosine-3'-phosphorothioate
  modified_base 2: mod_base = OTHER; note = 2'-O-methylcytidine-3'-phosphorothioate
  modified_base 3: mod_base = OTHER; note = 2'-O-methyladenosine-3'-phosphate
  modified_base 4: mod_base = OTHER; note = 2'-O-methylguanosine-3'-phosphate
  modified_base 5: mod_base = OTHER; note = 2'-O-methylguanosine-3'-phosphate
  modified_base 6: mod_base = OTHER; note = 2'-O-methylcytidine-3'-phosphate
  modified_base 7: mod_base = OTHER; note = 2'-O-methyluridine-3'-phosphate
  modified_base 8: mod_base = OTHER; note = 2'-O-methyladenosine-3'-phosphate
  modified_base 9: mod_base = OTHER; note = 2'-fluorocytidine-3'-phosphate
  modified_base 10: mod_base = OTHER; note = 2'-fluoroadenosine-3'-phosphate
  modified_base 11: mod_base = OTHER; note = 2'-fluoroguanosine-3'-phosphate
  modified_base 12: mod_base = OTHER; note = 2'-O-methylguanosine-3'-phosphate
  modified_base 13: mod_base = OTHER; note = 2'-O-methylcytidine-3'-phosphate
  modified_base 14: mod_base = OTHER; note = 2'-O-methyladenosine-3'-phosphate
  modified_base 15: mod_base = OTHER; note = 2'-O-methyladenosine-3'-phosphate
  modified_base 16: mod_base = OTHER; note = 2'-O-methyluridine-3'-phosphate
  modified_base 17: mod_base = OTHER; note = 2'-O-methylcytidine-3'-phosphate
  modified_base 18: mod_base = OTHER; note = 2'-O-methylcytidine-3'-phosphate
  modified_base 19: mod_base = OTHER; note = 2'-O-methyluridine-3'-phosphate
  modified_base 20: mod_base = OTHER; note = 2'-O-methylguanosine-3'-phosphate
  modified_base 21: mod_base = OTHER; note = 2'-O-methyluridine-3'-phosphate N-[tris(GalNAc-alkyl)-amidodecanoyl)]-4-hydroxyprolinol (Hyp-(GalNAc-alkyl)3)
acaggctacaggcaatcctgt

SEQ ID NO: 2087 - RNA, 21 nt, synthetic construct
  source 1..21: mol_type = other RNA
  modified_base 1: mod_base = OTHER; note = 2'-O-methyluridine-3'-phosphorothioate
  modified_base 2: mod_base = OTHER; note = 2'-O-methyluridine-3'-phosphorothioate
  modified_base 3: mod_base = OTHER; note = 2'-O-methylcytidine-3'-phosphate
  modified_base 4: mod_base = OTHER; note = 2'-O-methylcytidine-3'-phosphate
  modified_base 5: mod_base = OTHER; note = 2'-O-methyluridine-3'-phosphate
  modified_base 6: mod_base = OTHER; note = 2'-O-methyluridine-3'-phosphate
  modified_base 7: mod_base = OTHER; note = 2'-O-methylguanosine-3'-phosphate
  modified_base 8: mod_base = OTHER; note = 2'-O-methylguanosine-3'-phosphate
  modified_base 9: mod_base = OTHER; note = 2'-fluoroadenosine-3'-phosphate
  modified_base 10: mod_base = OTHER; note = 2'-fluoroadenosine-3'-phosphate
  modified_base 11: mod_base = OTHER; note = 2'-fluoroguanosine-3'-phosphate
  modified_base 12: mod_base = OTHER; note = 2'-O-methylguanosine-3'-phosphate
  modified_base 13: mod_base = OTHER; note = 2'-O-methyladenosine-3'-phosphate
  modified_base 14: mod_base = OTHER; note = 2'-O-methylcytidine-3'-phosphate
  modified_base 15: mod_base = OTHER; note = 2'-O-methyladenosine-3'-phosphate
  modified_base 16: mod_base = OTHER; note = 2'-O-methyladenosine-3'-phosphate
  modified_base 17: mod_base = OTHER; note = 2'-O-methylguanosine-3'-phosphate
  modified_base 18: mod_base = OTHER; note = 2'-O-methyladenosine-3'-phosphate
  modified_base 19: mod_base = OTHER; note = 2'-O-methyladenosine-3'-phosphate
  modified_base 20: mod_base = OTHER; note = 2'-O-methylcytidine-3'-phosphate
  modified_base 21: mod_base = OTHER; note = 2'-O-methyluridine-3'-phosphate N-[tris(GalNAc-alkyl)-amidodecanoyl)]-4-hydroxyprolinol (Hyp-(GalNAc-alkyl)3)
ttccttggaaggacaagaact

SEQ ID NO: 2088 - RNA, 21 nt, synthetic construct
  source 1..21: mol_type = other RNA
  modified_base 1: mod_base = OTHER; note = 2'-O-methylcytidine-3'-phosphorothioate
  modified_base 2: mod_base = OTHER; note = 2'-O-methylcytidine-3'-phosphorothioate
  modified_base 3: mod_base = OTHER; note = 2'-O-methyluridine-3'-phosphate
  modified_base 4: mod_base = OTHER; note = 2'-O-methyluridine-3'-phosphate
  modified_base 5: mod_base = OTHER; note = 2'-O-methylguanosine-3'-phosphate
  modified_base 6: mod_base = OTHER; note = 2'-O-methylguanosine-3'-phosphate
  modified_base 7: mod_base = OTHER; note = 2'-O-methyladenosine-3'-phosphate
  modified_base 8: mod_base = OTHER; note = 2'-O-methyladenosine-3'-phosphate
  modified_base 9: mod_base = OTHER; note = 2'-fluoroguanosine-3'-phosphate
  modified_base 10: mod_base = OTHER; note = 2'-fluoroguanosine-3'-phosphate
  modified_base 11: mod_base = OTHER; note = 2'-fluoroadenosine-3'-phosphate
  modified_base 12: mod_base = OTHER; note = 2'-O-methylcytidine-3'-phosphate
  modified_base 13: mod_base = OTHER; note = 2'-O-methyladenosine-3'-phosphate
  modified_base 14: mod_base = OTHER; note = 2'-O-methyladenosine-3'-phosphate
  modified_base 15: mod_base = OTHER; note = 2'-O-methylguanosine-3'-phosphate
  modified_base 16: mod_base = OTHER; note = 2'-O-methyladenosine-3'-phosphate
  modified_base 17: mod_base = OTHER; note = 2'-O-methyladenosine-3'-phosphate
  modified_base 18: mod_base = OTHER; note = 2'-O-methylcytidine-3'-phosphate
  modified_base 19: mod_base = OTHER; note = 2'-O-methyluridine-3'-phosphate
  modified_base 20: mod_base = OTHER; note = 2'-O-methylguanosine-3'-phosphate
  modified_base 21: mod_base = OTHER; note = 2'-O-methyluridine-3'-phosphate N-[tris(GalNAc-alkyl)-amidodecanoyl)]-4-hydroxyprolinol (Hyp-(GalNAc-alkyl)3)
ccttggaaggacaagaactgt

SEQ ID NO: 2089 - RNA, 21 nt, synthetic construct
  source 1..21: mol_type = other RNA
  modified_base 1: mod_base = OTHER; note = 2'-O-methylcytidine-3'-phosphorothioate
  modified_base 2: mod_base = OTHER; note = 2'-O-methyluridine-3'-phosphorothioate
  modified_base 3: mod_base = OTHER; note = 2'-O-methyluridine-3'-phosphate
  modified_base 4: mod_base = OTHER; note = 2'-O-methylguanosine-3'-phosphate
  modified_base 5: mod_base = OTHER; note = 2'-O-methylguanosine-3'-phosphate
  modified_base 6: mod_base = OTHER; note = 2'-O-methyladenosine-3'-phosphate
  modified_base 7: mod_base = OTHER; note = 2'-O-methyladenosine-3'-phosphate
  modified_base 8: mod_base = OTHER; note = 2'-O-methylguanosine-3'-phosphate
  modified_base 9: mod_base = OTHER; note = 2'-fluoroguanosine-3'-phosphate
  modified_base 10: mod_base = OTHER; note = 2'-fluoroadenosine-3'-phosphate
  modified_base 11: mod_base = OTHER; note = 2'-fluorocytidine-3'-phosphate
  modified_base 12: mod_base = OTHER; note = 2'-O-methyladenosine-3'-phosphate
  modified_base 13: mod_base = OTHER; note = 2'-O-methyladenosine-3'-phosphate
  modified_base 14: mod_base = OTHER; note = 2'-O-methylguanosine-3'-phosphate
  modified_base 15: mod_base = OTHER; note = 2'-O-methyladenosine-3'-phosphate
  modified_base 16: mod_base = OTHER; note = 2'-O-methyladenosine-3'-phosphate
  modified_base 17: mod_base = OTHER; note = 2'-O-methylcytidine-3'-phosphate
  modified_base 18: mod_base = OTHER; note = 2'-O-methyluridine-3'-phosphate
  modified_base 19: mod_base = OTHER; note = 2'-O-methylguanosine-3'-phosphate
  modified_base 20: mod_base = OTHER; note = 2'-O-methylcytidine-3'-phosphate
  modified_base 21: mod_base = OTHER; note = 2'-O-methyluridine-3'-phosphate N-[tris(GalNAc-alkyl)-amidodecanoyl)]-4-hydroxyprolinol (Hyp-(GalNAc-alkyl)3)
cttggaaggacaagaactgct

SEQ ID NO: 2090 - RNA, 21 nt, synthetic construct
  source 1..21: mol_type = other RNA
  modified_base 1: mod_base = OTHER; note = 2'-O-methylcytidine-3'-phosphorothioate
  modified_base 2: mod_base = OTHER; note = 2'-O-methyladenosine-3'-phosphorothioate
  modified_base 3: mod_base = OTHER; note = 2'-O-methylcytidine-3'-phosphate
  modified_base 4: mod_base = OTHER; note = 2'-O-methylcytidine-3'-phosphate
  modified_base 5: mod_base = OTHER; note = 2'-O-methyluridine-3'-phosphate
  modified_base 6: mod_base = OTHER; note = 2'-O-methylguanosine-3'-phosphate
  modified_base 7: mod_base = OTHER; note = 2'-O-methyladenosine-3'-phosphate
  modified_base 8: mod_base = OTHER; note = 2'-O-methyladenosine-3'-phosphate
  modified_base 9: mod_base = OTHER; note = 2'-fluoroguanosine-3'-phosphate
  modified_base 10: mod_base = OTHER; note = 2'-fluorocytidine-3'-phosphate
  modified_base 11: mod_base = OTHER; note = 2'-fluoroadenosine-3'-phosphate
  modified_base 12: mod_base = OTHER; note = 2'-O-methylguanosine-3'-phosphate
  modified_base 13: mod_base = OTHER; note = 2'-O-methylcytidine-3'-phosphate
  modified_base 14: mod_base = OTHER; note = 2'-O-methylcytidine-3'-phosphate
  modified_base 15: mod_base = OTHER; note = 2'-O-methylguanosine-3'-phosphate
  modified_base 16: mod_base = OTHER; note = 2'-O-methyluridine-3'-phosphate
  modified_base 17: mod_base = OTHER; note = 2'-O-methyluridine-3'-phosphate
  modified_base 18: mod_base = OTHER; note = 2'-O-methyluridine-3'-phosphate
  modified_base 19: mod_base = OTHER; note = 2'-O-methylguanosine-3'-phosphate
  modified_base 20: mod_base = OTHER; note = 2'-O-methyluridine-3'-phosphate
  modified_base 21: mod_base = OTHER; note = 2'-O-methyluridine-3'-phosphate N-[tris(GalNAc-alkyl)-amidodecanoyl)]-4-hydroxyprolinol (Hyp-(GalNAc-alkyl)3)
cacctgaagcagccgtttgtt

SEQ ID NO: 2091 - RNA, 21 nt, synthetic construct
  source 1..21: mol_type = other RNA
  modified_base 1: mod_base = OTHER; note = 2'-O-methylcytidine-3'-phosphorothioate
  modified_base 2: mod_base = OTHER; note = 2'-O-methyluridine-3'-phosphorothioate
  modified_base 3: mod_base = OTHER; note = 2'-O-methylguanosine-3'-phosphate
  modified_base 4: mod_base = OTHER; note = 2'-O-methyladenosine-3'-phosphate
  modified_base 5: mod_base = OTHER; note = 2'-O-methyladenosine-3'-phosphate
  modified_base 6: mod_base = OTHER; note = 2'-O-methylguanosine-3'-phosphate
  modified_base 7: mod_base = OTHER; note = 2'-O-methylcytidine-3'-phosphate
  modified_base 8: mod_base = OTHER; note = 2'-O-methyladenosine-3'-phosphate
  modified_base 9: mod_base = OTHER; note = 2'-fluoroguanosine-3'-phosphate
  modified_base 10: mod_base = OTHER; note = 2'-fluorocytidine-3'-phosphate
  modified_base 11: mod_base = OTHER; note = 2'-fluorocytidine-3'-phosphate
  modified_base 12: mod_base = OTHER; note = 2'-O-methylguanosine-3'-phosphate
  modified_base 13: mod_base = OTHER; note = 2'-O-methyluridine-3'-phosphate
  modified_base 14: mod_base = OTHER; note = 2'-O-methyluridine-3'-phosphate
  modified_base 15: mod_base = OTHER; note = 2'-O-methyluridine-3'-phosphate
  modified_base 16: mod_base = OTHER; note = 2'-O-methylguanosine-3'-phosphate
  modified_base 17: mod_base = OTHER; note = 2'-O-methyluridine-3'-phosphate
  modified_base 18: mod_base = OTHER; note = 2'-O-methylguanosine-3'-phosphate
  modified_base 19: mod_base = OTHER; note = 2'-O-methylcytidine-3'-phosphate
  modified_base 20: mod_base = OTHER; note = 2'-O-methyladenosine-3'-phosphate
  modified_base 21: mod_base = OTHER; note = 2'-O-methyluridine-3'-phosphate N-[tris(GalNAc-alkyl)-amidodecanoyl)]-4-hydroxyprolinol (Hyp-(GalNAc-alkyl)3)
ctgaagcagccgtttgtgcat

SEQ ID NO: 2092 - RNA, 21 nt, synthetic construct
  source 1..21: mol_type = other RNA
  modified_base 1: mod_base = OTHER; note = 2'-O-methyluridine-3'-phosphorothioate
  modified_base 2: mod_base = OTHER; note = 2'-O-methyluridine-3'-phosphorothioate
  modified_base 3: mod_base = OTHER; note = 2'-O-methyluridine-3'-phosphate
  modified_base 4: mod_base = OTHER; note = 2'-O-methylguanosine-3'-phosphate
  modified_base 5: mod_base = OTHER; note = 2'-O-methyluridine-3'-phosphate
  modified_base 6: mod_base = OTHER; note = 2'-O-methylguanosine-3'-phosphate
  modified_base 7: mod_base = OTHER; note = 2'-O-methylcytidine-3'-phosphate
  modified_base 8: mod_base = OTHER; note = 2'-O-methyladenosine-3'-phosphate
  modified_base 9: mod_base = OTHER; note = 2'-fluoroguanosine-3'-phosphate
  modified_base 10: mod_base = OTHER; note = 2'-fluoroguanosine-3'-phosphate
  modified_base 11: mod_base = OTHER; note = 2'-fluoroguanosine-3'-phosphate
  modified_base 12: mod_base = OTHER; note = 2'-O-methylcytidine-3'-phosphate
  modified_base 13: mod_base = OTHER; note = 2'-O-methylcytidine-3'-phosphate
  modified_base 14: mod_base = OTHER; note = 2'-O-methyluridine-3'-phosphate
  modified_base 15: mod_base = OTHER; note = 2'-O-methylguanosine-3'-phosphate
  modified_base 16: mod_base = OTHER; note = 2'-O-methylguanosine-3'-phosphate
  modified_base 17: mod_base = OTHER; note = 2'-O-methylcytidine-3'-phosphate
  modified_base 18: mod_base = OTHER; note = 2'-O-methyluridine-3'-phosphate
  modified_base 19: mod_base = OTHER; note = 2'-O-methylcytidine-3'-phosphate
  modified_base 20: mod_base = OTHER; note = 2'-O-methyluridine-3'-phosphate
  modified_base 21: mod_base = OTHER; note = 2'-O-methyluridine-3'-phosphate N-[tris(GalNAc-alkyl)-amidodecanoyl)]-4-hydroxyprolinol (Hyp-(GalNAc-alkyl)3)
tttgtgcagggcctggctctt

SEQ ID NO: 2093 - RNA, 21 nt, synthetic construct
  source 1..21: mol_type = other RNA
  modified_base 1: mod_base = OTHER; note = 2'-O-methyluridine-3'-phosphorothioate
  modified_base 2: mod_base = OTHER; note = 2'-O-methyluridine-3'-phosphorothioate
  modified_base 3: mod_base = OTHER; note = 2'-O-methylguanosine-3'-phosphate
  modified_base 4: mod_base = OTHER; note = 2'-O-methyluridine-3'-phosphate
  modified_base 5: mod_base = OTHER; note = 2'-O-methylguanosine-3'-phosphate
  modified_base 6: mod_base = OTHER; note = 2'-O-methylcytidine-3'-phosphate
  modified_base 7: mod_base = OTHER; note = 2'-O-methyladenosine-3'-phosphate
  modified_base 8: mod_base = OTHER; note = 2'-O-methylguanosine-3'-phosphate
  modified_base 9: mod_base = OTHER; note = 2'-fluoroguanosine-3'-phosphate
  modified_base 10: mod_base = OTHER; note = 2'-fluoroguanosine-3'-phosphate
  modified_base 11: mod_base = OTHER; note = 2'-fluorocytidine-3'-phosphate
  modified_base 12: mod_base = OTHER; note = 2'-O-methylcytidine-3'-phosphate
  modified_base 13: mod_base = OTHER; note = 2'-O-methyluridine-3'-phosphate
  modified_base 14: mod_base = OTHER; note = 2'-O-methylguanosine-3'-phosphate
  modified_base 15: mod_base = OTHER; note = 2'-O-methylguanosine-3'-phosphate
  modified_base 16: mod_base = OTHER; note = 2'-O-methylcytidine-3'-phosphate
  modified_base 17: mod_base = OTHER; note = 2'-O-methyluridine-3'-phosphate
  modified_base 18: mod_base = OTHER; note = 2'-O-methylcytidine-3'-phosphate
  modified_base 19: mod_base = OTHER; note = 2'-O-methyluridine-3'-phosphate
  modified_base 20: mod_base = OTHER; note = 2'-O-methylcytidine-3'-phosphate
  modified_base 21: mod_base = OTHER; note = 2'-O-methyluridine-3'-phosphate N-[tris(GalNAc-alkyl)-amidodecanoyl)]-4-hydroxyprolinol (Hyp-(GalNAc-alkyl)3)
ttgtgcagggcctggctctct

SEQ ID NO: 2094 - RNA, 21 nt, synthetic construct
  source 1..21: mol_type = other RNA
  modified_base 1: mod_base = OTHER; note = 2'-O-methyluridine-3'-phosphorothioate
  modified_base 2: mod_base = OTHER; note = 2'-O-methylguanosine-3'-phosphorothioate
  modified_base 3: mod_base = OTHER; note = 2'-O-methyluridine-3'-phosphate
  modified_base 4: mod_base = OTHER; note = 2'-O-methylguanosine-3'-phosphate
  modified_base 5: mod_base = OTHER; note = 2'-O-methylcytidine-3'-phosphate
  modified_base 6: mod_base = OTHER; note = 2'-O-methyladenosine-3'-phosphate
  modified_base 7: mod_base = OTHER; note = 2'-O-methylguanosine-3'-phosphate
  modified_base 8: mod_base = OTHER; note = 2'-O-methylguanosine-3'-phosphate
  modified_base 9: mod_base = OTHER; note = 2'-fluoroguanosine-3'-phosphate
  modified_base 10: mod_base = OTHER; note = 2'-fluorocytidine-3'-phosphate
  modified_base 11: mod_base = OTHER; note = 2'-fluorocytidine-3'-phosphate
  modified_base 12: mod_base = OTHER; note = 2'-O-methyluridine-3'-phosphate
  modified_base 13: mod_base = OTHER; note = 2'-O-methylguanosine-3'-phosphate
  modified_base 14: mod_base = OTHER; note = 2'-O-methylguanosine-3'-phosphate
  modified_base 15: mod_base = OTHER; note = 2'-O-methylcytidine-3'-phosphate
  modified_base 16: mod_base = OTHER; note = 2'-O-methyluridine-3'-phosphate
  modified_base 17: mod_base = OTHER; note = 2'-O-methylcytidine-3'-phosphate
  modified_base 18: mod_base = OTHER; note = 2'-O-methyluridine-3'-phosphate
  modified_base 19: mod_base = OTHER; note = 2'-O-methylcytidine-3'-phosphate
  modified_base 20: mod_base = OTHER; note = 2'-O-methyluridine-3'-phosphate
  modified_base 21: mod_base = OTHER; note = 2'-O-methyluridine-3'-phosphate N-[tris(GalNAc-alkyl)-amidodecanoyl)]-4-hydroxyprolinol (Hyp-(GalNAc-alkyl)3)
tgtgcagggcctggctctctt

SEQ ID NO: 2095 - RNA, 21 nt, synthetic construct
  source 1..21: mol_type = other RNA
  modified_base 1: mod_base = OTHER; note = 2'-O-methylguanosine-3'-phosphorothioate
  modified_base 2: mod_base = OTHER; note = 2'-O-methyluridine-3'-phosphorothioate
  modified_base 3: mod_base = OTHER; note = 2'-O-methylguanosine-3'-phosphate
  modified_base 4: mod_base = OTHER; note = 2'-O-methylcytidine-3'-phosphate
  modified_base 5: mod_base = OTHER; note = 2'-O-methyladenosine-3'-phosphate
  modified_base 6: mod_base = OTHER; note = 2'-O-methylguanosine-3'-phosphate
  modified_base 7: mod_base = OTHER; note = 2'-O-methylguanosine-3'-phosphate
  modified_base 8: mod_base = OTHER; note = 2'-O-methylguanosine-3'-phosphate
  modified_base 9: mod_base = OTHER; note = 2'-fluorocytidine-3'-phosphate
  modified_base 10: mod_base = OTHER; note = 2'-fluorocytidine-3'-phosphate
  modified_base 11: mod_base = OTHER; note = 2'-fluorouridine-3'-phosphate
  modified_base 12: mod_base = OTHER; note = 2'-O-methylguanosine-3'-phosphate
  modified_base 13: mod_base = OTHER; note = 2'-O-methylguanosine-3'-phosphate
  modified_base 14: mod_base = OTHER; note = 2'-O-methylcytidine-3'-phosphate
  modified_base 15: mod_base = OTHER; note = 2'-O-methyluridine-3'-phosphate
  modified_base 16: mod_base = OTHER; note = 2'-O-methylcytidine-3'-phosphate
  modified_base 17: mod_base = OTHER; note = 2'-O-methyluridine-3'-phosphate
  modified_base 18: mod_base = OTHER; note = 2'-O-methylcytidine-3'-phosphate
  modified_base 19: mod_base = OTHER; note = 2'-O-methyluridine-3'-phosphate
  modified_base 20: mod_base = OTHER; note = 2'-O-methyladenosine-3'-phosphate
  modified_base 21: mod_base = OTHER; note = 2'-O-methyluridine-3'-phosphate N-[tris(GalNAc-alkyl)-amidodecanoyl)]-4-hydroxyprolinol (Hyp-(GalNAc-alkyl)3)
gtgcagggcctggctctctat

SEQ ID NO: 2096 - RNA, 21 nt, synthetic construct
  source 1..21: mol_type = other RNA
  modified_base 1: mod_base = OTHER; note = 2'-O-methyluridine-3'-phosphorothioate
  modified_base 2: mod_base = OTHER; note = 2'-O-methylguanosine-3'-phosphorothioate
  modified_base 3: mod_base = OTHER; note = 2'-O-methylcytidine-3'-phosphate
  modified_base 4: mod_base = OTHER; note = 2'-O-methyladenosine-3'-phosphate
  modified_base 5: mod_base = OTHER; note = 2'-O-methylguanosine-3'-phosphate
  modified_base 6: mod_base = OTHER; note = 2'-O-methylguanosine-3'-phosphate
  modified_base 7: mod_base = OTHER; note = 2'-O-methylguanosine-3'-phosphate
  modified_base 8: mod_base = OTHER; note = 2'-O-methylcytidine-3'-phosphate
  modified_base 9: mod_base = OTHER; note = 2'-fluorocytidine-3'-phosphate
  modified_base 10: mod_base = OTHER; note = 2'-fluorouridine-3'-phosphate
  modified_base 11: mod_base = OTHER; note = 2'-fluoroguanosine-3'-phosphate
  modified_base 12: mod_base = OTHER; note = 2'-O-methylguanosine-3'-phosphate
  modified_base 13: mod_base = OTHER; note = 2'-O-methylcytidine-3'-phosphate
  modified_base 14: mod_base = OTHER; note = 2'-O-methyluridine-3'-phosphate
  modified_base 15: mod_base = OTHER; note = 2'-O-methylcytidine-3'-phosphate
  modified_base 16: mod_base = OTHER; note = 2'-O-methyluridine-3'-phosphate
  modified_base 17: mod_base = OTHER; note = 2'-O-methylcytidine-3'-phosphate
  modified_base 18: mod_base = OTHER; note = 2'-O-methyluridine-3'-phosphate
  modified_base 19: mod_base = OTHER; note = 2'-O-methyladenosine-3'-phosphate
  modified_base 20: mod_base = OTHER; note = 2'-O-methyluridine-3'-phosphate
  modified_base 21: mod_base = OTHER; note = 2'-O-methyluridine-3'-phosphate N-[tris(GalNAc-alkyl)-amidodecanoyl)]-4-hydroxyprolinol (Hyp-(GalNAc-alkyl)3)
tgcagggcctggctctctatt

SEQ ID NO: 2097 - RNA, 21 nt, synthetic construct
  source 1..21: mol_type = other RNA
  modified_base 1: mod_base = OTHER; note = 2'-O-methyladenosine-3'-phosphorothioate
  modified_base 2: mod_base = OTHER; note = 2'-O-methylcytidine-3'-phosphorothioate
  modified_base 3: mod_base = OTHER; note = 2'-O-methylguanosine-3'-phosphate
  modified_base 4: mod_base = OTHER; note = 2'-O-methylcytidine-3'-phosphate
  modified_base 5: mod_base = OTHER; note = 2'-O-methyluridine-3'-phosphate
  modified_base 6: mod_base = OTHER; note = 2'-O-methylcytidine-3'-phosphate
  modified_base 7: mod_base = OTHER; note = 2'-O-methyluridine-3'-phosphate
  modified_base 8: mod_base = OTHER; note = 2'-O-methylcytidine-3'-phosphate
  modified_base 9: mod_base = OTHER; note = 2'-fluorouridine-3'-phosphate
  modified_base 10: mod_base = OTHER; note = 2'-fluoroguanosine-3'-phosphate
  modified_base 11: mod_base = OTHER; note = 2'-fluoroguanosine-3'-phosphate
  modified_base 12: mod_base = OTHER; note = 2'-O-methyladenosine-3'-phosphate
  modified_base 13: mod_base = OTHER; note = 2'-O-methylcytidine-3'-phosphate
  modified_base 14: mod_base = OTHER; note = 2'-O-methyluridine-3'-phosphate
  modified_base 15: mod_base = OTHER; note = 2'-O-methyluridine-3'-phosphate
  modified_base 16: mod_base = OTHER; note = 2'-O-methylcytidine-3'-phosphate
  modified_base 17: mod_base = OTHER; note = 2'-O-methyladenosine-3'-phosphate
  modified_base 18: mod_base = OTHER; note = 2'-O-methylcytidine-3'-phosphate
  modified_base 19: mod_base = OTHER; note = 2'-O-methyladenosine-3'-phosphate
  modified_base 20: mod_base = OTHER; note = 2'-O-methylguanosine-3'-phosphate
  modified_base 21: mod_base = OTHER; note = 2'-O-methyluridine-3'-phosphate N-[tris(GalNAc-alkyl)-amidodecanoyl)]-4-hydroxyprolinol (Hyp-(GalNAc-alkyl)3)
acgctctctggacttcacagt

SEQ ID NO: 2098 - RNA, 21 nt, synthetic construct
  source 1..21: mol_type = other RNA
  modified_base 1: mod_base = OTHER; note = 2'-O-methylcytidine-3'-phosphorothioate
  modified_base 2: mod_base = OTHER; note = 2'-O-methylguanosine-3'-phosphorothioate
  modified_base 3: mod_base = OTHER; note = 2'-O-methylcytidine-3'-phosphate
  modified_base 4: mod_base = OTHER; note = 2'-O-methyluridine-3'-phosphate
  modified_base 5: mod_base = OTHER; note = 2'-O-methylcytidine-3'-phosphate
  modified_base 6: mod_base = OTHER; note = 2'-O-methyluridine-3'-phosphate
  modified_base 7: mod_base = OTHER; note = 2'-O-methylcytidine-3'-phosphate
  modified_base 8: mod_base = OTHER; note = 2'-O-methyluridine-3'-phosphate
  modified_base 9: mod_base = OTHER; note = 2'-fluoroguanosine-3'-phosphate
  modified_base 10: mod_base = OTHER; note = 2'-fluoroguanosine-3'-phosphate
  modified_base 11: mod_base = OTHER; note = 2'-fluoroadenosine-3'-phosphate
  modified_base 12: mod_base = OTHER; note = 2'-O-methylcytidine-3'-phosphate
  modified_base 13: mod_base = OTHER; note = 2'-O-methyluridine-3'-phosphate
  modified_base 14: mod_base = OTHER; note = 2'-O-methyluridine-3'-phosphate
  modified_base 15: mod_base = OTHER; note = 2'-O-methylcytidine-3'-phosphate
  modified_base 16: mod_base = OTHER; note = 2'-O-methyladenosine-3'-phosphate
  modified_base 17: mod_base = OTHER; note = 2'-O-methylcytidine-3'-phosphate
  modified_base 18: mod_base = OTHER; note = 2'-O-methyladenosine-3'-phosphate
  modified_base 19: mod_base = OTHER; note = 2'-O-methylguanosine-3'-phosphate
  modified_base 20: mod_base = OTHER; note = 2'-O-methyladenosine-3'-phosphate
  modified_base 21: mod_base = OTHER; note = 2'-O-methyluridine-3'-phosphate N-[tris(GalNAc-alkyl)-amidodecanoyl)]-4-hydroxyprolinol (Hyp-(GalNAc-alkyl)3)
cgctctctggacttcacagat

SEQ ID NO: 2099 - RNA, 21 nt, synthetic construct
  source 1..21: mol_type = other RNA
  modified_base 1: mod_base = OTHER; note = 2'-O-methylcytidine-3'-phosphorothioate
  modified_base 2: mod_base = OTHER; note = 2'-O-methyluridine-3'-phosphorothioate
  modified_base 3: mod_base = OTHER; note = 2'-O-methylguanosine-3'-phosphate
  modified_base 4: mod_base = OTHER; note = 2'-O-methyladenosine-3'-phosphate
  modified_base 5: mod_base = OTHER; note = 2'-O-methylguanosine-3'-phosphate
  modified_base 6: mod_base = OTHER; note = 2'-O-methyladenosine-3'-phosphate
  modified_base 7: mod_base = OTHER; note = 2'-O-methyladenosine-3'-phosphate
  modified_base 8: mod_base = OTHER; note = 2'-O-methylguanosine-3'-phosphate
  modified_base 9: mod_base = OTHER; note = 2'-fluoroadenosine-3'-phosphate
  modified_base 10: mod_base = OTHER; note = 2'-fluorouridine-3'-phosphate
  modified_base 11: mod_base = OTHER; note = 2'-fluorouridine-3'-phosphate
  modified_base 12: mod_base = OTHER; note = 2'-O-methylguanosine-3'-phosphate
  modified_base 13: mod_base = OTHER; note = 2'-O-methyladenosine-3'-phosphate
  modified_base 14: mod_base = OTHER; note = 2'-O-methylcytidine-3'-phosphate
  modified_base 15: mod_base = OTHER; note = 2'-O-methyladenosine-3'-phosphate
  modified_base 16: mod_base = OTHER; note = 2'-O-methylguanosine-3'-phosphate
  modified_base 17: mod_base = OTHER; note = 2'-O-methylguanosine-3'-phosphate
  modified_base 18: mod_base = OTHER; note = 2'-O-methyluridine-3'-phosphate
  modified_base 19: mod_base = OTHER; note = 2'-O-methyluridine-3'-phosphate
  modified_base 20: mod_base = OTHER; note = 2'-O-methylcytidine-3'-phosphate
  modified_base 21: mod_base = OTHER; note = 2'-O-methyluridine-3'-phosphate N-[tris(GalNAc-alkyl)-amidodecanoyl)]-4-hydroxyprolinol (Hyp-(GalNAc-alkyl)3)
ctgagaagattgacaggttct

SEQ ID NO: 2100 - RNA, 21 nt, synthetic construct
  source 1..21: mol_type = other RNA
  modified_base 1: mod_base = OTHER; note = 2'-O-methyluridine-3'-phosphorothioate
  modified_base 2: mod_base = OTHER; note = 2'-O-methylguanosine-3'-phosphorothioate
  modified_base 3: mod_base = OTHER; note = 2'-O-methyladenosine-3'-phosphate
  modified_base 4: mod_base = OTHER; note = 2'-O-methylguanosine-3'-phosphate
  modified_base 5: mod_base = OTHER; note = 2'-O-methyladenosine-3'-phosphate
  modified_base 6: mod_base = OTHER; note = 2'-O-methyladenosine-3'-phosphate
  modified_base 7: mod_base = OTHER; note = 2'-O-methylguanosine-3'-phosphate
  modified_base 8: mod_base = OTHER; note = 2'-O-methyladenosine-3'-phosphate
  modified_base 9: mod_base = OTHER; note = 2'-fluorouridine-3'-phosphate
  modified_base 10: mod_base = OTHER; note = 2'-fluorouridine-3'-phosphate
  modified_base 11: mod_base = OTHER; note = 2'-fluoroguanosine-3'-phosphate
  modified_base 12: mod_base = OTHER; note = 2'-O-methyladenosine-3'-phosphate
  modified_base 13: mod_base = OTHER; note = 2'-O-methylcytidine-3'-phosphate
  modified_base 14: mod_base = OTHER; note = 2'-O-methyladenosine-3'-phosphate
  modified_base 15: mod_base = OTHER; note = 2'-O-methylguanosine-3'-phosphate
  modified_base 16: mod_base = OTHER; note = 2'-O-methylguanosine-3'-phosphate
  modified_base 17: mod_base = OTHER; note = 2'-O-methyluridine-3'-phosphate
  modified_base 18: mod_base = OTHER; note = 2'-O-methyluridine-3'-phosphate
  modified_base 19: mod_base = OTHER; note = 2'-O-methylcytidine-3'-phosphate
  modified_base 20: mod_base = OTHER; note = 2'-O-methyladenosine-3'-phosphate
  modified_base 21: mod_base = OTHER; note = 2'-O-methyluridine-3'-phosphate N-[tris(GalNAc-alkyl)-amidodecanoyl)]-4-hydroxyprolinol (Hyp-(GalNAc-alkyl)3)
tgagaagattgacaggttcat

SEQ ID NO: 2101 - RNA, 21 nt, synthetic construct
  source 1..21: mol_type = other RNA
  modified_base 1: mod_base = OTHER; note = 2'-O-methylguanosine-3'-phosphorothioate
  modified_base 2: mod_base = OTHER; note = 2'-O-methyladenosine-3'-phosphorothioate
  modified_base 3: mod_base = OTHER; note = 2'-O-methylguanosine-3'-phosphate
  modified_base 4: mod_base = OTHER; note = 2'-O-methyladenosine-3'-phosphate
  modified_base 5: mod_base = OTHER; note = 2'-O-methyladenosine-3'-phosphate
  modified_base 6: mod_base = OTHER; note = 2'-O-methylguanosine-3'-phosphate
  modified_base 7: mod_base = OTHER; note = 2'-O-methyladenosine-3'-phosphate
  modified_base 8: mod_base = OTHER; note = 2'-O-methyluridine-3'-phosphate
  modified_base 9: mod_base = OTHER; note = 2'-fluorouridine-3'-phosphate
  modified_base 10: mod_base = OTHER; note = 2'-fluoroguanosine-3'-phosphate
  modified_base 11: mod_base = OTHER; note = 2'-fluoroadenosine-3'-phosphate
  modified_base 12: mod_base = OTHER; note = 2'-O-methylcytidine-3'-phosphate
  modified_base 13: mod_base = OTHER; note = 2'-O-methyladenosine-3'-phosphate
  modified_base 14: mod_base = OTHER; note = 2'-O-methylguanosine-3'-phosphate
  modified_base 15: mod_base = OTHER; note = 2'-O-methylguanosine-3'-phosphate
  modified_base 16: mod_base = OTHER; note = 2'-O-methyluridine-3'-phosphate
  modified_base 17: mod_base = OTHER; note = 2'-O-methyluridine-3'-phosphate
  modified_base 18: mod_base = OTHER; note = 2'-O-methylcytidine-3'-phosphate
  modified_base 19: mod_base = OTHER; note = 2'-O-methyladenosine-3'-phosphate
  modified_base 20: mod_base = OTHER; note = 2'-O-methyluridine-3'-phosphate
  modified_base 21: mod_base = OTHER; note = 2'-O-methyluridine-3'-phosphate N-[tris(GalNAc-alkyl)-amidodecanoyl)]-4-hydroxyprolinol (Hyp-(GalNAc-alkyl)3)
gagaagattgacaggttcatt

SEQ ID NO: 2102 - RNA, 21 nt, synthetic construct
  source 1..21: mol_type = other RNA
  modified_base 1: mod_base = OTHER; note = 2'-O-methyladenosine-3'-phosphorothioate
  modified_base 2: mod_base = OTHER; note = 2'-O-methylguanosine-3'-phosphorothioate
  modified_base 3: mod_base = OTHER; note = 2'-O-methyladenosine-3'-phosphate
  modified_base 4: mod_base = OTHER; note = 2'-O-methyladenosine-3'-phosphate
  modified_base 5: mod_base = OTHER; note = 2'-O-methylguanosine-3'-phosphate
  modified_base 6: mod_base = OTHER; note = 2'-O-methyladenosine-3'-phosphate
  modified_base 7: mod_base = OTHER; note = 2'-O-methyluridine-3'-phosphate
  modified_base 8: mod_base = OTHER; note = 2'-O-methyluridine-3'-phosphate
  modified_base 9: mod_base = OTHER; note = 2'-fluoroguanosine-3'-phosphate
  modified_base 10: mod_base = OTHER; note = 2'-fluoroadenosine-3'-phosphate
  modified_base 11: mod_base = OTHER; note = 2'-fluorocytidine-3'-phosphate
  modified_base 12: mod_base = OTHER; note = 2'-O-methyladenosine-3'-phosphate
  modified_base 13: mod_base = OTHER; note = 2'-O-methylguanosine-3'-phosphate
  modified_base 14: mod_base = OTHER; note = 2'-O-methylguanosine-3'-phosphate
  modified_base 15: mod_base = OTHER; note = 2'-O-methyluridine-3'-phosphate
  modified_base 16: mod_base = OTHER; note = 2'-O-methyluridine-3'-phosphate
  modified_base 17: mod_base = OTHER; note = 2'-O-methylcytidine-3'-phosphate
  modified_base 18: mod_base = OTHER; note = 2'-O-methyladenosine-3'-phosphate
  modified_base 19: mod_base = OTHER; note = 2'-O-methyluridine-3'-phosphate
  modified_base 20: mod_base = OTHER; note = 2'-O-methylguanosine-3'-phosphate
  modified_base 21: mod_base = OTHER; note = 2'-O-methyluridine-3'-phosphate N-[tris(GalNAc-alkyl)-amidodecanoyl)]-4-hydroxyprolinol (Hyp-(GalNAc-alkyl)3)
agaagattgacaggttcatgt

SEQ ID NO: 2103 - RNA, 21 nt, synthetic construct
  source 1..21: mol_type = other RNA
  modified_base 1: mod_base = OTHER; note = 2'-O-methylguanosine-3'-phosphorothioate
  modified_base 2: mod_base = OTHER; note = 2'-O-methyladenosine-3'-phosphorothioate
  modified_base 3: mod_base = OTHER; note = 2'-O-methyladenosine-3'-phosphate
  modified_base 4: mod_base = OTHER; note = 2'-O-methylguanosine-3'-phosphate
  modified_base 5: mod_base = OTHER; note = 2'-O-methyladenosine-3'-phosphate
  modified_base 6: mod_base = OTHER; note = 2'-O-methyluridine-3'-phosphate
  modified_base 7: mod_base = OTHER; note = 2'-O-methyluridine-3'-phosphate
  modified_base 8: mod_base = OTHER; note = 2'-O-methylguanosine-3'-phosphate
  modified_base 9: mod_base = OTHER; note = 2'-fluoroadenosine-3'-phosphate
  modified_base 10: mod_base = OTHER; note = 2'-fluorocytidine-3'-phosphate
  modified_base 11: mod_base = OTHER; note = 2'-fluoroadenosine-3'-phosphate
  modified_base 12: mod_base = OTHER; note = 2'-O-methylguanosine-3'-phosphate
  modified_base 13: mod_base = OTHER; note = 2'-O-methylguanosine-3'-phosphate
  modified_base 14: mod_base = OTHER; note = 2'-O-methyluridine-3'-phosphate
  modified_base 15: mod_base = OTHER; note = 2'-O-methyluridine-3'-phosphate
  modified_base 16: mod_base = OTHER; note = 2'-O-methylcytidine-3'-phosphate
  modified_base 17: mod_base = OTHER; note = 2'-O-methyladenosine-3'-phosphate
  modified_base 18: mod_base = OTHER; note = 2'-O-methyluridine-3'-phosphate
  modified_base 19: mod_base = OTHER; note = 2'-O-methylguanosine-3'-phosphate
  modified_base 20: mod_base = OTHER; note = 2'-O-methylcytidine-3'-phosphate
  modified_base 21: mod_base = OTHER; note = 2'-O-methyluridine-3'-phosphate N-[tris(GalNAc-alkyl)-amidodecanoyl)]-4-hydroxyprolinol (Hyp-(GalNAc-alkyl)3)
gaagattgacaggttcatgct

SEQ ID NO: 2104 - RNA, 21 nt, synthetic construct
  source 1..21: mol_type = other RNA
  modified_base 1: mod_base = OTHER; note = 2'-O-methyladenosine-3'-phosphorothioate
  modified_base 2: mod_base = OTHER; note = 2'-O-methyladenosine-3'-phosphorothioate
  modified_base 3: mod_base = OTHER; note = 2'-O-methylguanosine-3'-phosphate
  modified_base 4: mod_base = OTHER; note = 2'-O-methyladenosine-3'-phosphate
  modified_base 5: mod_base = OTHER; note = 2'-O-methyluridine-3'-phosphate
  modified_base 6: mod_base = OTHER; note = 2'-O-methyluridine-3'-phosphate
  modified_base 7: mod_base = OTHER; note = 2'-O-methylguanosine-3'-phosphate
  modified_base 8: mod_base = OTHER; note = 2'-O-methyladenosine-3'-phosphate
  modified_base 9: mod_base = OTHER; note = 2'-fluorocytidine-3'-phosphate
  modified_base 10: mod_base = OTHER; note = 2'-fluoroadenosine-3'-phosphate
  modified_base 11: mod_base = OTHER; note = 2'-fluoroguanosine-3'-phosphate
  modified_base 12: mod_base = OTHER; note = 2'-O-methylguanosine-3'-phosphate
  modified_base 13: mod_base = OTHER; note = 2'-O-methyluridine-3'-phosphate
  modified_base 14: mod_base = OTHER; note = 2'-O-methyluridine-3'-phosphate
  modified_base 15: mod_base = OTHER; note = 2'-O-methylcytidine-3'-phosphate
  modified_base 16: mod_base = OTHER; note = 2'-O-methyladenosine-3'-phosphate
  modified_base 17: mod_base = OTHER; note = 2'-O-methyluridine-3'-phosphate
  modified_base 18: mod_base = OTHER; note = 2'-O-methylguanosine-3'-phosphate
  modified_base 19: mod_base = OTHER; note = 2'-O-methylcytidine-3'-phosphate
  modified_base 20: mod_base = OTHER; note = 2'-O-methyladenosine-3'-phosphate
  modified_base 21: mod_base = OTHER; note = 2'-O-methyluridine-3'-phosphate N-[tris(GalNAc-alkyl)-amidodecanoyl)]-4-hydroxyprolinol (Hyp-(GalNAc-alkyl)3)
aagattgacaggttcatgcat

SEQ ID NO: 2105 - RNA, 21 nt, synthetic construct
  source 1..21: mol_type = other RNA
  modified_base 1: mod_base = OTHER; note = 2'-O-methyladenosine-3'-phosphorothioate
  modified_base 2: mod_base = OTHER; note = 2'-O-methylguanosine-3'-phosphorothioate
  modified_base 3: mod_base = OTHER; note = 2'-O-methyladenosine-3'-phosphate
  modified_base 4: mod_base = OTHER; note = 2'-O-methyluridine-3'-phosphate
  modified_base 5: mod_base = OTHER; note = 2'-O-methyluridine-3'-phosphate
  modified_base 6: mod_base = OTHER; note = 2'-O-methylguanosine-3'-phosphate
  modified_base 7: mod_base = OTHER; note = 2'-O-methyladenosine-3'-phosphate
  modified_base 8: mod_base = OTHER; note = 2'-O-methylcytidine-3'-phosphate
  modified_base 9: mod_base = OTHER; note = 2'-fluoroadenosine-3'-phosphate
  modified_base 10: mod_base = OTHER; note = 2'-fluoroguanosine-3'-phosphate
  modified_base 11: mod_base = OTHER; note = 2'-fluoroguanosine-3'-phosphate
  modified_base 12: mod_base = OTHER; note = 2'-O-methyluridine-3'-phosphate
  modified_base 13: mod_base = OTHER; note = 2'-O-methyluridine-3'-phosphate
  modified_base 14: mod_base = OTHER; note = 2'-O-methylcytidine-3'-phosphate
  modified_base 15: mod_base = OTHER; note = 2'-O-methyladenosine-3'-phosphate
  modified_base 16: mod_base = OTHER; note = 2'-O-methyluridine-3'-phosphate
  modified_base 17: mod_base = OTHER; note = 2'-O-methylguanosine-3'-phosphate
  modified_base 18: mod_base = OTHER; note = 2'-O-methylcytidine-3'-phosphate
  modified_base 19: mod_base = OTHER; note = 2'-O-methyladenosine-3'-phosphate
  modified_base 20: mod_base = OTHER; note = 2'-O-methylguanosine-3'-phosphate
  modified_base 21: mod_base = OTHER; note = 2'-O-methyluridine-3'-phosphate N-[tris(GalNAc-alkyl)-amidodecanoyl)]-4-hydroxyprolinol (Hyp-(GalNAc-alkyl)3)
agattgacaggttcatgcagt

SEQ ID NO: 2106 - RNA, 21 nt, synthetic construct
  source 1..21: mol_type = other RNA
  modified_base 1: mod_base = OTHER; note = 2'-O-methylguanosine-3'-phosphorothioate
  modified_base 2: mod_base = OTHER; note = 2'-O-methyladenosine-3'-phosphorothioate
  modified_base 3: mod_base = OTHER; note = 2'-O-methyluridine-3'-phosphate
  modified_base 4: mod_base = OTHER; note = 2'-O-methyluridine-3'-phosphate
  modified_base 5: mod_base = OTHER; note = 2'-O-methylguanosine-3'-phosphate
  modified_base 6: mod_base = OTHER; note = 2'-O-methyladenosine-3'-phosphate
  modified_base 7: mod_base = OTHER; note = 2'-O-methylcytidine-3'-phosphate
  modified_base 8: mod_base = OTHER; note = 2'-O-methyladenosine-3'-phosphate
  modified_base 9: mod_base = OTHER; note = 2'-fluoroguanosine-3'-phosphate
  modified_base 10: mod_base = OTHER; note = 2'-fluoroguanosine-3'-phosphate
  modified_base 11: mod_base = OTHER; note = 2'-fluorouridine-3'-phosphate
  modified_base 12: mod_base = OTHER; note = 2'-O-methyluridine-3'-phosphate
  modified_base 13: mod_base = OTHER; note = 2'-O-methylcytidine-3'-phosphate
  modified_base 14: mod_base = OTHER; note = 2'-O-methyladenosine-3'-phosphate
  modified_base 15: mod_base = OTHER; note = 2'-O-methyluridine-3'-phosphate
  modified_base 16: mod_base = OTHER; note = 2'-O-methylguanosine-3'-phosphate
  modified_base 17: mod_base = OTHER; note = 2'-O-methylcytidine-3'-phosphate
  modified_base 18: mod_base = OTHER; note = 2'-O-methyladenosine-3'-phosphate
  modified_base 19: mod_base = OTHER; note = 2'-O-methylguanosine-3'-phosphate
  modified_base 20: mod_base = OTHER; note = 2'-O-methylguanosine-3'-phosphate
  modified_base 21: mod_base = OTHER; note = 2'-O-methyluridine-3'-phosphate N-[tris(GalNAc-alkyl)-amidodecanoyl)]-4-hydroxyprolinol (Hyp-(GalNAc-alkyl)3)
gattgacaggttcatgcaggt

SEQ ID NO: 2107 - RNA, 21 nt, synthetic construct
  source 1..21: mol_type = other RNA
  modified_base 1: mod_base = OTHER; note = 2'-O-methyladenosine-3'-phosphorothioate
  modified_base 2: mod_base = OTHER; note = 2'-O-methyluridine-3'-phosphorothioate
  modified_base 3: mod_base = OTHER; note = 2'-O-methyluridine-3'-phosphate
  modified_base 4: mod_base = OTHER; note = 2'-O-methylguanosine-3'-phosphate
  modified_base 5: mod_base = OTHER; note = 2'-O-methyladenosine-3'-phosphate
  modified_base 6: mod_base = OTHER; note = 2'-O-methylcytidine-3'-phosphate
  modified_base 7: mod_base = OTHER; note = 2'-O-methyladenosine-3'-phosphate
  modified_base 8: mod_base = OTHER; note = 2'-O-methylguanosine-3'-phosphate
  modified_base 9: mod_base = OTHER; note = 2'-fluoroguanosine-3'-phosphate
  modified_base 10: mod_base = OTHER; note = 2'-fluorouridine-3'-phosphate
  modified_base 11: mod_base = OTHER; note = 2'-fluorouridine-3'-phosphate
  modified_base 12: mod_base = OTHER; note = 2'-O-methylcytidine-3'-phosphate
  modified_base 13: mod_base = OTHER; note = 2'-O-methyladenosine-3'-phosphate
  modified_base 14: mod_base = OTHER; note = 2'-O-methyluridine-3'-phosphate
  modified_base 15: mod_base = OTHER; note = 2'-O-methylguanosine-3'-phosphate
  modified_base 16: mod_base = OTHER; note = 2'-O-methylcytidine-3'-phosphate
  modified_base 17: mod_base = OTHER; note = 2'-O-methyladenosine-3'-phosphate
  modified_base 18: mod_base = OTHER; note = 2'-O-methylguanosine-3'-phosphate
  modified_base 19: mod_base = OTHER; note = 2'-O-methylguanosine-3'-phosphate
  modified_base 20: mod_base = OTHER; note = 2'-O-methylcytidine-3'-phosphate
  modified_base 21: mod_base = OTHER; note = 2'-O-methyluridine-3'-phosphate N-[tris(GalNAc-alkyl)-amidodecanoyl)]-4-hydroxyprolinol (Hyp-(GalNAc-alkyl)3)
attgacaggttcatgcaggct

SEQ ID NO: 2108 - RNA, 21 nt, synthetic construct
  source 1..21: mol_type = other RNA
  modified_base 1: mod_base = OTHER; note = 2'-O-methyluridine-3'-phosphorothioate
  modified_base 2: mod_base = OTHER; note = 2'-O-methyluridine-3'-phosphorothioate
  modified_base 3: mod_base = OTHER; note = 2'-O-methylguanosine-3'-phosphate
  modified_base 4: mod_base = OTHER; note = 2'-O-methyladenosine-3'-phosphate
  modified_base 5: mod_base = OTHER; note = 2'-O-methylcytidine-3'-phosphate
  modified_base 6: mod_base = OTHER; note = 2'-O-methyladenosine-3'-phosphate
  modified_base 7: mod_base = OTHER; note = 2'-O-methylguanosine-3'-phosphate
  modified_base 8: mod_base = OTHER; note = 2'-O-methylguanosine-3'-phosphate
  modified_base 9: mod_base = OTHER; note = 2'-fluorouridine-3'-phosphate
  modified_base 10: mod_base = OTHER; note = 2'-fluorouridine-3'-phosphate
  modified_base 11: mod_base = OTHER; note = 2'-fluorocytidine-3'-phosphate
  modified_base 12: mod_base = OTHER; note = 2'-O-methyladenosine-3'-phosphate
  modified_base 13: mod_base = OTHER; note = 2'-O-methyluridine-3'-phosphate
  modified_base 14: mod_base = OTHER; note = 2'-O-methylguanosine-3'-phosphate
  modified_base 15: mod_base = OTHER; note = 2'-O-methylcytidine-3'-phosphate
  modified_base 16: mod_base = OTHER; note = 2'-O-methyladenosine-3'-phosphate
  modified_base 17: mod_base = OTHER; note = 2'-O-methylguanosine-3'-phosphate
  modified_base 18: mod_base = OTHER; note = 2'-O-methylguanosine-3'-phosphate
  modified_base 19: mod_base = OTHER; note = 2'-O-methylcytidine-3'-phosphate
  modified_base 20: mod_base = OTHER; note = 2'-O-methyluridine-3'-phosphate
  modified_base 21: mod_base = OTHER; note = 2'-O-methyluridine-3'-phosphate N-[tris(GalNAc-alkyl)-amidodecanoyl)]-4-hydroxyprolinol (Hyp-(GalNAc-alkyl)3)
ttgacaggttcatgcaggctt

SEQ ID NO: 2109 - RNA, 21 nt, synthetic construct
  source 1..21: mol_type = other RNA
  modified_base 1: mod_base = OTHER; note = 2'-O-methyluridine-3'-phosphorothioate
  modified_base 2: mod_base = OTHER; note = 2'-O-methylguanosine-3'-phosphorothioate
  modified_base 3: mod_base = OTHER; note = 2'-O-methyladenosine-3'-phosphate
  modified_base 4: mod_base = OTHER; note = 2'-O-methylcytidine-3'-phosphate
  modified_base 5: mod_base = OTHER; note = 2'-O-methyladenosine-3'-phosphate
  modified_base 6: mod_base = OTHER; note = 2'-O-methylguanosine-3'-phosphate
  modified_base 7: mod_base = OTHER; note = 2'-O-methylguanosine-3'-phosphate
  modified_base 8: mod_base = OTHER; note = 2'-O-methyluridine-3'-phosphate
  modified_base 9: mod_base = OTHER; note = 2'-fluorouridine-3'-phosphate
  modified_base 10: mod_base = OTHER; note = 2'-fluorocytidine-3'-phosphate
  modified_base 11: mod_base = OTHER; note = 2'-fluoroadenosine-3'-phosphate
  modified_base 12: mod_base = OTHER; note = 2'-O-methyluridine-3'-phosphate
  modified_base 13: mod_base = OTHER; note = 2'-O-methylguanosine-3'-phosphate
  modified_base 14: mod_base = OTHER; note = 2'-O-methylcytidine-3'-phosphate
  modified_base 15: mod_base = OTHER; note = 2'-O-methyladenosine-3'-phosphate
  modified_base 16: mod_base = OTHER; note = 2'-O-methylguanosine-3'-phosphate
  modified_base 17: mod_base = OTHER; note = 2'-O-methylguanosine-3'-phosphate
  modified_base 18: mod_base = OTHER; note = 2'-O-methylcytidine-3'-phosphate
  modified_base 19: mod_base = OTHER; note = 2'-O-methyluridine-3'-phosphate
  modified_base 20: mod_base = OTHER; note = 2'-O-methylguanosine-3'-phosphate
  modified_base 21: mod_base = OTHER; note = 2'-O-methyluridine-3'-phosphate N-[tris(GalNAc-alkyl)-amidodecanoyl)]-4-hydroxyprolinol (Hyp-(GalNAc-alkyl)3)
tgacaggttcatgcaggctgt

SEQ ID NO: 2110 - RNA, 21 nt, synthetic construct
  source 1..21: mol_type = other RNA
  modified_base 1: mod_base = OTHER; note = 2'-O-methylguanosine-3'-phosphorothioate
  modified_base 2: mod_base = OTHER; note = 2'-O-methyladenosine-3'-phosphorothioate
  modified_base 3: mod_base = OTHER; note = 2'-O-methylcytidine-3'-phosphate
  modified_base 4: mod_base = OTHER; note = 2'-O-methyladenosine-3'-phosphate
  modified_base 5: mod_base = OTHER; note = 2'-O-methylguanosine-3'-phosphate
  modified_base 6: mod_base = OTHER; note = 2'-O-methylguanosine-3'-phosphate
  modified_base 7: mod_base = OTHER; note = 2'-O-methyluridine-3'-phosphate
  modified_base 8: mod_base = OTHER; note = 2'-O-methyluridine-3'-phosphate
  modified_base 9: mod_base = OTHER; note = 2'-fluorocytidine-3'-phosphate
  modified_base 10: mod_base = OTHER; note = 2'-fluoroadenosine-3'-phosphate
  modified_base 11: mod_base = OTHER; note = 2'-fluorouridine-3'-phosphate
  modified_base 12: mod_base = OTHER; note = 2'-O-methylguanosine-3'-phosphate
  modified_base 13: mod_base = OTHER; note = 2'-O-methylcytidine-3'-phosphate
  modified_base 14: mod_base = OTHER; note = 2'-O-methyladenosine-3'-phosphate
  modified_base 15: mod_base = OTHER; note = 2'-O-methylguanosine-3'-phosphate
  modified_base 16: mod_base = OTHER; note = 2'-O-methylguanosine-3'-phosphate
  modified_base 17: mod_base = OTHER; note = 2'-O-methylcytidine-3'-phosphate
  modified_base 18: mod_base = OTHER; note = 2'-O-methyluridine-3'-phosphate
  modified_base 19: mod_base = OTHER; note = 2'-O-methylguanosine-3'-phosphate
  modified_base 20: mod_base = OTHER; note = 2'-O-methyluridine-3'-phosphate
  modified_base 21: mod_base = OTHER; note = 2'-O-methyluridine-3'-phosphate N-[tris(GalNAc-alkyl)-amidodecanoyl)]-4-hydroxyprolinol (Hyp-(GalNAc-alkyl)3)
gacaggttcatgcaggctgtt

SEQ ID NO: 2111 - RNA, 21 nt, synthetic construct
  source 1..21: mol_type = other RNA
  modified_base 1: mod_base = OTHER; note = 2'-O-methyladenosine-3'-phosphorothioate
  modified_base 2: mod_base = OTHER; note = 2'-O-methylcytidine-3'-phosphorothioate
  modified_base 3: mod_base = OTHER; note = 2'-O-methyladenosine-3'-phosphate
  modified_base 4: mod_base = OTHER; note = 2'-O-methylguanosine-3'-phosphate
  modified_base 5: mod_base = OTHER; note = 2'-O-methylguanosine-3'-phosphate
  modified_base 6: mod_base = OTHER; note = 2'-O-methyluridine-3'-phosphate
  modified_base 7: mod_base = OTHER; note = 2'-O-methyluridine-3'-phosphate
  modified_base 8: mod_base = OTHER; note = 2'-O-methylcytidine-3'-phosphate
  modified_base 9: mod_base = OTHER; note = 2'-fluoroadenosine-3'-phosphate
  modified_base 10: mod_base = OTHER; note = 2'-fluorouridine-3'-phosphate
  modified_base 11: mod_base = OTHER; note = 2'-fluoroguanosine-3'-phosphate
  modified_base 12: mod_base = OTHER; note = 2'-O-methylcytidine-3'-phosphate
  modified_base 13: mod_base = OTHER; note = 2'-O-methyladenosine-3'-phosphate
  modified_base 14: mod_base = OTHER; note = 2'-O-methylguanosine-3'-phosphate
  modified_base 15: mod_base = OTHER; note = 2'-O-methylguanosine-3'-phosphate
  modified_base 16: mod_base = OTHER; note = 2'-O-methylcytidine-3'-phosphate
  modified_base 17: mod_base = OTHER; note = 2'-O-methyluridine-3'-phosphate
  modified_base 18: mod_base = OTHER; note = 2'-O-methylguanosine-3'-phosphate
  modified_base 19: mod_base = OTHER; note = 2'-O-methyluridine-3'-phosphate
  modified_base 20: mod_base = OTHER; note = 2'-O-methylguanosine-3'-phosphate
  modified_base 21: mod_base = OTHER; note = 2'-O-methyluridine-3'-phosphate N-[tris(GalNAc-alkyl)-amidodecanoyl)]-4-hydroxyprolinol (Hyp-(GalNAc-alkyl)3)
acaggttcatgcaggctgtgt

SEQ ID NO: 2112 - RNA, 21 nt, synthetic construct
  source 1..21: mol_type = other RNA
  modified_base 1: mod_base = OTHER; note = 2'-O-methylguanosine-3'-phosphorothioate
  modified_base 2: mod_base = OTHER; note = 2'-O-methyluridine-3'-phosphorothioate
  modified_base 3: mod_base = OTHER; note = 2'-O-methyluridine-3'-phosphate
  modified_base 4: mod_base = OTHER; note = 2'-O-methylcytidine-3'-phosphate
  modified_base 5: mod_base = OTHER; note = 2'-O-methyladenosine-3'-phosphate
  modified_base 6: mod_base = OTHER; note = 2'-O-methyluridine-3'-phosphate
  modified_base 7: mod_base = OTHER; note = 2'-O-methylguanosine-3'-phosphate
  modified_base 8: mod_base = OTHER; note = 2'-O-methylcytidine-3'-phosphate
  modified_base 9: mod_base = OTHER; note = 2'-fluoroadenosine-3'-phosphate
  modified_base 10: mod_base = OTHER; note = 2'-fluoroguanosine-3'-phosphate
  modified_base 11: mod_base = OTHER; note = 2'-fluoroguanosine-3'-phosphate
  modified_base 12: mod_base = OTHER; note = 2'-O-methylcytidine-3'-phosphate
  modified_base 13: mod_base = OTHER; note = 2'-O-methyluridine-3'-phosphate
  modified_base 14: mod_base = OTHER; note = 2'-O-methylguanosine-3'-phosphate
  modified_base 15: mod_base = OTHER; note = 2'-O-methyluridine-3'-phosphate
  modified_base 16: mod_base = OTHER; note = 2'-O-methylguanosine-3'-phosphate
  modified_base 17: mod_base = OTHER; note = 2'-O-methyladenosine-3'-phosphate
  modified_base 18: mod_base = OTHER; note = 2'-O-methylcytidine-3'-phosphate
  modified_base 19: mod_base = OTHER; note = 2'-O-methyladenosine-3'-phosphate
  modified_base 20: mod_base = OTHER; note = 2'-O-methylguanosine-3'-phosphate
  modified_base 21: mod_base = OTHER; note = 2'-O-methyluridine-3'-phosphate N-[tris(GalNAc-alkyl)-amidodecanoyl)]-4-hydroxyprolinol (Hyp-(GalNAc-alkyl)3)
gttcatgcaggctgtgacagt

SEQ ID NO: 2113 - RNA, 21 nt, synthetic construct
  source 1..21: mol_type = other RNA
  modified_base 1: mod_base = OTHER; note = 2'-O-methyladenosine-3'-phosphorothioate
  modified_base 2: mod_base = OTHER; note = 2'-O-methyluridine-3'-phosphorothioate
  modified_base 3: mod_base = OTHER; note = 2'-O-methylguanosine-3'-phosphate
  modified_base 4: mod_base = OTHER; note = 2'-O-methylcytidine-3'-phosphate
  modified_base 5: mod_base = OTHER; note = 2'-O-methyladenosine-3'-phosphate
  modified_base 6: mod_base = OTHER; note = 2'-O-methylguanosine-3'-phosphate
  modified_base 7: mod_base = OTHER; note = 2'-O-methylguanosine-3'-phosphate
  modified_base 8: mod_base = OTHER; note = 2'-O-methylcytidine-3'-phosphate
  modified_base 9: mod_base = OTHER; note = 2'-fluorouridine-3'-phosphate
  modified_base 10: mod_base = OTHER; note = 2'-fluoroguanosine-3'-phosphate
  modified_base 11: mod_base = OTHER; note = 2'-fluorouridine-3'-phosphate
  modified_base 12: mod_base = OTHER; note = 2'-O-methylguanosine-3'-phosphate
  modified_base 13: mod_base = OTHER; note = 2'-O-methyladenosine-3'-phosphate
  modified_base 14: mod_base = OTHER; note = 2'-O-methylcytidine-3'-phosphate
  modified_base 15: mod_base = OTHER; note = 2'-O-methyladenosine-3'-phosphate
  modified_base 16: mod_base = OTHER; note = 2'-O-methylguanosine-3'-phosphate
  modified_base 17: mod_base = OTHER; note = 2'-O-methylguanosine-3'-phosphate
  modified_base 18: mod_base = OTHER; note = 2'-O-methyladenosine-3'-phosphate
  modified_base 19: mod_base = OTHER; note = 2'-O-methyluridine-3'-phosphate
  modified_base 20: mod_base = OTHER; note = 2'-O-methylguanosine-3'-phosphate
  modified_base 21: mod_base = OTHER; note = 2'-O-methyluridine-3'-phosphate N-[tris(GalNAc-alkyl)-amidodecanoyl)]-4-hydroxyprolinol (Hyp-(GalNAc-alkyl)3)
atgcaggctgtgacaggatgt

SEQ ID NO: 2114 - RNA, 21 nt, synthetic construct
  source 1..21: mol_type = other RNA
  modified_base 1: mod_base = OTHER; note = 2'-O-methylguanosine-3'-phosphorothioate
  modified_base 2: mod_base = OTHER; note = 2'-O-methylcytidine-3'-phosphorothioate
  modified_base 3: mod_base = OTHER; note = 2'-O-methyladenosine-3'-phosphate
  modified_base 4: mod_base = OTHER; note = 2'-O-methylguanosine-3'-phosphate
  modified_base 5: mod_base = OTHER; note = 2'-O-methylguanosine-3'-phosphate
  modified_base 6: mod_base = OTHER; note = 2'-O-methylcytidine-3'-phosphate
  modified_base 7: mod_base = OTHER; note = 2'-O-methyluridine-3'-phosphate
  modified_base 8: mod_base = OTHER; note = 2'-O-methylguanosine-3'-phosphate
  modified_base 9: mod_base = OTHER; note = 2'-fluorouridine-3'-phosphate
  modified_base 10: mod_base = OTHER; note = 2'-fluoroguanosine-3'-phosphate
  modified_base 11: mod_base = OTHER; note = 2'-fluoroadenosine-3'-phosphate
  modified_base 12: mod_base = OTHER; note = 2'-O-methylcytidine-3'-phosphate
  modified_base 13: mod_base = OTHER; note = 2'-O-methyladenosine-3'-phosphate
  modified_base 14: mod_base = OTHER; note = 2'-O-methylguanosine-3'-phosphate
  modified_base 15: mod_base = OTHER; note = 2'-O-methylguanosine-3'-phosphate
  modified_base 16: mod_base = OTHER; note = 2'-O-methyladenosine-3'-phosphate
  modified_base 17: mod_base = OTHER; note = 2'-O-methyluridine-3'-phosphate
  modified_base 18: mod_base = OTHER; note = 2'-O-methylguanosine-3'-phosphate
  modified_base 19: mod_base = OTHER; note = 2'-O-methylguanosine-3'-phosphate
  modified_base 20: mod_base = OTHER; note = 2'-O-methyladenosine-3'-phosphate
  modified_base 21: mod_base = OTHER; note = 2'-O-methyluridine-3'-phosphate N-[tris(GalNAc-alkyl)-amidodecanoyl)]-4-hydroxyprolinol (Hyp-(GalNAc-alkyl)3)
gcaggctgtgacaggatggat

SEQ ID NO: 2115 - RNA, 21 nt, synthetic construct
  source 1..21: mol_type = other RNA
  modified_base 1: mod_base = OTHER; note = 2'-O-methylcytidine-3'-phosphorothioate
  modified_base 2: mod_base = OTHER; note = 2'-O-methyladenosine-3'-phosphorothioate
  modified_base 3: mod_base = OTHER; note = 2'-O-methylguanosine-3'-phosphate
  modified_base 4: mod_base = OTHER; note = 2'-O-methylguanosine-3'-phosphate
  modified_base 5: mod_base = OTHER; note = 2'-O-methylcytidine-3'-phosphate
  modified_base 6: mod_base = OTHER; note = 2'-O-methyluridine-3'-phosphate
  modified_base 7: mod_base = OTHER; note = 2'-O-methylguanosine-3'-phosphate
  modified_base 8: mod_base = OTHER; note = 2'-O-methyluridine-3'-phosphate
  modified_base 9: mod_base = OTHER; note = 2'-fluoroguanosine-3'-phosphate
  modified_base 10: mod_base = OTHER; note = 2'-fluoroadenosine-3'-phosphate
  modified_base 11: mod_base = OTHER; note = 2'-fluorocytidine-3'-phosphate
  modified_base 12: mod_base = OTHER; note = 2'-O-methyladenosine-3'-phosphate
  modified_base 13: mod_base = OTHER; note = 2'-O-methylguanosine-3'-phosphate
  modified_base 14: mod_base = OTHER; note = 2'-O-methylguanosine-3'-phosphate
  modified_base 15: mod_base = OTHER; note = 2'-O-methyladenosine-3'-phosphate
  modified_base 16: mod_base = OTHER; note = 2'-O-methyluridine-3'-phosphate
  modified_base 17: mod_base = OTHER; note = 2'-O-methylguanosine-3'-phosphate
  modified_base 18: mod_base = OTHER; note = 2'-O-methylguanosine-3'-phosphate
  modified_base 19: mod_base = OTHER; note = 2'-O-methyladenosine-3'-phosphate
  modified_base 20: mod_base = OTHER; note = 2'-O-methyladenosine-3'-phosphate
  modified_base 21: mod_base = OTHER; note = 2'-O-methyluridine-3'-phosphate N-[tris(GalNAc-alkyl)-amidodecanoyl)]-4-hydroxyprolinol (Hyp-(GalNAc-alkyl)3)
caggctgtgacaggatggaat

SEQ ID NO: 2116 - RNA, 21 nt, synthetic construct
  source 1..21: mol_type = other RNA
  modified_base 1: mod_base = OTHER; note = 2'-O-methylguanosine-3'-phosphorothioate
  modified_base 2: mod_base = OTHER; note = 2'-O-methylcytidine-3'-phosphorothioate
  modified_base 3: mod_base = OTHER; note = 2'-O-methyluridine-3'-phosphate
  modified_base 4: mod_base = OTHER; note = 2'-O-methyluridine-3'-phosphate
  modified_base 5: mod_base = OTHER; note = 2'-O-methyluridine-3'-phosphate
  modified_base 6: mod_base = OTHER; note = 2'-O-methylcytidine-3'-phosphate
  modified_base 7: mod_base = OTHER; note = 2'-O-methyladenosine-3'-phosphate
  modified_base 8: mod_base = OTHER; note = 2'-O-methyladenosine-3'-phosphate
  modified_base 9: mod_base = OTHER; note = 2'-fluorocytidine-3'-phosphate
  modified_base 10: mod_base = OTHER; note = 2'-fluoroadenosine-3'-phosphate
  modified_base 11: mod_base = OTHER; note = 2'-fluorocytidine-3'-phosphate
  modified_base 12: mod_base = OTHER; note = 2'-O-methylcytidine-3'-phosphate
  modified_base 13: mod_base = OTHER; note = 2'-O-methyluridine-3'-phosphate
  modified_base 14: mod_base = OTHER; note = 2'-O-methyladenosine-3'-phosphate
  modified_base 15: mod_base = OTHER; note = 2'-O-methylcytidine-3'-phosphate
  modified_base 16: mod_base = OTHER; note = 2'-O-methylguanosine-3'-phosphate
  modified_base 17: mod_base = OTHER; note = 2'-O-methyluridine-3'-phosphate
  modified_base 18: mod_base = OTHER; note = 2'-O-methylcytidine-3'-phosphate
  modified_base 19: mod_base = OTHER; note = 2'-O-methylcytidine-3'-phosphate
  modified_base 20: mod_base = OTHER; note = 2'-O-methyladenosine-3'-phosphate
  modified_base 21: mod_base = OTHER; note = 2'-O-methyluridine-3'-phosphate N-[tris(GalNAc-alkyl)-amidodecanoyl)]-4-hydroxyprolinol (Hyp-(GalNAc-alkyl)3)
gctttcaacacctacgtccat

SEQ ID NO: 2117 - RNA, 21 nt, synthetic construct
  source 1..21: mol_type = other RNA
  modified_base 1: mod_base = OTHER; note = 2'-O-methylguanosine-3'-phosphorothioate
  modified_base 2: mod_base = OTHER; note = 2'-O-methyladenosine-3'-phosphorothioate
  modified_base 3: mod_base = OTHER; note = 2'-O-methylguanosine-3'-phosphate
  modified_base 4: mod_base = OTHER; note = 2'-O-methyluridine-3'-phosphate
  modified_base 5: mod_base = OTHER; note = 2'-O-methyluridine-3'-phosphate
  modified_base 6: mod_base = OTHER; note = 2'-O-methylcytidine-3'-phosphate
  modified_base 7: mod_base = OTHER; note = 2'-O-methyluridine-3'-phosphate
  modified_base 8: mod_base = OTHER; note = 2'-O-methylguanosine-3'-phosphate
  modified_base 9: mod_base = OTHER; note = 2'-fluoroguanosine-3'-phosphate
  modified_base 10: mod_base = OTHER; note = 2'-fluoroguanosine-3'-phosphate
  modified_base 11: mod_base = OTHER; note = 2'-fluorouridine-3'-phosphate
  modified_base 12: mod_base = OTHER; note = 2'-O-methylguanosine-3'-phosphate
  modified_base 13: mod_base = OTHER; note = 2'-O-methylguanosine-3'-phosphate
  modified_base 14: mod_base = OTHER; note = 2'-O-methyladenosine-3'-phosphate
  modified_base 15: mod_base = OTHER; note = 2'-O-methylcytidine-3'-phosphate
  modified_base 16: mod_base = OTHER; note = 2'-O-methyladenosine-3'-phosphate
  modified_base 17: mod_base = OTHER; note = 2'-O-methyladenosine-3'-phosphate
  modified_base 18: mod_base = OTHER; note = 2'-O-methylcytidine-3'-phosphate
  modified_base 19: mod_base = OTHER; note = 2'-O-methyladenosine-3'-phosphate
  modified_base 20: mod_base = OTHER; note = 2'-O-methylguanosine-3'-phosphate
  modified_base 21: mod_base = OTHER; note = 2'-O-methyluridine-3'-phosphate N-[tris(GalNAc-alkyl)-amidodecanoyl)]-4-hydroxyprolinol (Hyp-(GalNAc-alkyl)3)
gagttctgggtggacaacagt

SEQ ID NO: 2118 - RNA, 21 nt, synthetic construct
  source 1..21: mol_type = other RNA
  modified_base 1: mod_base = OTHER; note = 2'-O-methylguanosine-3'-phosphorothioate
  modified_base 2: mod_base = OTHER; note = 2'-O-methylguanosine-3'-phosphorothioate
  modified_base 3: mod_base = OTHER; note = 2'-O-methyladenosine-3'-phosphate
  modified_base 4: mod_base = OTHER; note = 2'-O-methylcytidine-3'-phosphate
  modified_base 5: mod_base = OTHER; note = 2'-O-methyladenosine-3'-phosphate
  modified_base 6: mod_base = OTHER; note = 2'-O-methyladenosine-3'-phosphate
  modified_base 7: mod_base = OTHER; note = 2'-O-methylcytidine-3'-phosphate
  modified_base 8: mod_base = OTHER; note = 2'-O-methyladenosine-3'-phosphate
  modified_base 9: mod_base = OTHER; note = 2'-fluoroguanosine-3'-phosphate
  modified_base 10: mod_base = OTHER; note = 2'-fluorocytidine-3'-phosphate
  modified_base 11: mod_base = OTHER; note = 2'-fluoroadenosine-3'-phosphate
  modified_base 12: mod_base = OTHER; note = 2'-O-methylcytidine-3'-phosphate
  modified_base 13: mod_base = OTHER; note = 2'-O-methylcytidine-3'-phosphate
  modified_base 14: mod_base = OTHER; note = 2'-O-methyluridine-3'-phosphate
  modified_base 15: mod_base = OTHER; note = 2'-O-methylcytidine-3'-phosphate
  modified_base 16: mod_base = OTHER; note = 2'-O-methyladenosine-3'-phosphate
  modified_base 17: mod_base = OTHER; note = 2'-O-methylguanosine-3'-phosphate
  modified_base 18: mod_base = OTHER; note = 2'-O-methyluridine-3'-phosphate
  modified_base 19: mod_base = OTHER; note = 2'-O-methylguanosine-3'-phosphate
  modified_base 20: mod_base = OTHER; note = 2'-O-methyluridine-3'-phosphate
  modified_base 21: mod_base = OTHER; note = 2'-O-methyluridine-3'-phosphate N-[tris(GalNAc-alkyl)-amidodecanoyl)]-4-hydroxyprolinol (Hyp-(GalNAc-alkyl)3)
ggacaacagcacctcagtgtt

SEQ ID NO: 2119 - RNA, 21 nt, synthetic construct
  source 1..21: mol_type = other RNA
  modified_base 1: mod_base = OTHER; note = 2'-O-methylguanosine-3'-phosphorothioate
  modified_base 2: mod_base = OTHER; note = 2'-O-methyladenosine-3'-phosphorothioate
  modified_base 3: mod_base = OTHER; note = 2'-O-methylcytidine-3'-phosphate
  modified_base 4: mod_base = OTHER; note = 2'-O-methyladenosine-3'-phosphate
  modified_base 5: mod_base = OTHER; note = 2'-O-methyladenosine-3'-phosphate
  modified_base 6: mod_base = OTHER; note = 2'-O-methylcytidine-3'-phosphate
  modified_base 7: mod_base = OTHER; note = 2'-O-methyladenosine-3'-phosphate
  modified_base 8: mod_base = OTHER; note = 2'-O-methylguanosine-3'-phosphate
  modified_base 9: mod_base = OTHER; note = 2'-fluorocytidine-3'-phosphate
  modified_base 10: mod_base = OTHER; note = 2'-fluoroadenosine-3'-phosphate
  modified_base 11: mod_base = OTHER; note = 2'-fluorocytidine-3'-phosphate
  modified_base 12: mod_base = OTHER; note = 2'-O-methylcytidine-3'-phosphate
  modified_base 13: mod_base = OTHER; note = 2'-O-methyluridine-3'-phosphate
  modified_base 14: mod_base = OTHER; note = 2'-O-methylcytidine-3'-phosphate
  modified_base 15: mod_base = OTHER; note = 2'-O-methyladenosine-3'-phosphate
  modified_base 16: mod_base = OTHER; note = 2'-O-methylguanosine-3'-phosphate
  modified_base 17: mod_base = OTHER; note = 2'-O-methyluridine-3'-phosphate
  modified_base 18: mod_base = OTHER; note = 2'-O-methylguanosine-3'-phosphate
  modified_base 19: mod_base = OTHER; note = 2'-O-methyluridine-3'-phosphate
  modified_base 20: mod_base = OTHER; note = 2'-O-methylcytidine-3'-phosphate
  modified_base 21: mod_base = OTHER; note = 2'-O-methyluridine-3'-phosphate N-[tris(GalNAc-alkyl)-amidodecanoyl)]-4-hydroxyprolinol (Hyp-(GalNAc-alkyl)3)
gacaacagcacctcagtgtct

SEQ ID NO: 2120 - RNA, 21 nt, synthetic construct
  source 1..21: mol_type = other RNA
  modified_base 1: mod_base = OTHER; note = 2'-O-methyladenosine-3'-phosphorothioate
  modified_base 2: mod_base = OTHER; note = 2'-O-methylcytidine-3'-phosphorothioate
  modified_base 3: mod_base = OTHER; note = 2'-O-methyladenosine-3'-phosphate
  modified_base 4: mod_base = OTHER; note = 2'-O-methyladenosine-3'-phosphate
  modified_base 5: mod_base = OTHER; note = 2'-O-methylcytidine-3'-phosphate
  modified_base 6: mod_base = OTHER; note = 2'-O-methyladenosine-3'-phosphate
  modified_base 7: mod_base = OTHER; note = 2'-O-methylguanosine-3'-phosphate
  modified_base 8: mod_base = OTHER; note = 2'-O-methylcytidine-3'-phosphate
  modified_base 9: mod_base = OTHER; note = 2'-fluoroadenosine-3'-phosphate
  modified_base 10: mod_base = OTHER; note = 2'-fluorocytidine-3'-phosphate
  modified_base 11: mod_base = OTHER; note = 2'-fluorocytidine-3'-phosphate
  modified_base 12: mod_base = OTHER; note = 2'-O-methyluridine-3'-phosphate
  modified_base 13: mod_base = OTHER; note = 2'-O-methylcytidine-3'-phosphate
  modified_base 14: mod_base = OTHER; note = 2'-O-methyladenosine-3'-phosphate
  modified_base 15: mod_base = OTHER; note = 2'-O-methylguanosine-3'-phosphate
  modified_base 16: mod_base = OTHER; note = 2'-O-methyluridine-3'-phosphate
  modified_base 17: mod_base = OTHER; note = 2'-O-methylguanosine-3'-phosphate
  modified_base 18: mod_base = OTHER; note = 2'-O-methyluridine-3'-phosphate
  modified_base 19: mod_base = OTHER; note = 2'-O-methylcytidine-3'-phosphate
  modified_base 20: mod_base = OTHER; note = 2'-O-methyluridine-3'-phosphate
  modified_base 21: mod_base = OTHER; note = 2'-O-methyluridine-3'-phosphate N-[tris(GalNAc-alkyl)-amidodecanoyl)]-4-hydroxyprolinol (Hyp-(GalNAc-alkyl)3)
acaacagcacctcagtgtctt

SEQ ID NO: 2121 - RNA, 21 nt, synthetic construct
  source 1..21: mol_type = other RNA
  modified_base 1: mod_base = OTHER; note = 2'-O-methylcytidine-3'-phosphorothioate
  modified_base 2: mod_base = OTHER; note = 2'-O-methyladenosine-3'-phosphorothioate
  modified_base 3: mod_base = OTHER; note = 2'-O-methyladenosine-3'-phosphate
  modified_base 4: mod_base = OTHER; note = 2'-O-methylcytidine-3'-phosphate
  modified_base 5: mod_base = OTHER; note = 2'-O-methyladenosine-3'-phosphate
  modified_base 6: mod_base = OTHER; note = 2'-O-methylguanosine-3'-phosphate
  modified_base 7: mod_base = OTHER; note = 2'-O-methylcytidine-3'-phosphate
  modified_base 8: mod_base = OTHER; note = 2'-O-methyladenosine-3'-phosphate
  modified_base 9: mod_base = OTHER; note = 2'-fluorocytidine-3'-phosphate
  modified_base 10: mod_base = OTHER; note = 2'-fluorocytidine-3'-phosphate
  modified_base 11: mod_base = OTHER; note = 2'-fluorouridine-3'-phosphate
  modified_base 12: mod_base = OTHER; note = 2'-O-methylcytidine-3'-phosphate
  modified_base 13: mod_base = OTHER; note = 2'-O-methyladenosine-3'-phosphate
  modified_base 14: mod_base = OTHER; note = 2'-O-methylguanosine-3'-phosphate
  modified_base 15: mod_base = OTHER; note = 2'-O-methyluridine-3'-phosphate
  modified_base 16: mod_base = OTHER; note = 2'-O-methylguanosine-3'-phosphate
  modified_base 17: mod_base = OTHER; note = 2'-O-methyluridine-3'-phosphate
  modified_base 18: mod_base = OTHER; note = 2'-O-methylcytidine-3'-phosphate
  modified_base 19: mod_base = OTHER; note = 2'-O-methyluridine-3'-phosphate
  modified_base 20: mod_base = OTHER; note = 2'-O-methylguanosine-3'-phosphate
  modified_base 21: mod_base = OTHER; note = 2'-O-methyluridine-3'-phosphate N-[tris(GalNAc-alkyl)-amidodecanoyl)]-4-hydroxyprolinol (Hyp-(GalNAc-alkyl)3)
caacagcacctcagtgtctgt

SEQ ID NO: 2122 - RNA, 21 nt, synthetic construct
  source 1..21: mol_type = other RNA
  modified_base 1: mod_base = OTHER; note = 2'-O-methyladenosine-3'-phosphorothioate
  modified_base 2: mod_base = OTHER; note = 2'-O-methyladenosine-3'-phosphorothioate
  modified_base 3: mod_base = OTHER; note = 2'-O-methylcytidine-3'-phosphate
  modified_base 4: mod_base = OTHER; note = 2'-O-methyladenosine-3'-phosphate
  modified_base 5: mod_base = OTHER; note = 2'-O-methylguanosine-3'-phosphate
  modified_base 6: mod_base = OTHER; note = 2'-O-methylcytidine-3'-phosphate
  modified_base 7: mod_base = OTHER; note = 2'-O-methyladenosine-3'-phosphate
  modified_base 8: mod_base = OTHER; note = 2'-O-methylcytidine-3'-phosphate
  modified_base 9: mod_base = OTHER; note = 2'-fluorocytidine-3'-phosphate
  modified_base 10: mod_base = OTHER; note = 2'-fluorouridine-3'-phosphate
  modified_base 11: mod_base = OTHER; note = 2'-fluorocytidine-3'-phosphate
  modified_base 12: mod_base = OTHER; note = 2'-O-methyladenosine-3'-phosphate
  modified_base 13: mod_base = OTHER; note = 2'-O-methylguanosine-3'-phosphate
  modified_base 14: mod_base = OTHER; note = 2'-O-methyluridine-3'-phosphate
  modified_base 15: mod_base = OTHER; note = 2'-O-methylguanosine-3'-phosphate
  modified_base 16: mod_base = OTHER; note = 2'-O-methyluridine-3'-phosphate
  modified_base 17: mod_base = OTHER; note = 2'-O-methylcytidine-3'-phosphate
  modified_base 18: mod_base = OTHER; note = 2'-O-methyluridine-3'-phosphate
  modified_base 19: mod_base = OTHER; note = 2'-O-methylguanosine-3'-phosphate
  modified_base 20: mod_base = OTHER; note = 2'-O-methyluridine-3'-phosphate
  modified_base 21: mod_base = OTHER; note = 2'-O-methyluridine-3'-phosphate N-[tris(GalNAc-alkyl)-amidodecanoyl)]-4-hydroxyprolinol (Hyp-(GalNAc-alkyl)3)
aacagcacctcagtgtctgtt

SEQ ID NO: 2123 - RNA, 21 nt, synthetic construct
  source 1..21: mol_type = other RNA
  modified_base 1: mod_base = OTHER; note = 2'-O-methyladenosine-3'-phosphorothioate
  modified_base 2: mod_base = OTHER; note = 2'-O-methyluridine-3'-phosphorothioate
  modified_base 3: mod_base = OTHER; note = 2'-O-methylguanosine-3'-phosphate
  modified_base 4: mod_base = OTHER; note = 2'-O-methylcytidine-3'-phosphate
  modified_base 5: mod_base = OTHER; note = 2'-O-methylcytidine-3'-phosphate
  modified_base 6: mod_base = OTHER; note = 2'-O-methyluridine-3'-phosphate
  modified_base 7: mod_base = OTHER; note = 2'-O-methylcytidine-3'-phosphate
  modified_base 8: mod_base = OTHER; note = 2'-O-methyluridine-3'-phosphate
  modified_base 9: mod_base = OTHER; note = 2'-fluoroguanosine-3'-phosphate
  modified_base 10: mod_base = OTHER; note = 2'-fluoroadenosine-3'-phosphate
  modified_base 11: mod_base = OTHER; note = 2'-fluorocytidine-3'-phosphate
  modified_base 12: mod_base = OTHER; note = 2'-O-methylcytidine-3'-phosphate
  modified_base 13: mod_base = OTHER; note = 2'-O-methyluridine-3'-phosphate
  modified_base 14: mod_base = OTHER; note = 2'-O-methylguanosine-3'-phosphate
  modified_base 15: mod_base = OTHER; note = 2'-O-methylguanosine-3'-phosphate
  modified_base 16: mod_base = OTHER; note = 2'-O-methyladenosine-3'-phosphate
  modified_base 17: mod_base = OTHER; note = 2'-O-methylcytidine-3'-phosphate
  modified_base 18: mod_base = OTHER; note = 2'-O-methyladenosine-3'-phosphate
  modified_base 19: mod_base = OTHER; note = 2'-O-methyladenosine-3'-phosphate
  modified_base 20: mod_base = OTHER; note = 2'-O-methylguanosine-3'-phosphate
  modified_base 21: mod_base = OTHER; note = 2'-O-methyluridine-3'-phosphate N-[tris(GalNAc-alkyl)-amidodecanoyl)]-4-hydroxyprolinol (Hyp-(GalNAc-alkyl)3)
atgcctctgacctggacaagt

SEQ ID NO: 2124 - RNA, 21 nt, synthetic construct
  source 1..21: mol_type = other RNA
  modified_base 1: mod_base = OTHER; note = 2'-O-methyluridine-3'-phosphorothioate
  modified_base 2: mod_base = OTHER; note = 2'-O-methylguanosine-3'-phosphorothioate
  modified_base 3: mod_base = OTHER; note = 2'-O-methylcytidine-3'-phosphate
  modified_base 4: mod_base = OTHER; note = 2'-O-methylcytidine-3'-phosphate
  modified_base 5: mod_base = OTHER; note = 2'-O-methyluridine-3'-phosphate
  modified_base 6: mod_base = OTHER; note = 2'-O-methylcytidine-3'-phosphate
  modified_base 7: mod_base = OTHER; note = 2'-O-methyluridine-3'-phosphate
  modified_base 8: mod_base = OTHER; note = 2'-O-methylguanosine-3'-phosphate
  modified_base 9: mod_base = OTHER; note = 2'-fluoroadenosine-3'-phosphate
  modified_base 10: mod_base = OTHER; note = 2'-fluorocytidine-3'-phosphate
  modified_base 11: mod_base = OTHER; note = 2'-fluorocytidine-3'-phosphate
  modified_base 12: mod_base = OTHER; note = 2'-O-methyluridine-3'-phosphate
  modified_base 13: mod_base = OTHER; note = 2'-O-methylguanosine-3'-phosphate
  modified_base 14: mod_base = OTHER; note = 2'-O-methylguanosine-3'-phosphate
  modified_base 15: mod_base = OTHER; note = 2'-O-methyladenosine-3'-phosphate
  modified_base 16: mod_base = OTHER; note = 2'-O-methylcytidine-3'-phosphate
  modified_base 17: mod_base = OTHER; note = 2'-O-methyladenosine-3'-phosphate
  modified_base 18: mod_base = OTHER; note = 2'-O-methyladenosine-3'-phosphate
  modified_base 19: mod_base = OTHER; note = 2'-O-methylguanosine-3'-phosphate
  modified_base 20: mod_base = OTHER; note = 2'-O-methylguanosine-3'-phosphate
  modified_base 21: mod_base = OTHER; note = 2'-O-methyluridine-3'-phosphate N-[tris(GalNAc-alkyl)-amidodecanoyl)]-4-hydroxyprolinol (Hyp-(GalNAc-alkyl)3)
tgcctctgacctggacaaggt

SEQ ID NO: 2125 - RNA, 21 nt, synthetic construct
  source 1..21: mol_type = other RNA
  modified_base 1: mod_base = OTHER; note = 2'-O-methyladenosine-3'-phosphorothioate
  modified_base 2: mod_base = OTHER; note = 2'-O-methyladenosine-3'-phosphorothioate
  modified_base 3: mod_base = OTHER; note = 2'-O-methylguanosine-3'-phosphate
  modified_base 4: mod_base = OTHER; note = 2'-O-methylguanosine-3'-phosphate
  modified_base 5: mod_base = OTHER; note = 2'-O-methyluridine-3'-phosphate
  modified_base 6: mod_base = OTHER; note = 2'-O-methylguanosine-3'-phosphate
  modified_base 7: mod_base = OTHER; note = 2'-O-methylguanosine-3'-phosphate
  modified_base 8: mod_base = OTHER; note = 2'-O-methyladenosine-3'-phosphate
  modified_base 9: mod_base = OTHER; note = 2'-fluoroguanosine-3'-phosphate
  modified_base 10: mod_base = OTHER; note = 2'-fluoroguanosine-3'-phosphate
  modified_base 11: mod_base = OTHER; note = 2'-fluoroguanosine-3'-phosphate
  modified_base 12: mod_base = OTHER; note = 2'-O-methyluridine-3'-phosphate
  modified_base 13: mod_base = OTHER; note = 2'-O-methylcytidine-3'-phosphate
  modified_base 14: mod_base = OTHER; note = 2'-O-methyluridine-3'-phosphate
  modified_base 15: mod_base = OTHER; note = 2'-O-methylcytidine-3'-phosphate
  modified_base 16: mod_base = OTHER; note = 2'-O-methyladenosine-3'-phosphate
  modified_base 17: mod_base = OTHER; note = 2'-O-methylcytidine-3'-phosphate
  modified_base 18: mod_base = OTHER; note = 2'-O-methyluridine-3'-phosphate
  modified_base 19: mod_base = OTHER; note = 2'-O-methyluridine-3'-phosphate
  modified_base 20: mod_base = OTHER; note = 2'-O-methyluridine-3'-phosphate
  modified_base 21: mod_base = OTHER; note = 2'-O-methyluridine-3'-phosphate N-[tris(GalNAc-alkyl)-amidodecanoyl)]-4-hydroxyprolinol (Hyp-(GalNAc-alkyl)3)
aaggtggagggtctcactttt

SEQ ID NO: 2126 - RNA, 21 nt, synthetic construct
  source 1..21: mol_type = other RNA
  modified_base 1: mod_base = OTHER; note = 2'-O-methyladenosine-3'-phosphorothioate
  modified_base 2: mod_base = OTHER; note = 2'-O-methylguanosine-3'-phosphorothioate
  modified_base 3: mod_base = OTHER; note = 2'-O-methylguanosine-3'-phosphate
  modified_base 4: mod_base = OTHER; note = 2'-O-methyluridine-3'-phosphate
  modified_base 5: mod_base = OTHER; note = 2'-O-methylguanosine-3'-phosphate
  modified_base 6: mod_base = OTHER; note = 2'-O-methylguanosine-3'-phosphate
  modified_base 7: mod_base = OTHER; note = 2'-O-methyladenosine-3'-phosphate
  modified_base 8: mod_base = OTHER; note = 2'-O-methylguanosine-3'-phosphate
  modified_base 9: mod_base = OTHER; note = 2'-fluoroguanosine-3'-phosphate
  modified_base 10: mod_base = OTHER; note = 2'-fluoroguanosine-3'-phosphate
  modified_base 11: mod_base = OTHER; note = 2'-fluorouridine-3'-phosphate
  modified_base 12: mod_base = OTHER; note = 2'-O-methylcytidine-3'-phosphate
  modified_base 13: mod_base = OTHER; note = 2'-O-methyluridine-3'-phosphate
  modified_base 14: mod_base = OTHER; note = 2'-O-methylcytidine-3'-phosphate
  modified_base 15: mod_base = OTHER; note = 2'-O-methyladenosine-3'-phosphate
  modified_base 16: mod_base = OTHER; note = 2'-O-methylcytidine-3'-phosphate
  modified_base 17: mod_base = OTHER; note = 2'-O-methyluridine-3'-phosphate
  modified_base 18: mod_base = OTHER; note = 2'-O-methyluridine-3'-phosphate
  modified_base 19: mod_base = OTHER; note = 2'-O-methyluridine-3'-phosphate
  modified_base 20: mod_base = OTHER; note = 2'-O-methylcytidine-3'-phosphate
  modified_base 21: mod_base = OTHER; note = 2'-O-methyluridine-3'-phosphate N-[tris(GalNAc-alkyl)-amidodecanoyl)]-4-hydroxyprolinol (Hyp-(GalNAc-alkyl)3)
aggtggagggtctcactttct

SEQ ID NO: 2127 - RNA, 21 nt, synthetic construct
  source 1..21: mol_type = other RNA
  modified_base 1: mod_base = OTHER; note = 2'-O-methylguanosine-3'-phosphorothioate
  modified_base 2: mod_base = OTHER; note = 2'-O-methylguanosine-3'-phosphorothioate
  modified_base 3: mod_base = OTHER; note = 2'-O-methyluridine-3'-phosphate
  modified_base 4: mod_base = OTHER; note = 2'-O-methylguanosine-3'-phosphate
  modified_base 5: mod_base = OTHER; note = 2'-O-methylguanosine-3'-phosphate
  modified_base 6: mod_base = OTHER; note = 2'-O-methyladenosine-3'-phosphate
  modified_base 7: mod_base = OTHER; note = 2'-O-methylguanosine-3'-phosphate
  modified_base 8: mod_base = OTHER; note = 2'-O-methylguanosine-3'-phosphate
  modified_base 9: mod_base = OTHER; note = 2'-fluoroguanosine-3'-phosphate
  modified_base 10: mod_base = OTHER; note = 2'-fluorouridine-3'-phosphate
  modified_base 11: mod_base = OTHER; note = 2'-fluorocytidine-3'-phosphate
  modified_base 12: mod_base = OTHER; note = 2'-O-methyluridine-3'-phosphate
  modified_base 13: mod_base = OTHER; note = 2'-O-methylcytidine-3'-phosphate
  modified_base 14: mod_base = OTHER; note = 2'-O-methyladenosine-3'-phosphate
  modified_base 15: mod_base = OTHER; note = 2'-O-methylcytidine-3'-phosphate
  modified_base 16: mod_base = OTHER; note = 2'-O-methyluridine-3'-phosphate
  modified_base 17: mod_base = OTHER; note = 2'-O-methyluridine-3'-phosphate
  modified_base 18: mod_base = OTHER; note = 2'-O-methyluridine-3'-phosphate
  modified_base 19: mod_base = OTHER; note = 2'-O-methylcytidine-3'-phosphate
  modified_base 20: mod_base = OTHER; note = 2'-O-methylcytidine-3'-phosphate
  modified_base 21: mod_base = OTHER; note = 2'-O-methyluridine-3'-phosphate N-[tris(GalNAc-alkyl)-amidodecanoyl)]-4-hydroxyprolinol (Hyp-(GalNAc-alkyl)3)
ggtggagggtctcactttcct

SEQ ID NO: 2128 - RNA, 21 nt, synthetic construct
  source 1..21: mol_type = other RNA
  modified_base 1: mod_base = OTHER; note = 2'-O-methylguanosine-3'-phosphorothioate
  modified_base 2: mod_base = OTHER; note = 2'-O-methyluridine-3'-phosphorothioate
  modified_base 3: mod_base = OTHER; note = 2'-O-methylguanosine-3'-phosphate
  modified_base 4: mod_base = OTHER; note = 2'-O-methylguanosine-3'-phosphate
  modified_base 5: mod_base = OTHER; note = 2'-O-methyladenosine-3'-phosphate
  modified_base 6: mod_base = OTHER; note = 2'-O-methylguanosine-3'-phosphate
  modified_base 7: mod_base = OTHER; note = 2'-O-methylguanosine-3'-phosphate
  modified_base 8: mod_base = OTHER; note = 2'-O-methylguanosine-3'-phosphate
  modified_base 9: mod_base = OTHER; note = 2'-fluorouridine-3'-phosphate
  modified_base 10: mod_base = OTHER; note = 2'-fluorocytidine-3'-phosphate
  modified_base 11: mod_base = OTHER; note = 2'-fluorouridine-3'-phosphate
  modified_base 12: mod_base = OTHER; note = 2'-O-methylcytidine-3'-phosphate
  modified_base 13: mod_base = OTHER; note = 2'-O-methyladenosine-3'-phosphate
  modified_base 14: mod_base = OTHER; note = 2'-O-methylcytidine-3'-phosphate
  modified_base 15: mod_base = OTHER; note = 2'-O-methyluridine-3'-phosphate
  modified_base 16: mod_base = OTHER; note = 2'-O-methyluridine-3'-phosphate
  modified_base 17: mod_base = OTHER; note = 2'-O-methyluridine-3'-phosphate
  modified_base 18: mod_base = OTHER; note = 2'-O-methylcytidine-3'-phosphate
  modified_base 19: mod_base = OTHER; note = 2'-O-methylcytidine-3'-phosphate
  modified_base 20: mod_base = OTHER; note = 2'-O-methyladenosine-3'-phosphate
  modified_base 21: mod_base = OTHER; note = 2'-O-methyluridine-3'-phosphate N-[tris(GalNAc-alkyl)-amidodecanoyl)]-4-hydroxyprolinol (Hyp-(GalNAc-alkyl)3)
gtggagggtctcactttccat

SEQ ID NO: 2129 - RNA, 21 nt, synthetic construct
  source 1..21: mol_type = other RNA
  modified_base 1: mod_base = OTHER; note = 2'-O-methylguanosine-3'-phosphorothioate
  modified_base 2: mod_base = OTHER; note = 2'-O-methyladenosine-3'-phosphorothioate
  modified_base 3: mod_base = OTHER; note = 2'-O-methylguanosine-3'-phosphate
  modified_base 4: mod_base = OTHER; note = 2'-O-methylguanosine-3'-phosphate
  modified_base 5: mod_base = OTHER; note = 2'-O-methylguanosine-3'-phosphate
  modified_base 6: mod_base = OTHER; note = 2'-O-methyluridine-3'-phosphate
  modified_base 7: mod_base = OTHER; note = 2'-O-methylcytidine-3'-phosphate
  modified_base 8: mod_base = OTHER; note = 2'-O-methyluridine-3'-phosphate
  modified_base 9: mod_base = OTHER; note = 2'-fluorocytidine-3'-phosphate
  modified_base 10: mod_base = OTHER; note = 2'-fluoroadenosine-3'-phosphate
  modified_base 11: mod_base = OTHER; note = 2'-fluorocytidine-3'-phosphate
  modified_base 12: mod_base = OTHER; note = 2'-O-methyluridine-3'-phosphate
  modified_base 13: mod_base = OTHER; note = 2'-O-methyluridine-3'-phosphate
  modified_base 14: mod_base = OTHER; note = 2'-O-methyluridine-3'-phosphate
  modified_base 15: mod_base = OTHER; note = 2'-O-methylcytidine-3'-phosphate
  modified_base 16: mod_base = OTHER; note = 2'-O-methylcytidine-3'-phosphate
  modified_base 17: mod_base = OTHER; note = 2'-O-methyladenosine-3'-phosphate
  modified_base 18: mod_base = OTHER; note = 2'-O-methylguanosine-3'-phosphate
  modified_base 19: mod_base = OTHER; note = 2'-O-methylcytidine-3'-phosphate
  modified_base 20: mod_base = OTHER; note = 2'-O-methyladenosine-3'-phosphate
  modified_base 21: mod_base = OTHER; note = 2'-O-methyluridine-3'-phosphate N-[tris(GalNAc-alkyl)-amidodecanoyl)]-4-hydroxyprolinol (Hyp-(GalNAc-alkyl)3)
gagggtctcactttccagcat

SEQ ID NO: 2130 - RNA, 21 nt, synthetic construct
  source 1..21: mol_type = other RNA
  modified_base 1: mod_base = OTHER; note = 2'-O-methyladenosine-3'-phosphorothioate
  modified_base 2: mod_base = OTHER; note = 2'-O-methylguanosine-3'-phosphorothioate
  modified_base 3: mod_base = OTHER; note = 2'-O-methylguanosine-3'-phosphate
  modified_base 4: mod_base = OTHER; note = 2'-O-methylguanosine-3'-phosphate
  modified_base 5: mod_base = OTHER; note = 2'-O-methyluridine-3'-phosphate
  modified_base 6: mod_base = OTHER; note = 2'-O-methylcytidine-3'-phosphate
  modified_base 7: mod_base = OTHER; note = 2'-O-methyluridine-3'-phosphate
  modified_base 8: mod_base = OTHER; note = 2'-O-methylcytidine-3'-phosphate
  modified_base 9: mod_base = OTHER; note = 2'-fluoroadenosine-3'-phosphate
  modified_base 10: mod_base = OTHER; note = 2'-fluorocytidine-3'-phosphate
  modified_base 11: mod_base = OTHER; note = 2'-fluorouridine-3'-phosphate
  modified_base 12: mod_base = OTHER; note = 2'-O-methyluridine-3'-phosphate
  modified_base 13: mod_base = OTHER; note = 2'-O-methyluridine-3'-phosphate
  modified_base 14: mod_base = OTHER; note = 2'-O-methylcytidine-3'-phosphate
  modified_base 15: mod_base = OTHER; note = 2'-O-methylcytidine-3'-phosphate
  modified_base 16: mod_base = OTHER; note = 2'-O-methyladenosine-3'-phosphate
  modified_base 17: mod_base = OTHER; note = 2'-O-methylguanosine-3'-phosphate
  modified_base 18: mod_base = OTHER; note = 2'-O-methylcytidine-3'-phosphate
  modified_base 19: mod_base = OTHER; note = 2'-O-methyladenosine-3'-phosphate
  modified_base 20: mod_base = OTHER; note = 2'-O-methyladenosine-3'-phosphate
  modified_base 21: mod_base = OTHER; note = 2'-O-methyluridine-3'-phosphate N-[tris(GalNAc-alkyl)-amidodecanoyl)]-4-hydroxyprolinol (Hyp-(GalNAc-alkyl)3)
agggtctcactttccagcaat

SEQ ID NO: 2131 - RNA, 21 nt, synthetic construct
  source 1..21: mol_type = other RNA
  modified_base 1: mod_base = OTHER; note = 2'-O-methylguanosine-3'-phosphorothioate
  modified_base 2: mod_base = OTHER; note = 2'-O-methylguanosine-3'-phosphorothioate
  modified_base 3: mod_base = OTHER; note = 2'-O-methylguanosine-3'-phosphate
  modified_base 4: mod_base = OTHER; note = 2'-O-methyluridine-3'-phosphate
  modified_base 5: mod_base = OTHER; note = 2'-O-methylcytidine-3'-phosphate
  modified_base 6: mod_base = OTHER; note = 2'-O-methyluridine-3'-phosphate
  modified_base 7: mod_base = OTHER; note = 2'-O-methylcytidine-3'-phosphate
  modified_base 8: mod_base = OTHER; note = 2'-O-methyladenosine-3'-phosphate
  modified_base 9: mod_base = OTHER; note = 2'-fluorocytidine-3'-phosphate
  modified_base 10: mod_base = OTHER; note = 2'-fluorouridine-3'-phosphate
  modified_base 11: mod_base = OTHER; note = 2'-fluorouridine-3'-phosphate
  modified_base 12: mod_base = OTHER; note = 2'-O-methyluridine-3'-phosphate
  modified_base 13: mod_base = OTHER; note = 2'-O-methylcytidine-3'-phosphate
  modified_base 14: mod_base = OTHER; note = 2'-O-methylcytidine-3'-phosphate
  modified_base 15: mod_base = OTHER; note = 2'-O-methyladenosine-3'-phosphate
  modified_base 16: mod_base = OTHER; note = 2'-O-methylguanosine-3'-phosphate
  modified_base 17: mod_base = OTHER; note = 2'-O-methylcytidine-3'-phosphate
  modified_base 18: mod_base = OTHER; note = 2'-O-methyladenosine-3'-phosphate
  modified_base 19: mod_base = OTHER; note = 2'-O-methyladenosine-3'-phosphate
  modified_base 20: mod_base = OTHER; note = 2'-O-methyladenosine-3'-phosphate
  modified_base 21: mod_base = OTHER; note = 2'-O-methyluridine-3'-phosphate N-[tris(GalNAc-alkyl)-amidodecanoyl)]-4-hydroxyprolinol (Hyp-(GalNAc-alkyl)3)
gggtctcactttccagcaaat

SEQ ID NO: 2132 - RNA, 21 nt, synthetic construct
  source 1..21: mol_type = other RNA
  modified_base 1: mod_base = OTHER; note = 2'-O-methylguanosine-3'-phosphorothioate
  modified_base 2: mod_base = OTHER; note = 2'-O-methylguanosine-3'-phosphorothioate
  modified_base 3: mod_base = OTHER; note = 2'-O-methyluridine-3'-phosphate
  modified_base 4: mod_base = OTHER; note = 2'-O-methylcytidine-3'-phosphate
  modified_base 5: mod_base = OTHER; note = 2'-O-methyluridine-3'-phosphate
  modified_base 6: mod_base = OTHER; note = 2'-O-methylcytidine-3'-phosphate
  modified_base 7: mod_base = OTHER; note = 2'-O-methyladenosine-3'-phosphate
  modified_base 8: mod_base = OTHER; note = 2'-O-methylcytidine-3'-phosphate
  modified_base 9: mod_base = OTHER; note = 2'-fluorouridine-3'-phosphate
  modified_base 10: mod_base = OTHER; note = 2'-fluorouridine-3'-phosphate
  modified_base 11: mod_base = OTHER; note = 2'-fluorouridine-3'-phosphate
  modified_base 12: mod_base = OTHER; note = 2'-O-methylcytidine-3'-phosphate
  modified_base 13: mod_base = OTHER; note = 2'-O-methylcytidine-3'-phosphate
  modified_base 14: mod_base = OTHER; note = 2'-O-methyladenosine-3'-phosphate
  modified_base 15: mod_base = OTHER; note = 2'-O-methylguanosine-3'-phosphate
  modified_base 16: mod_base = OTHER; note = 2'-O-methylcytidine-3'-phosphate
  modified_base 17: mod_base = OTHER; note = 2'-O-methyladenosine-3'-phosphate
  modified_base 18: mod_base = OTHER; note = 2'-O-methyladenosine-3'-phosphate
  modified_base 19: mod_base = OTHER; note = 2'-O-methyladenosine-3'-phosphate
  modified_base 20: mod_base = OTHER; note = 2'-O-methyladenosine-3'-phosphate
  modified_base 21: mod_base = OTHER; note = 2'-O-methyluridine-3'-phosphate N-[tris(GalNAc-alkyl)-amidodecanoyl)]-4-hydroxyprolinol (Hyp-(GalNAc-alkyl)3)
ggtctcactttccagcaaaat

SEQ ID NO: 2133 - RNA, 21 nt, synthetic construct
  source 1..21: mol_type = other RNA
  modified_base 1: mod_base = OTHER; note = 2'-O-methylguanosine-3'-phosphorothioate
  modified_base 2: mod_base = OTHER; note = 2'-O-methyluridine-3'-phosphorothioate
  modified_base 3: mod_base = OTHER; note = 2'-O-methylcytidine-3'-phosphate
  modified_base 4: mod_base = OTHER; note = 2'-O-methyluridine-3'-phosphate
  modified_base 5: mod_base = OTHER; note = 2'-O-methylcytidine-3'-phosphate
  modified_base 6: mod_base = OTHER; note = 2'-O-methyladenosine-3'-phosphate
  modified_base 7: mod_base = OTHER; note = 2'-O-methylcytidine-3'-phosphate
  modified_base 8: mod_base = OTHER; note = 2'-O-methyluridine-3'-phosphate
  modified_base 9: mod_base = OTHER; note = 2'-fluorouridine-3'-phosphate
  modified_base 10: mod_base = OTHER; note = 2'-fluorouridine-3'-phosphate
  modified_base 11: mod_base = OTHER; note = 2'-fluorocytidine-3'-phosphate
  modified_base 12: mod_base = OTHER; note = 2'-O-methylcytidine-3'-phosphate
  modified_base 13: mod_base = OTHER; note = 2'-O-methyladenosine-3'-phosphate
  modified_base 14: mod_base = OTHER; note = 2'-O-methylguanosine-3'-phosphate
  modified_base 15: mod_base = OTHER; note = 2'-O-methylcytidine-3'-phosphate
  modified_base 16: mod_base = OTHER; note = 2'-O-methyladenosine-3'-phosphate
  modified_base 17: mod_base = OTHER; note = 2'-O-methyladenosine-3'-phosphate
  modified_base 18: mod_base = OTHER; note = 2'-O-methyladenosine-3'-phosphate
  modified_base 19: mod_base = OTHER; note = 2'-O-methyladenosine-3'-phosphate
  modified_base 20: mod_base = OTHER; note = 2'-O-methylcytidine-3'-phosphate
  modified_base 21: mod_base = OTHER; note = 2'-O-methyluridine-3'-phosphate N-[tris(GalNAc-alkyl)-amidodecanoyl)]-4-hydroxyprolinol (Hyp-(GalNAc-alkyl)3)
gtctcactttccagcaaaact

SEQ ID NO: 2134 - RNA, 21 nt, synthetic construct
  source 1..21: mol_type = other RNA
  modified_base 1: mod_base = OTHER; note = 2'-O-methyluridine-3'-phosphorothioate
  modified_base 2: mod_base = OTHER; note = 2'-O-methylcytidine-3'-phosphorothioate
  modified_base 3: mod_base = OTHER; note = 2'-O-methyluridine-3'-phosphate
  modified_base 4: mod_base = OTHER; note = 2'-O-methylcytidine-3'-phosphate
  modified_base 5: mod_base = OTHER; note = 2'-O-methyladenosine-3'-phosphate
  modified_base 6: mod_base = OTHER; note = 2'-O-methylcytidine-3'-phosphate
  modified_base 7: mod_base = OTHER; note = 2'-O-methyluridine-3'-phosphate
  modified_base 8: mod_base = OTHER; note = 2'-O-methyluridine-3'-phosphate
  modified_base 9: mod_base = OTHER; note = 2'-fluorouridine-3'-phosphate
  modified_base 10: mod_base = OTHER; note = 2'-fluorocytidine-3'-phosphate
  modified_base 11: mod_base = OTHER; note = 2'-fluorocytidine-3'-phosphate
  modified_base 12: mod_base = OTHER; note = 2'-O-methyladenosine-3'-phosphate
  modified_base 13: mod_base = OTHER; note = 2'-O-methylguanosine-3'-phosphate
  modified_base 14: mod_base = OTHER; note = 2'-O-methylcytidine-3'-phosphate
  modified_base 15: mod_base = OTHER; note = 2'-O-methyladenosine-3'-phosphate
  modified_base 16: mod_base = OTHER; note = 2'-O-methyladenosine-3'-phosphate
  modified_base 17: mod_base = OTHER; note = 2'-O-methyladenosine-3'-phosphate
  modified_base 18: mod_base = OTHER; note = 2'-O-methyladenosine-3'-phosphate
  modified_base 19: mod_base = OTHER; note = 2'-O-methylcytidine-3'-phosphate
  modified_base 20: mod_base = OTHER; note = 2'-O-methyluridine-3'-phosphate
  modified_base 21: mod_base = OTHER; note = 2'-O-methyluridine-3'-phosphate N-[tris(GalNAc-alkyl)-amidodecanoyl)]-4-hydroxyprolinol (Hyp-(GalNAc-alkyl)3)
tctcactttccagcaaaactt

SEQ ID NO: 2135 - RNA, 21 nt, synthetic construct
  source 1..21: mol_type = other RNA
  modified_base 1: mod_base = OTHER; note = 2'-O-methylcytidine-3'-phosphorothioate
  modified_base 2: mod_base = OTHER; note = 2'-O-methyluridine-3'-phosphorothioate
  modified_base 3: mod_base = OTHER; note = 2'-O-methylcytidine-3'-phosphate
  modified_base 4: mod_base = OTHER; note = 2'-O-methyladenosine-3'-phosphate
  modified_base 5: mod_base = OTHER; note = 2'-O-methylcytidine-3'-phosphate
  modified_base 6: mod_base = OTHER; note = 2'-O-methyluridine-3'-phosphate
  modified_base 7: mod_base = OTHER; note = 2'-O-methyluridine-3'-phosphate
  modified_base 8: mod_base = OTHER; note = 2'-O-methyluridine-3'-phosphate
  modified_base 9: mod_base = OTHER; note = 2'-fluorocytidine-3'-phosphate
  modified_base 10: mod_base = OTHER; note = 2'-fluorocytidine-3'-phosphate
  modified_base 11: mod_base = OTHER; note = 2'-fluoroadenosine-3'-phosphate
  modified_base 12: mod_base = OTHER; note = 2'-O-methylguanosine-3'-phosphate
  modified_base 13: mod_base = OTHER; note = 2'-O-methylcytidine-3'-phosphate
  modified_base 14: mod_base = OTHER; note = 2'-O-methyladenosine-3'-phosphate
  modified_base 15: mod_base = OTHER; note = 2'-O-methyladenosine-3'-phosphate
  modified_base 16: mod_base = OTHER; note = 2'-O-methyladenosine-3'-phosphate
  modified_base 17: mod_base = OTHER; note = 2'-O-methyladenosine-3'-phosphate
  modified_base 18: mod_base = OTHER; note = 2'-O-methylcytidine-3'-phosphate
  modified_base 19: mod_base = OTHER; note = 2'-O-methyluridine-3'-phosphate
  modified_base 20: mod_base = OTHER; note = 2'-O-methylcytidine-3'-phosphate
  modified_base 21: mod_base = OTHER; note = 2'-O-methyluridine-3'-phosphate N-[tris(GalNAc-alkyl)-amidodecanoyl)]-4-hydroxyprolinol (Hyp-(GalNAc-alkyl)3)
ctcactttccagcaaaactct

SEQ ID NO: 2136 - RNA, 21 nt, synthetic construct
  source 1..21: mol_type = other RNA
  modified_base 1: mod_base = OTHER; note = 2'-O-methyluridine-3'-phosphorothioate
  modified_base 2: mod_base = OTHER; note = 2'-O-methylcytidine-3'-phosphorothioate
  modified_base 3: mod_base = OTHER; note = 2'-O-methyladenosine-3'-phosphate
  modified_base 4: mod_base = OTHER; note = 2'-O-methylcytidine-3'-phosphate
  modified_base 5: mod_base = OTHER; note = 2'-O-methyluridine-3'-phosphate
  modified_base 6: mod_base = OTHER; note = 2'-O-methyluridine-3'-phosphate
  modified_base 7: mod_base = OTHER; note = 2'-O-methyluridine-3'-phosphate
  modified_base 8: mod_base = OTHER; note = 2'-O-methylcytidine-3'-phosphate
  modified_base 9: mod_base = OTHER; note = 2'-fluorocytidine-3'-phosphate
  modified_base 10: mod_base = OTHER; note = 2'-fluoroadenosine-3'-phosphate
  modified_base 11: mod_base = OTHER; note = 2'-fluoroguanosine-3'-phosphate
  modified_base 12: mod_base = OTHER; note = 2'-O-methylcytidine-3'-phosphate
  modified_base 13: mod_base = OTHER; note = 2'-O-methyladenosine-3'-phosphate
  modified_base 14: mod_base = OTHER; note = 2'-O-methyladenosine-3'-phosphate
  modified_base 15: mod_base = OTHER; note = 2'-O-methyladenosine-3'-phosphate
  modified_base 16: mod_base = OTHER; note = 2'-O-methyladenosine-3'-phosphate
  modified_base 17: mod_base = OTHER; note = 2'-O-methylcytidine-3'-phosphate
  modified_base 18: mod_base = OTHER; note = 2'-O-methyluridine-3'-phosphate
  modified_base 19: mod_base = OTHER; note = 2'-O-methylcytidine-3'-phosphate
  modified_base 20: mod_base = OTHER; note = 2'-O-methylcytidine-3'-phosphate
  modified_base 21: mod_base = OTHER; note = 2'-O-methyluridine-3'-phosphate N-[tris(GalNAc-alkyl)-amidodecanoyl)]-4-hydroxyprolinol (Hyp-(GalNAc-alkyl)3)
tcactttccagcaaaactcct

SEQ ID NO: 2137 - RNA, 21 nt, synthetic construct
  source 1..21: mol_type = other RNA
  modified_base 1: mod_base = OTHER; note = 2'-O-methylcytidine-3'-phosphorothioate
  modified_base 2: mod_base = OTHER; note = 2'-O-methyladenosine-3'-phosphorothioate
  modified_base 3: mod_base = OTHER; note = 2'-O-methylcytidine-3'-phosphate
  modified_base 4: mod_base = OTHER; note = 2'-O-methyluridine-3'-phosphate
  modified_base 5: mod_base = OTHER; note = 2'-O-methyluridine-3'-phosphate
  modified_base 6: mod_base = OTHER; note = 2'-O-methyluridine-3'-phosphate
  modified_base 7: mod_base = OTHER; note = 2'-O-methylcytidine-3'-phosphate
  modified_base 8: mod_base = OTHER; note = 2'-O-methylcytidine-3'-phosphate
  modified_base 9: mod_base = OTHER; note = 2'-fluoroadenosine-3'-phosphate
  modified_base 10: mod_base = OTHER; note = 2'-fluoroguanosine-3'-phosphate
  modified_base 11: mod_base = OTHER; note = 2'-fluorocytidine-3'-phosphate
  modified_base 12: mod_base = OTHER; note = 2'-O-methyladenosine-3'-phosphate
  modified_base 13: mod_base = OTHER; note = 2'-O-methyladenosine-3'-phosphate
  modified_base 14: mod_base = OTHER; note = 2'-O-methyladenosine-3'-phosphate
  modified_base 15: mod_base = OTHER; note = 2'-O-methyladenosine-3'-phosphate
  modified_base 16: mod_base = OTHER; note = 2'-O-methylcytidine-3'-phosphate
  modified_base 17: mod_base = OTHER; note = 2'-O-methyluridine-3'-phosphate
  modified_base 18: mod_base = OTHER; note = 2'-O-methylcytidine-3'-phosphate
  modified_base 19: mod_base = OTHER; note = 2'-O-methylcytidine-3'-phosphate
  modified_base 20: mod_base = OTHER; note = 2'-O-methylcytidine-3'-phosphate
  modified_base 21: mod_base = OTHER; note = 2'-O-methyluridine-3'-phosphate N-[tris(GalNAc-alkyl)-amidodecanoyl)]-4-hydroxyprolinol (Hyp-(GalNAc-alkyl)3)
cactttccagcaaaactccct

SEQ ID NO: 2138 - RNA, 21 nt, synthetic construct
  source 1..21: mol_type = other RNA
  modified_base 1: mod_base = OTHER; note = 2'-O-methyladenosine-3'-phosphorothioate
  modified_base 2: mod_base = OTHER; note = 2'-O-methylcytidine-3'-phosphorothioate
  modified_base 3: mod_base = OTHER; note = 2'-O-methyluridine-3'-phosphate
  modified_base 4: mod_base = OTHER; note = 2'-O-methyluridine-3'-phosphate
  modified_base 5: mod_base = OTHER; note = 2'-O-methyluridine-3'-phosphate
  modified_base 6: mod_base = OTHER; note = 2'-O-methylcytidine-3'-phosphate
  modified_base 7: mod_base = OTHER; note = 2'-O-methylcytidine-3'-phosphate
  modified_base 8: mod_base = OTHER; note = 2'-O-methyladenosine-3'-phosphate
  modified_base 9: mod_base = OTHER; note = 2'-fluoroguanosine-3'-phosphate
  modified_base 10: mod_base = OTHER; note = 2'-fluorocytidine-3'-phosphate
  modified_base 11: mod_base = OTHER; note = 2'-fluoroadenosine-3'-phosphate
  modified_base 12: mod_base = OTHER; note = 2'-O-methyladenosine-3'-phosphate
  modified_base 13: mod_base = OTHER; note = 2'-O-methyladenosine-3'-phosphate
  modified_base 14: mod_base = OTHER; note = 2'-O-methyladenosine-3'-phosphate
  modified_base 15: mod_base = OTHER; note = 2'-O-methylcytidine-3'-phosphate
  modified_base 16: mod_base = OTHER; note = 2'-O-methyluridine-3'-phosphate
  modified_base 17: mod_base = OTHER; note = 2'-O-methylcytidine-3'-phosphate
  modified_base 18: mod_base = OTHER; note = 2'-O-methylcytidine-3'-phosphate
  modified_base 19: mod_base = OTHER; note = 2'-O-methylcytidine-3'-phosphate
  modified_base 20: mod_base = OTHER; note = 2'-O-methyluridine-3'-phosphate
  modified_base 21: mod_base = OTHER; note = 2'-O-methyluridine-3'-phosphate N-[tris(GalNAc-alkyl)-amidodecanoyl)]-4-hydroxyprolinol (Hyp-(GalNAc-alkyl)3)
actttccagcaaaactccctt

SEQ ID NO: 2139 - RNA, 21 nt, synthetic construct
  source 1..21: mol_type = other RNA
  modified_base 1: mod_base = OTHER; note = 2'-O-methylcytidine-3'-phosphorothioate
  modified_base 2: mod_base = OTHER; note = 2'-O-methyluridine-3'-phosphorothioate
  modified_base 3: mod_base = OTHER; note = 2'-O-methyluridine-3'-phosphate
  modified_base 4: mod_base = OTHER; note = 2'-O-methyluridine-3'-phosphate
  modified_base 5: mod_base = OTHER; note = 2'-O-methylcytidine-3'-phosphate
  modified_base 6: mod_base = OTHER; note = 2'-O-methylcytidine-3'-phosphate
  modified_base 7: mod_base = OTHER; note = 2'-O-methyladenosine-3'-phosphate
  modified_base 8: mod_base = OTHER; note = 2'-O-methylguanosine-3'-phosphate
  modified_base 9: mod_base = OTHER; note = 2'-fluorocytidine-3'-phosphate
  modified_base 10: mod_base = OTHER; note = 2'-fluoroadenosine-3'-phosphate
  modified_base 11: mod_base = OTHER; note = 2'-fluoroadenosine-3'-phosphate
  modified_base 12: mod_base = OTHER; note = 2'-O-methyladenosine-3'-phosphate
  modified_base 13: mod_base = OTHER; note = 2'-O-methyladenosine-3'-phosphate
  modified_base 14: mod_base = OTHER; note = 2'-O-methylcytidine-3'-phosphate
  modified_base 15: mod_base = OTHER; note = 2'-O-methyluridine-3'-phosphate
  modified_base 16: mod_base = OTHER; note = 2'-O-methylcytidine-3'-phosphate
  modified_base 17: mod_base = OTHER; note = 2'-O-methylcytidine-3'-phosphate
  modified_base 18: mod_base = OTHER; note = 2'-O-methylcytidine-3'-phosphate
  modified_base 19: mod_base = OTHER; note = 2'-O-methyluridine-3'-phosphate
  modified_base 20: mod_base = OTHER; note = 2'-O-methylcytidine-3'-phosphate
  modified_base 21: mod_base = OTHER; note = 2'-O-methyluridine-3'-phosphate N-[tris(GalNAc-alkyl)-amidodecanoyl)]-4-hydroxyprolinol (Hyp-(GalNAc-alkyl)3)
ctttccagcaaaactccctct

SEQ ID NO: 2140 - RNA, 21 nt, synthetic construct
  source 1..21: mol_type = other RNA
  modified_base 1: mod_base = OTHER; note = 2'-O-methyluridine-3'-phosphorothioate
  modified_base 2: mod_base = OTHER; note = 2'-O-methyluridine-3'-phosphorothioate
  modified_base 3: mod_base = OTHER; note = 2'-O-methyluridine-3'-phosphate
  modified_base 4: mod_base = OTHER; note = 2'-O-methylcytidine-3'-phosphate
  modified_base 5: mod_base = OTHER; note = 2'-O-methylcytidine-3'-phosphate
  modified_base 6: mod_base = OTHER; note = 2'-O-methyladenosine-3'-phosphate
  modified_base 7: mod_base = OTHER; note = 2'-O-methylguanosine-3'-phosphate
  modified_base 8: mod_base = OTHER; note = 2'-O-methylcytidine-3'-phosphate
  modified_base 9: mod_base = OTHER; note = 2'-fluoroadenosine-3'-phosphate
  modified_base 10: mod_base = OTHER; note = 2'-fluoroadenosine-3'-phosphate
  modified_base 11: mod_base = OTHER; note = 2'-fluoroadenosine-3'-phosphate
  modified_base 12: mod_base = OTHER; note = 2'-O-methyladenosine-3'-phosphate
  modified_base 13: mod_base = OTHER; note = 2'-O-methylcytidine-3'-phosphate
  modified_base 14: mod_base = OTHER; note = 2'-O-methyluridine-3'-phosphate
  modified_base 15: mod_base = OTHER; note = 2'-O-methylcytidine-3'-phosphate
  modified_base 16: mod_base = OTHER; note = 2'-O-methylcytidine-3'-phosphate
  modified_base 17: mod_base = OTHER; note = 2'-O-methylcytidine-3'-phosphate
  modified_base 18: mod_base = OTHER; note = 2'-O-methyluridine-3'-phosphate
  modified_base 19: mod_base = OTHER; note = 2'-O-methylcytidine-3'-phosphate
  modified_base 20: mod_base = OTHER; note = 2'-O-methyladenosine-3'-phosphate
  modified_base 21: mod_base = OTHER; note = 2'-O-methyluridine-3'-phosphate N-[tris(GalNAc-alkyl)-amidodecanoyl)]-4-hydroxyprolinol (Hyp-(GalNAc-alkyl)3)
tttccagcaaaactccctcat

SEQ ID NO: 2141 - RNA, 21 nt, synthetic construct
  source 1..21: mol_type = other RNA
  modified_base 1: mod_base = OTHER; note = 2'-O-methyluridine-3'-phosphorothioate
  modified_base 2: mod_base = OTHER; note = 2'-O-methyluridine-3'-phosphorothioate
  modified_base 3: mod_base = OTHER; note = 2'-O-methylcytidine-3'-phosphate
  modified_base 4: mod_base = OTHER; note = 2'-O-methylcytidine-3'-phosphate
  modified_base 5: mod_base = OTHER; note = 2'-O-methyladenosine-3'-phosphate
  modified_base 6: mod_base = OTHER; note = 2'-O-methylguanosine-3'-phosphate
  modified_base 7: mod_base = OTHER; note = 2'-O-methylcytidine-3'-phosphate
  modified_base 8: mod_base = OTHER; note = 2'-O-methyladenosine-3'-phosphate
  modified_base 9: mod_base = OTHER; note = 2'-fluoroadenosine-3'-phosphate
  modified_base 10: mod_base = OTHER; note = 2'-fluoroadenosine-3'-phosphate
  modified_base 11: mod_base = OTHER; note = 2'-fluoroadenosine-3'-phosphate
  modified_base 12: mod_base = OTHER; note = 2'-O-methylcytidine-3'-phosphate
  modified_base 13: mod_base = OTHER; note = 2'-O-methyluridine-3'-phosphate
  modified_base 14: mod_base = OTHER; note = 2'-O-methylcytidine-3'-phosphate
  modified_base 15: mod_base = OTHER; note = 2'-O-methylcytidine-3'-phosphate
  modified_base 16: mod_base = OTHER; note = 2'-O-methylcytidine-3'-phosphate
  modified_base 17: mod_base = OTHER; note = 2'-O-methyluridine-3'-phosphate
  modified_base 18: mod_base = OTHER; note = 2'-O-methylcytidine-3'-phosphate
  modified_base 19: mod_base = OTHER; note = 2'-O-methyladenosine-3'-phosphate
  modified_base 20: mod_base = OTHER; note = 2'-O-methyladenosine-3'-phosphate
  modified_base 21: mod_base = OTHER; note = 2'-O-methyluridine-3'-phosphate N-[tris(GalNAc-alkyl)-amidodecanoyl)]-4-hydroxyprolinol (Hyp-(GalNAc-alkyl)3)
ttccagcaaaactccctcaat

SEQ ID NO: 2142 - RNA, 21 nt, synthetic construct
  source 1..21: mol_type = other RNA
  modified_base 1: mod_base = OTHER; note = 2'-O-methyluridine-3'-phosphorothioate
  modified_base 2: mod_base = OTHER; note = 2'-O-methylcytidine-3'-phosphorothioate
  modified_base 3: mod_base = OTHER; note = 2'-O-methylcytidine-3'-phosphate
  modified_base 4: mod_base = OTHER; note = 2'-O-methyladenosine-3'-phosphate
  modified_base 5: mod_base = OTHER; note = 2'-O-methylguanosine-3'-phosphate
  modified_base 6: mod_base = OTHER; note = 2'-O-methylcytidine-3'-phosphate
  modified_base 7: mod_base = OTHER; note = 2'-O-methyladenosine-3'-phosphate
  modified_base 8: mod_base = OTHER; note = 2'-O-methyladenosine-3'-phosphate
  modified_base 9: mod_base = OTHER; note = 2'-fluoroadenosine-3'-phosphate
  modified_base 10: mod_base = OTHER; note = 2'-fluoroadenosine-3'-phosphate
  modified_base 11: mod_base = OTHER; note = 2'-fluorocytidine-3'-phosphate
  modified_base 12: mod_base = OTHER; note = 2'-O-methyluridine-3'-phosphate
  modified_base 13: mod_base = OTHER; note = 2'-O-methylcytidine-3'-phosphate
  modified_base 14: mod_base = OTHER; note = 2'-O-methylcytidine-3'-phosphate
  modified_base 15: mod_base = OTHER; note = 2'-O-methylcytidine-3'-phosphate
  modified_base 16: mod_base = OTHER; note = 2'-O-methyluridine-3'-phosphate
  modified_base 17: mod_base = OTHER; note = 2'-O-methylcytidine-3'-phosphate
  modified_base 18: mod_base = OTHER; note = 2'-O-methyladenosine-3'-phosphate
  modified_base 19: mod_base = OTHER; note = 2'-O-methyladenosine-3'-phosphate
  modified_base 20: mod_base = OTHER; note = 2'-O-methylcytidine-3'-phosphate
  modified_base 21: mod_base = OTHER; note = 2'-O-methyluridine-3'-phosphate N-[tris(GalNAc-alkyl)-amidodecanoyl)]-4-hydroxyprolinol (Hyp-(GalNAc-alkyl)3)
tccagcaaaactccctcaact

SEQ ID NO: 2143 - RNA, 21 nt, synthetic construct
  source 1..21: mol_type = other RNA
  modified_base 1: mod_base = OTHER; note = 2'-O-methylcytidine-3'-phosphorothioate
  modified_base 2: mod_base = OTHER; note = 2'-O-methylcytidine-3'-phosphorothioate
  modified_base 3: mod_base = OTHER; note = 2'-O-methyladenosine-3'-phosphate
  modified_base 4: mod_base = OTHER; note = 2'-O-methylguanosine-3'-phosphate
  modified_base 5: mod_base = OTHER; note = 2'-O-methylcytidine-3'-phosphate
  modified_base 6: mod_base = OTHER; note = 2'-O-methyladenosine-3'-phosphate
  modified_base 7: mod_base = OTHER; note = 2'-O-methyladenosine-3'-phosphate
  modified_base 8: mod_base = OTHER; note = 2'-O-methyladenosine-3'-phosphate
  modified_base 9: mod_base = OTHER; note = 2'-fluoroadenosine-3'-phosphate
  modified_base 10: mod_base = OTHER; note = 2'-fluorocytidine-3'-phosphate
  modified_base 11: mod_base = OTHER; note = 2'-fluorouridine-3'-phosphate
  modified_base 12: mod_base = OTHER; note = 2'-O-methylcytidine-3'-phosphate
  modified_base 13: mod_base = OTHER; note = 2'-O-methylcytidine-3'-phosphate
  modified_base 14: mod_base = OTHER; note = 2'-O-methylcytidine-3'-phosphate
  modified_base 15: mod_base = OTHER; note = 2'-O-methyluridine-3'-phosphate
  modified_base 16: mod_base = OTHER; note = 2'-O-methylcytidine-3'-phosphate
  modified_base 17: mod_base = OTHER; note = 2'-O-methyladenosine-3'-phosphate
  modified_base 18: mod_base = OTHER; note = 2'-O-methyladenosine-3'-phosphate
  modified_base 19: mod_base = OTHER; note = 2'-O-methylcytidine-3'-phosphate
  modified_base 20: mod_base = OTHER; note = 2'-O-methyluridine-3'-phosphate
  modified_base 21: mod_base = OTHER; note = 2'-O-methyluridine-3'-phosphate N-[tris(GalNAc-alkyl)-amidodecanoyl)]-4-hydroxyprolinol (Hyp-(GalNAc-alkyl)3)
ccagcaaaactccctcaactt

SEQ ID NO: 2144 - RNA, 21 nt, synthetic construct
  source 1..21: mol_type = other RNA
  modified_base 1: mod_base = OTHER; note = 2'-O-methylcytidine-3'-phosphorothioate
  modified_base 2: mod_base = OTHER; note = 2'-O-methyladenosine-3'-phosphorothioate
  modified_base 3: mod_base = OTHER; note = 2'-O-methylguanosine-3'-phosphate
  modified_base 4: mod_base = OTHER; note = 2'-O-methylcytidine-3'-phosphate
  modified_base 5: mod_base = OTHER; note = 2'-O-methyladenosine-3'-phosphate
  modified_base 6: mod_base = OTHER; note = 2'-O-methyladenosine-3'-phosphate
  modified_base 7: mod_base = OTHER; note = 2'-O-methyladenosine-3'-phosphate
  modified_base 8: mod_base = OTHER; note = 2'-O-methyladenosine-3'-phosphate
  modified_base 9: mod_base = OTHER; note = 2'-fluorocytidine-3'-phosphate
  modified_base 10: mod_base = OTHER; note = 2'-fluorouridine-3'-phosphate
  modified_base 11: mod_base = OTHER; note = 2'-fluorocytidine-3'-phosphate
  modified_base 12: mod_base = OTHER; note = 2'-O-methylcytidine-3'-phosphate
  modified_base 13: mod_base = OTHER; note = 2'-O-methylcytidine-3'-phosphate
  modified_base 14: mod_base = OTHER; note = 2'-O-methyluridine-3'-phosphate
  modified_base 15: mod_base = OTHER; note = 2'-O-methylcytidine-3'-phosphate
  modified_base 16: mod_base = OTHER; note = 2'-O-methyladenosine-3'-phosphate
  modified_base 17: mod_base = OTHER; note = 2'-O-methyladenosine-3'-phosphate
  modified_base 18: mod_base = OTHER; note = 2'-O-methylcytidine-3'-phosphate
  modified_base 19: mod_base = OTHER; note = 2'-O-methyluridine-3'-phosphate
  modified_base 20: mod_base = OTHER; note = 2'-O-methylguanosine-3'-phosphate
  modified_base 21: mod_base = OTHER; note = 2'-O-methyluridine-3'-phosphate N-[tris(GalNAc-alkyl)-amidodecanoyl)]-4-hydroxyprolinol (Hyp-(GalNAc-alkyl)3)
cagcaaaactccctcaactgt

SEQ ID NO: 2145 - RNA, 21 nt, synthetic construct
  source 1..21: mol_type = other RNA
  modified_base 1: mod_base = OTHER; note = 2'-O-methyladenosine-3'-phosphorothioate
  modified_base 2: mod_base = OTHER; note = 2'-O-methylguanosine-3'-phosphorothioate
  modified_base 3: mod_base = OTHER; note = 2'-O-methylcytidine-3'-phosphate
  modified_base 4: mod_base = OTHER; note = 2'-O-methyladenosine-3'-phosphate
  modified_base 5: mod_base = OTHER; note = 2'-O-methyladenosine-3'-phosphate
  modified_base 6: mod_base = OTHER; note = 2'-O-methyladenosine-3'-phosphate
  modified_base 7: mod_base = OTHER; note = 2'-O-methyladenosine-3'-phosphate
  modified_base 8: mod_base = OTHER; note = 2'-O-methylcytidine-3'-phosphate
  modified_base 9: mod_base = OTHER; note = 2'-fluorouridine-3'-phosphate
  modified_base 10: mod_base = OTHER; note = 2'-fluorocytidine-3'-phosphate
  modified_base 11: mod_base = OTHER; note = 2'-fluorocytidine-3'-phosphate
  modified_base 12: mod_base = OTHER; note = 2'-O-methylcytidine-3'-phosphate
  modified_base 13: mod_base = OTHER; note = 2'-O-methyluridine-3'-phosphate
  modified_base 14: mod_base = OTHER; note = 2'-O-methylcytidine-3'-phosphate
  modified_base 15: mod_base = OTHER; note = 2'-O-methyladenosine-3'-phosphate
  modified_base 16: mod_base = OTHER; note = 2'-O-methyladenosine-3'-phosphate
  modified_base 17: mod_base = OTHER; note = 2'-O-methylcytidine-3'-phosphate
  modified_base 18: mod_base = OTHER; note = 2'-O-methyluridine-3'-phosphate
  modified_base 19: mod_base = OTHER; note = 2'-O-methylguanosine-3'-phosphate
  modified_base 20: mod_base = OTHER; note = 2'-O-methylguanosine-3'-phosphate
  modified_base 21: mod_base = OTHER; note = 2'-O-methyluridine-3'-phosphate N-[tris(GalNAc-alkyl)-amidodecanoyl)]-4-hydroxyprolinol (Hyp-(GalNAc-alkyl)3)
agcaaaactccctcaactggt

SEQ ID NO: 2146 - RNA, 21 nt, synthetic construct
  source 1..21: mol_type = other RNA
  modified_base 1: mod_base = OTHER; note = 2'-O-methylguanosine-3'-phosphorothioate
  modified_base 2: mod_base = OTHER; note = 2'-O-methylcytidine-3'-phosphorothioate
  modified_base 3: mod_base = OTHER; note = 2'-O-methyladenosine-3'-phosphate
  modified_base 4: mod_base = OTHER; note = 2'-O-methyladenosine-3'-phosphate
  modified_base 5: mod_base = OTHER; note = 2'-O-methyladenosine-3'-phosphate
  modified_base 6: mod_base = OTHER; note = 2'-O-methyladenosine-3'-phosphate
  modified_base 7: mod_base = OTHER; note = 2'-O-methylcytidine-3'-phosphate
  modified_base 8: mod_base = OTHER; note = 2'-O-methyluridine-3'-phosphate
  modified_base 9: mod_base = OTHER; note = 2'-fluorocytidine-3'-phosphate
  modified_base 10: mod_base = OTHER; note = 2'-fluorocytidine-3'-phosphate
  modified_base 11: mod_base = OTHER; note = 2'-fluorocytidine-3'-phosphate
  modified_base 12: mod_base = OTHER; note = 2'-O-methyluridine-3'-phosphate
  modified_base 13: mod_base = OTHER; note = 2'-O-methylcytidine-3'-phosphate
  modified_base 14: mod_base = OTHER; note = 2'-O-methyladenosine-3'-phosphate
  modified_base 15: mod_base = OTHER; note = 2'-O-methyladenosine-3'-phosphate
  modified_base 16: mod_base = OTHER; note = 2'-O-methylcytidine-3'-phosphate
  modified_base 17: mod_base = OTHER; note = 2'-O-methyluridine-3'-phosphate
  modified_base 18: mod_base = OTHER; note = 2'-O-methylguanosine-3'-phosphate
  modified_base 19: mod_base = OTHER; note = 2'-O-methylguanosine-3'-phosphate
  modified_base 20: mod_base = OTHER; note = 2'-O-methyladenosine-3'-phosphate
  modified_base 21: mod_base = OTHER; note = 2'-O-methyluridine-3'-phosphate N-[tris(GalNAc-alkyl)-amidodecanoyl)]-4-hydroxyprolinol (Hyp-(GalNAc-alkyl)3)
gcaaaactccctcaactggat

SEQ ID NO: 2147 - RNA, 21 nt, synthetic construct
  source 1..21: mol_type = other RNA
  modified_base 1: mod_base = OTHER; note = 2'-O-methylcytidine-3'-phosphorothioate
  modified_base 2: mod_base = OTHER; note = 2'-O-methyladenosine-3'-phosphorothioate
  modified_base 3: mod_base = OTHER; note = 2'-O-methyladenosine-3'-phosphate
  modified_base 4: mod_base = OTHER; note = 2'-O-methyladenosine-3'-phosphate
  modified_base 5: mod_base = OTHER; note = 2'-O-methyladenosine-3'-phosphate
  modified_base 6: mod_base = OTHER; note = 2'-O-methylcytidine-3'-phosphate
  modified_base 7: mod_base = OTHER; note = 2'-O-methyluridine-3'-phosphate
  modified_base 8: mod_base = OTHER; note = 2'-O-methylcytidine-3'-phosphate
  modified_base 9: mod_base = OTHER; note = 2'-fluorocytidine-3'-phosphate
  modified_base 10: mod_base = OTHER; note = 2'-fluorocytidine-3'-phosphate
  modified_base 11: mod_base = OTHER; note = 2'-fluorouridine-3'-phosphate
  modified_base 12: mod_base = OTHER; note = 2'-O-methylcytidine-3'-phosphate
  modified_base 13: mod_base = OTHER; note = 2'-O-methyladenosine-3'-phosphate
  modified_base 14: mod_base = OTHER; note = 2'-O-methyladenosine-3'-phosphate
  modified_base 15: mod_base = OTHER; note = 2'-O-methylcytidine-3'-phosphate
  modified_base 16: mod_base = OTHER; note = 2'-O-methyluridine-3'-phosphate
  modified_base 17: mod_base = OTHER; note = 2'-O-methylguanosine-3'-phosphate
  modified_base 18: mod_base = OTHER; note = 2'-O-methylguanosine-3'-phosphate
  modified_base 19: mod_base = OTHER; note = 2'-O-methyladenosine-3'-phosphate
  modified_base 20: mod_base = OTHER; note = 2'-O-methyluridine-3'-phosphate
  modified_base 21: mod_base = OTHER; note = 2'-O-methyluridine-3'-phosphate N-[tris(GalNAc-alkyl)-amidodecanoyl)]-4-hydroxyprolinol (Hyp-(GalNAc-alkyl)3)
caaaactccctcaactggatt

SEQ ID NO: 2148 - RNA, 21 nt, synthetic construct
  source 1..21: mol_type = other RNA
  modified_base 1: mod_base = OTHER; note = 2'-O-methyladenosine-3'-phosphorothioate
  modified_base 2: mod_base = OTHER; note = 2'-O-methyladenosine-3'-phosphorothioate
  modified_base 3: mod_base = OTHER; note = 2'-O-methyladenosine-3'-phosphate
  modified_base 4: mod_base = OTHER; note = 2'-O-methyladenosine-3'-phosphate
  modified_base 5: mod_base = OTHER; note = 2'-O-methylcytidine-3'-phosphate
  modified_base 6: mod_base = OTHER; note = 2'-O-methyluridine-3'-phosphate
  modified_base 7: mod_base = OTHER; note = 2'-O-methylcytidine-3'-phosphate
  modified_base 8: mod_base = OTHER; note = 2'-O-methylcytidine-3'-phosphate
  modified_base 9: mod_base = OTHER; note = 2'-fluorocytidine-3'-phosphate
  modified_base 10: mod_base = OTHER; note = 2'-fluorouridine-3'-phosphate
  modified_base 11: mod_base = OTHER; note = 2'-fluorocytidine-3'-phosphate
  modified_base 12: mod_base = OTHER; note = 2'-O-methyladenosine-3'-phosphate
  modified_base 13: mod_base = OTHER; note = 2'-O-methyladenosine-3'-phosphate
  modified_base 14: mod_base = OTHER; note = 2'-O-methylcytidine-3'-phosphate
  modified_base 15: mod_base = OTHER; note = 2'-O-methyluridine-3'-phosphate
  modified_base 16: mod_base = OTHER; note = 2'-O-methylguanosine-3'-phosphate
  modified_base 17: mod_base = OTHER; note = 2'-O-methylguanosine-3'-phosphate
  modified_base 18: mod_base = OTHER; note = 2'-O-methyladenosine-3'-phosphate
  modified_base 19: mod_base = OTHER; note = 2'-O-methyluridine-3'-phosphate
  modified_base 20: mod_base = OTHER; note = 2'-O-methylguanosine-3'-phosphate
  modified_base 21: mod_base = OTHER; note = 2'-O-methyluridine-3'-phosphate N-[tris(GalNAc-alkyl)-amidodecanoyl)]-4-hydroxyprolinol (Hyp-(GalNAc-alkyl)3)
aaaactccctcaactggatgt

SEQ ID NO: 2149 - RNA, 21 nt, synthetic construct
  source 1..21: mol_type = other RNA
  modified_base 1: mod_base = OTHER; note = 2'-O-methyladenosine-3'-phosphorothioate
  modified_base 2: mod_base = OTHER; note = 2'-O-methyladenosine-3'-phosphorothioate
  modified_base 3: mod_base = OTHER; note = 2'-O-methyladenosine-3'-phosphate
  modified_base 4: mod_base = OTHER; note = 2'-O-methylcytidine-3'-phosphate
  modified_base 5: mod_base = OTHER; note = 2'-O-methyluridine-3'-phosphate
  modified_base 6: mod_base = OTHER; note = 2'-O-methylcytidine-3'-phosphate
  modified_base 7: mod_base = OTHER; note = 2'-O-methylcytidine-3'-phosphate
  modified_base 8: mod_base = OTHER; note = 2'-O-methylcytidine-3'-phosphate
  modified_base 9: mod_base = OTHER; note = 2'-fluorouridine-3'-phosphate
  modified_base 10: mod_base = OTHER; note = 2'-fluorocytidine-3'-phosphate
  modified_base 11: mod_base = OTHER; note = 2'-fluoroadenosine-3'-phosphate
  modified_base 12: mod_base = OTHER; note = 2'-O-methyladenosine-3'-phosphate
  modified_base 13: mod_base = OTHER; note = 2'-O-methylcytidine-3'-phosphate
  modified_base 14: mod_base = OTHER; note = 2'-O-methyluridine-3'-phosphate
  modified_base 15: mod_base = OTHER; note = 2'-O-methylguanosine-3'-phosphate
  modified_base 16: mod_base = OTHER; note = 2'-O-methylguanosine-3'-phosphate
  modified_base 17: mod_base = OTHER; note = 2'-O-methyladenosine-3'-phosphate
  modified_base 18: mod_base = OTHER; note = 2'-O-methyluridine-3'-phosphate
  modified_base 19: mod_base = OTHER; note = 2'-O-methylguanosine-3'-phosphate
  modified_base 20: mod_base = OTHER; note = 2'-O-methyladenosine-3'-phosphate
  modified_base 21: mod_base = OTHER; note = 2'-O-methyluridine-3'-phosphate N-[tris(GalNAc-alkyl)-amidodecanoyl)]-4-hydroxyprolinol (Hyp-(GalNAc-alkyl)3)
aaactccctcaactggatgat

SEQ ID NO: 2150 - RNA, 21 nt, synthetic construct
  source 1..21: mol_type = other RNA
  modified_base 1: mod_base = OTHER; note = 2'-O-methyladenosine-3'-phosphorothioate
  modified_base 2: mod_base = OTHER; note = 2'-O-methyladenosine-3'-phosphorothioate
  modified_base 3: mod_base = OTHER; note = 2'-O-methylcytidine-3'-phosphate
  modified_base 4: mod_base = OTHER; note = 2'-O-methyluridine-3'-phosphate
  modified_base 5: mod_base = OTHER; note = 2'-O-methylcytidine-3'-phosphate
  modified_base 6: mod_base = OTHER; note = 2'-O-methylcytidine-3'-phosphate
  modified_base 7: mod_base = OTHER; note = 2'-O-methylcytidine-3'-phosphate
  modified_base 8: mod_base = OTHER; note = 2'-O-methyluridine-3'-phosphate
  modified_base 9: mod_base = OTHER; note = 2'-fluorocytidine-3'-phosphate
  modified_base 10: mod_base = OTHER; note = 2'-fluoroadenosine-3'-phosphate
  modified_base 11: mod_base = OTHER; note = 2'-fluoroadenosine-3'-phosphate
  modified_base 12: mod_base = OTHER; note = 2'-O-methylcytidine-3'-phosphate
  modified_base 13: mod_base = OTHER; note = 2'-O-methyluridine-3'-phosphate
  modified_base 14: mod_base = OTHER; note = 2'-O-methylguanosine-3'-phosphate
  modified_base 15: mod_base = OTHER; note = 2'-O-methylguanosine-3'-phosphate
  modified_base 16: mod_base = OTHER; note = 2'-O-methyladenosine-3'-phosphate
  modified_base 17: mod_base = OTHER; note = 2'-O-methyluridine-3'-phosphate
  modified_base 18: mod_base = OTHER; note = 2'-O-methylguanosine-3'-phosphate
  modified_base 19: mod_base = OTHER; note = 2'-O-methyladenosine-3'-phosphate
  modified_base 20: mod_base = OTHER; note = 2'-O-methyladenosine-3'-phosphate
  modified_base 21: mod_base = OTHER; note = 2'-O-methyluridine-3'-phosphate N-[tris(GalNAc-alkyl)-amidodecanoyl)]-4-hydroxyprolinol (Hyp-(GalNAc-alkyl)3)
aactccctcaactggatgaat

SEQ ID NO: 2151 - RNA, 21 nt, synthetic construct
  source 1..21: mol_type = other RNA
  modified_base 1: mod_base = OTHER; note = 2'-O-methyladenosine-3'-phosphorothioate
  modified_base 2: mod_base = OTHER; note = 2'-O-methylcytidine-3'-phosphorothioate
  modified_base 3: mod_base = OTHER; note = 2'-O-methyluridine-3'-phosphate
  modified_base 4: mod_base = OTHER; note = 2'-O-methylcytidine-3'-phosphate
  modified_base 5: mod_base = OTHER; note = 2'-O-methylcytidine-3'-phosphate
  modified_base 6: mod_base = OTHER; note = 2'-O-methylcytidine-3'-phosphate
  modified_base 7: mod_base = OTHER; note = 2'-O-methyluridine-3'-phosphate
  modified_base 8: mod_base = OTHER; note = 2'-O-methylcytidine-3'-phosphate
  modified_base 9: mod_base = OTHER; note = 2'-fluoroadenosine-3'-phosphate
  modified_base 10: mod_base = OTHER; note = 2'-fluoroadenosine-3'-phosphate
  modified_base 11: mod_base = OTHER; note = 2'-fluorocytidine-3'-phosphate
  modified_base 12: mod_base = OTHER; note = 2'-O-methyluridine-3'-phosphate
  modified_base 13: mod_base = OTHER; note = 2'-O-methylguanosine-3'-phosphate
  modified_base 14: mod_base = OTHER; note = 2'-O-methylguanosine-3'-phosphate
  modified_base 15: mod_base = OTHER; note = 2'-O-methyladenosine-3'-phosphate
  modified_base 16: mod_base = OTHER; note = 2'-O-methyluridine-3'-phosphate
  modified_base 17: mod_base = OTHER; note = 2'-O-methylguanosine-3'-phosphate
  modified_base 18: mod_base = OTHER; note = 2'-O-methyladenosine-3'-phosphate
  modified_base 19: mod_base = OTHER; note = 2'-O-methyladenosine-3'-phosphate
  modified_base 20: mod_base = OTHER; note = 2'-O-methylguanosine-3'-phosphate
  modified_base 21: mod_base = OTHER; note = 2'-O-methyluridine-3'-phosphate N-[tris(GalNAc-alkyl)-amidodecanoyl)]-4-hydroxyprolinol (Hyp-(GalNAc-alkyl)3)
actccctcaactggatgaagt

SEQ ID NO: 2152 - RNA, 21 nt, synthetic construct
  source 1..21: mol_type = other RNA
  modified_base 1: mod_base = OTHER; note = 2'-O-methylcytidine-3'-phosphorothioate
  modified_base 2: mod_base = OTHER; note = 2'-O-methyluridine-3'-phosphorothioate
  modified_base 3: mod_base = OTHER; note = 2'-O-methylcytidine-3'-phosphate
  modified_base 4: mod_base = OTHER; note = 2'-O-methylcytidine-3'-phosphate
  modified_base 5: mod_base = OTHER; note = 2'-O-methylcytidine-3'-phosphate
  modified_base 6: mod_base = OTHER; note = 2'-O-methyluridine-3'-phosphate
  modified_base 7: mod_base = OTHER; note = 2'-O-methylcytidine-3'-phosphate
  modified_base 8: mod_base = OTHER; note = 2'-O-methyladenosine-3'-phosphate
  modified_base 9: mod_base = OTHER; note = 2'-fluoroadenosine-3'-phosphate
  modified_base 10: mod_base = OTHER; note = 2'-fluorocytidine-3'-phosphate
  modified_base 11: mod_base = OTHER; note = 2'-fluorouridine-3'-phosphate
  modified_base 12: mod_base = OTHER; note = 2'-O-methylguanosine-3'-phosphate
  modified_base 13: mod_base = OTHER; note = 2'-O-methylguanosine-3'-phosphate
  modified_base 14: mod_base = OTHER; note = 2'-O-methyladenosine-3'-phosphate
  modified_base 15: mod_base = OTHER; note = 2'-O-methyluridine-3'-phosphate
  modified_base 16: mod_base = OTHER; note = 2'-O-methylguanosine-3'-phosphate
  modified_base 17: mod_base = OTHER; note = 2'-O-methyladenosine-3'-phosphate
  modified_base 18: mod_base = OTHER; note = 2'-O-methyladenosine-3'-phosphate
  modified_base 19: mod_base = OTHER; note = 2'-O-methylguanosine-3'-phosphate
  modified_base 20: mod_base = OTHER; note = 2'-O-methyladenosine-3'-phosphate
  modified_base 21: mod_base = OTHER; note = 2'-O-methyluridine-3'-phosphate N-[tris(GalNAc-alkyl)-amidodecanoyl)]-4-hydroxyprolinol (Hyp-(GalNAc-alkyl)3)
ctccctcaactggatgaagat

SEQ ID NO: 2153 - RNA, 21 nt, synthetic construct
  source 1..21: mol_type = other RNA
  modified_base 1: mod_base = OTHER; note = 2'-O-methyluridine-3'-phosphorothioate
  modified_base 2: mod_base = OTHER; note = 2'-O-methylcytidine-3'-phosphorothioate
  modified_base 3: mod_base = OTHER; note = 2'-O-methylcytidine-3'-phosphate
  modified_base 4: mod_base = OTHER; note = 2'-O-methylcytidine-3'-phosphate
  modified_base 5: mod_base = OTHER; note = 2'-O-methyluridine-3'-phosphate
  modified_base 6: mod_base = OTHER; note = 2'-O-methylcytidine-3'-phosphate
  modified_base 7: mod_base = OTHER; note = 2'-O-methyladenosine-3'-phosphate
  modified_base 8: mod_base = OTHER; note = 2'-O-methyladenosine-3'-phosphate
  modified_base 9: mod_base = OTHER; note = 2'-fluorocytidine-3'-phosphate
  modified_base 10: mod_base = OTHER; note = 2'-fluorouridine-3'-phosphate
  modified_base 11: mod_base = OTHER; note = 2'-fluoroguanosine-3'-phosphate
  modified_base 12: mod_base = OTHER; note = 2'-O-methylguanosine-3'-phosphate
  modified_base 13: mod_base = OTHER; note = 2'-O-methyladenosine-3'-phosphate
  modified_base 14: mod_base = OTHER; note = 2'-O-methyluridine-3'-phosphate
  modified_base 15: mod_base = OTHER; note = 2'-O-methylguanosine-3'-phosphate
  modified_base 16: mod_base = OTHER; note = 2'-O-methyladenosine-3'-phosphate
  modified_base 17: mod_base = OTHER; note = 2'-O-methyladenosine-3'-phosphate
  modified_base 18: mod_base = OTHER; note = 2'-O-methylguanosine-3'-phosphate
  modified_base 19: mod_base = OTHER; note = 2'-O-methyladenosine-3'-phosphate
  modified_base 20: mod_base = OTHER; note = 2'-O-methyladenosine-3'-phosphate
  modified_base 21: mod_base = OTHER; note = 2'-O-methyluridine-3'-phosphate N-[tris(GalNAc-alkyl)-amidodecanoyl)]-4-hydroxyprolinol (Hyp-(GalNAc-alkyl)3)
tccctcaactggatgaagaat

SEQ ID NO: 2154 - RNA, 21 nt, synthetic construct
  source 1..21: mol_type = other RNA
  modified_base 1: mod_base = OTHER; note = 2'-O-methylcytidine-3'-phosphorothioate
  modified_base 2: mod_base = OTHER; note = 2'-O-methylcytidine-3'-phosphorothioate
  modified_base 3: mod_base = OTHER; note = 2'-O-methylcytidine-3'-phosphate
  modified_base 4: mod_base = OTHER; note = 2'-O-methyluridine-3'-phosphate
  modified_base 5: mod_base = OTHER; note = 2'-O-methylcytidine-3'-phosphate
  modified_base 6: mod_base = OTHER; note = 2'-O-methyladenosine-3'-phosphate
  modified_base 7: mod_base = OTHER; note = 2'-O-methyladenosine-3'-phosphate
  modified_base 8: mod_base = OTHER; note = 2'-O-methylcytidine-3'-phosphate
  modified_base 9: mod_base = OTHER; note = 2'-fluorouridine-3'-phosphate
  modified_base 10: mod_base = OTHER; note = 2'-fluoroguanosine-3'-phosphate
  modified_base 11: mod_base = OTHER; note = 2'-fluoroguanosine-3'-phosphate
  modified_base 12: mod_base = OTHER; note = 2'-O-methyladenosine-3'-phosphate
  modified_base 13: mod_base = OTHER; note = 2'-O-methyluridine-3'-phosphate
  modified_base 14: mod_base = OTHER; note = 2'-O-methylguanosine-3'-phosphate
  modified_base 15: mod_base = OTHER; note = 2'-O-methyladenosine-3'-phosphate
  modified_base 16: mod_base = OTHER; note = 2'-O-methyladenosine-3'-phosphate
  modified_base 17: mod_base = OTHER; note = 2'-O-methylguanosine-3'-phosphate
  modified_base 18: mod_base = OTHER; note = 2'-O-methyladenosine-3'-phosphate
  modified_base 19: mod_base = OTHER; note = 2'-O-methyladenosine-3'-phosphate
  modified_base 20: mod_base = OTHER; note = 2'-O-methyladenosine-3'-phosphate
  modified_base 21: mod_base = OTHER; note = 2'-O-methyluridine-3'-phosphate N-[tris(GalNAc-alkyl)-amidodecanoyl)]-4-hydroxyprolinol (Hyp-(GalNAc-alkyl)3)
ccctcaactggatgaagaaat

SEQ ID NO: 2155 - RNA, 21 nt, synthetic construct
  source 1..21: mol_type = other RNA
  modified_base 1: mod_base = OTHER; note = 2'-O-methylcytidine-3'-phosphorothioate
  modified_base 2: mod_base = OTHER; note = 2'-O-methyluridine-3'-phosphorothioate
  modified_base 3: mod_base = OTHER; note = 2'-O-methylcytidine-3'-phosphate
  modified_base 4: mod_base = OTHER; note = 2'-O-methyladenosine-3'-phosphate
  modified_base 5: mod_base = OTHER; note = 2'-O-methyladenosine-3'-phosphate
  modified_base 6: mod_base = OTHER; note = 2'-O-methylcytidine-3'-phosphate
  modified_base 7: mod_base = OTHER; note = 2'-O-methyluridine-3'-phosphate
  modified_base 8: mod_base = OTHER; note = 2'-O-methylguanosine-3'-phosphate
  modified_base 9: mod_base = OTHER; note = 2'-fluoroguanosine-3'-phosphate
  modified_base 10: mod_base = OTHER; note = 2'-fluoroadenosine-3'-phosphate
  modified_base 11: mod_base = OTHER; note = 2'-fluorouridine-3'-phosphate
  modified_base 12: mod_base = OTHER; note = 2'-O-methylguanosine-3'-phosphate
  modified_base 13: mod_base = OTHER; note = 2'-O-methyladenosine-3'-phosphate
  modified_base 14: mod_base = OTHER; note = 2'-O-methyladenosine-3'-phosphate
  modified_base 15: mod_base = OTHER; note = 2'-O-methylguanosine-3'-phosphate
  modified_base 16: mod_base = OTHER; note = 2'-O-methyladenosine-3'-phosphate
  modified_base 17: mod_base = OTHER; note = 2'-O-methyladenosine-3'-phosphate
  modified_base 18: mod_base = OTHER; note = 2'-O-methyladenosine-3'-phosphate
  modified_base 19: mod_base = OTHER; note = 2'-O-methylcytidine-3'-phosphate
  modified_base 20: mod_base = OTHER; note = 2'-O-methyluridine-3'-phosphate
  modified_base 21: mod_base = OTHER; note = 2'-O-methyluridine-3'-phosphate N-[tris(GalNAc-alkyl)-amidodecanoyl)]-4-hydroxyprolinol (Hyp-(GalNAc-alkyl)3)
ctcaactggatgaagaaactt

SEQ ID NO: 2156 - RNA, 21 nt, synthetic construct
  source 1..21: mol_type = other RNA
  modified_base 1: mod_base = OTHER; note = 2'-O-methyladenosine-3'-phosphorothioate
  modified_base 2: mod_base = OTHER; note = 2'-O-methyladenosine-3'-phosphorothioate
  modified_base 3: mod_base = OTHER; note = 2'-O-methylguanosine-3'-phosphate
  modified_base 4: mod_base = OTHER; note = 2'-O-methylguanosine-3'-phosphate
  modified_base 5: mod_base = OTHER; note = 2'-O-methyladenosine-3'-phosphate
  modified_base 6: mod_base = OTHER; note = 2'-O-methyluridine-3'-phosphate
  modified_base 7: mod_base = OTHER; note = 2'-O-methylcytidine-3'-phosphate
  modified_base 8: mod_base = OTHER; note = 2'-O-methyluridine-3'-phosphate
  modified_base 9: mod_base = OTHER; note = 2'-fluorouridine-3'-phosphate
  modified_base 10: mod_base = OTHER; note = 2'-fluoroadenosine-3'-phosphate
  modified_base 11: mod_base = OTHER; note = 2'-fluorouridine-3'-phosphate
  modified_base 12: mod_base = OTHER; note = 2'-O-methylguanosine-3'-phosphate
  modified_base 13: mod_base = OTHER; note = 2'-O-methyladenosine-3'-phosphate
  modified_base 14: mod_base = OTHER; note = 2'-O-methylcytidine-3'-phosphate
  modified_base 15: mod_base = OTHER; note = 2'-O-methylcytidine-3'-phosphate
  modified_base 16: mod_base = OTHER; note = 2'-O-methyluridine-3'-phosphate
  modified_base 17: mod_base = OTHER; note = 2'-O-methylguanosine-3'-phosphate
  modified_base 18: mod_base = OTHER; note = 2'-O-methylcytidine-3'-phosphate
  modified_base 19: mod_base = OTHER; note = 2'-O-methyladenosine-3'-phosphate
  modified_base 20: mod_base = OTHER; note = 2'-O-methylguanosine-3'-phosphate
  modified_base 21: mod_base = OTHER; note = 2'-O-methyluridine-3'-phosphate N-[tris(GalNAc-alkyl)-amidodecanoyl)]-4-hydroxyprolinol (Hyp-(GalNAc-alkyl)3)
aaggatcttatgacctgcagt

SEQ ID NO: 2157 - RNA, 21 nt, synthetic construct
  source 1..21: mol_type = other RNA
  modified_base 1: mod_base = OTHER; note = 2'-O-methyladenosine-3'-phosphorothioate
  modified_base 2: mod_base = OTHER; note = 2'-O-methylguanosine-3'-phosphorothioate
  modified_base 3: mod_base = OTHER; note = 2'-O-methylguanosine-3'-phosphate
  modified_base 4: mod_base = OTHER; note = 2'-O-methyladenosine-3'-phosphate
  modified_base 5: mod_base = OTHER; note = 2'-O-methyluridine-3'-phosphate
  modified_base 6: mod_base = OTHER; note = 2'-O-methylcytidine-3'-phosphate
  modified_base 7: mod_base = OTHER; note = 2'-O-methyluridine-3'-phosphate
  modified_base 8: mod_base = OTHER; note = 2'-O-methyluridine-3'-phosphate
  modified_base 9: mod_base = OTHER; note = 2'-fluoroadenosine-3'-phosphate
  modified_base 10: mod_base = OTHER; note = 2'-fluorouridine-3'-phosphate
  modified_base 11: mod_base = OTHER; note = 2'-fluoroguanosine-3'-phosphate
  modified_base 12: mod_base = OTHER; note = 2'-O-methyladenosine-3'-phosphate
  modified_base 13: mod_base = OTHER; note = 2'-O-methylcytidine-3'-phosphate
  modified_base 14: mod_base = OTHER; note = 2'-O-methylcytidine-3'-phosphate
  modified_base 15: mod_base = OTHER; note = 2'-O-methyluridine-3'-phosphate
  modified_base 16: mod_base = OTHER; note = 2'-O-methylguanosine-3'-phosphate
  modified_base 17: mod_base = OTHER; note = 2'-O-methylcytidine-3'-phosphate
  modified_base 18: mod_base = OTHER; note = 2'-O-methyladenosine-3'-phosphate
  modified_base 19: mod_base = OTHER; note = 2'-O-methylguanosine-3'-phosphate
  modified_base 20: mod_base = OTHER; note = 2'-O-methylguanosine-3'-phosphate
  modified_base 21: mod_base = OTHER; note = 2'-O-methyluridine-3'-phosphate N-[tris(GalNAc-alkyl)-amidodecanoyl)]-4-hydroxyprolinol (Hyp-(GalNAc-alkyl)3)
aggatcttatgacctgcaggt

SEQ ID NO: 2158 - RNA, 21 nt, synthetic construct
  source 1..21: mol_type = other RNA
  modified_base 1: mod_base = OTHER; note = 2'-O-methylcytidine-3'-phosphorothioate
  modified_base 2: mod_base = OTHER; note = 2'-O-methyluridine-3'-phosphorothioate
  modified_base 3: mod_base = OTHER; note = 2'-O-methyluridine-3'-phosphate
  modified_base 4: mod_base = OTHER; note = 2'-O-methyladenosine-3'-phosphate
  modified_base 5: mod_base = OTHER; note = 2'-O-methyluridine-3'-phosphate
  modified_base 6: mod_base = OTHER; note = 2'-O-methylguanosine-3'-phosphate
  modified_base 7: mod_base = OTHER; note = 2'-O-methyladenosine-3'-phosphate
  modified_base 8: mod_base = OTHER; note = 2'-O-methylcytidine-3'-phosphate
  modified_base 9: mod_base = OTHER; note = 2'-fluorocytidine-3'-phosphate
  modified_base 10: mod_base = OTHER; note = 2'-fluorouridine-3'-phosphate
  modified_base 11: mod_base = OTHER; note = 2'-fluoroguanosine-3'-phosphate
  modified_base 12: mod_base = OTHER; note = 2'-O-methylcytidine-3'-phosphate
  modified_base 13: mod_base = OTHER; note = 2'-O-methyladenosine-3'-phosphate
  modified_base 14: mod_base = OTHER; note = 2'-O-methylguanosine-3'-phosphate
  modified_base 15: mod_base = OTHER; note = 2'-O-methylguanosine-3'-phosphate
  modified_base 16: mod_base = OTHER; note = 2'-O-methyladenosine-3'-phosphate
  modified_base 17: mod_base = OTHER; note = 2'-O-methylcytidine-3'-phosphate
  modified_base 18: mod_base = OTHER; note = 2'-O-methylcytidine-3'-phosphate
  modified_base 19: mod_base = OTHER; note = 2'-O-methyluridine-3'-phosphate
  modified_base 20: mod_base = OTHER; note = 2'-O-methylguanosine-3'-phosphate
  modified_base 21: mod_base = OTHER; note = 2'-O-methyluridine-3'-phosphate N-[tris(GalNAc-alkyl)-amidodecanoyl)]-4-hydroxyprolinol (Hyp-(GalNAc-alkyl)3)
cttatgacctgcaggacctgt

SEQ ID NO: 2159 - RNA, 21 nt, synthetic construct
  source 1..21: mol_type = other RNA
  modified_base 1: mod_base = OTHER; note = 2'-O-methylcytidine-3'-phosphorothioate
  modified_base 2: mod_base = OTHER; note = 2'-O-methylguanosine-3'-phosphorothioate
  modified_base 3: mod_base = OTHER; note = 2'-O-methyladenosine-3'-phosphate
  modified_base 4: mod_base = OTHER; note = 2'-O-methylguanosine-3'-phosphate
  modified_base 5: mod_base = OTHER; note = 2'-O-methylcytidine-3'-phosphate
  modified_base 6: mod_base = OTHER; note = 2'-O-methyluridine-3'-phosphate
  modified_base 7: mod_base = OTHER; note = 2'-O-methylguanosine-3'-phosphate
  modified_base 8: mod_base = OTHER; note = 2'-O-methyladenosine-3'-phosphate
  modified_base 9: mod_base = OTHER; note = 2'-fluoroadenosine-3'-phosphate
  modified_base 10: mod_base = OTHER; note = 2'-fluorocytidine-3'-phosphate
  modified_base 11: mod_base = OTHER; note = 2'-fluorocytidine-3'-phosphate
  modified_base 12: mod_base = OTHER; note = 2'-O-methyluridine-3'-phosphate
  modified_base 13: mod_base = OTHER; note = 2'-O-methylguanosine-3'-phosphate
  modified_base 14: mod_base = OTHER; note = 2'-O-methylcytidine-3'-phosphate
  modified_base 15: mod_base = OTHER; note = 2'-O-methyladenosine-3'-phosphate
  modified_base 16: mod_base = OTHER; note = 2'-O-methyladenosine-3'-phosphate
  modified_base 17: mod_base = OTHER; note = 2'-O-methyladenosine-3'-phosphate
  modified_base 18: mod_base = OTHER; note = 2'-O-methyladenosine-3'-phosphate
  modified_base 19: mod_base = OTHER; note = 2'-O-methyladenosine-3'-phosphate
  modified_base 20: mod_base = OTHER; note = 2'-O-methyluridine-3'-phosphate
  modified_base 21: mod_base = OTHER; note = 2'-O-methyluridine-3'-phosphate N-[tris(GalNAc-alkyl)-amidodecanoyl)]-4-hydroxyprolinol (Hyp-(GalNAc-alkyl)3)
cgagctgaacctgcaaaaatt

SEQ ID NO: 2160 - RNA, 21 nt, synthetic construct
  source 1..21: mol_type = other RNA
  modified_base 1: mod_base = OTHER; note = 2'-O-methylguanosine-3'-phosphorothioate
  modified_base 2: mod_base = OTHER; note = 2'-O-methyladenosine-3'-phosphorothioate
  modified_base 3: mod_base = OTHER; note = 2'-O-methylguanosine-3'-phosphate
  modified_base 4: mod_base = OTHER; note = 2'-O-methylcytidine-3'-phosphate
  modified_base 5: mod_base = OTHER; note = 2'-O-methyluridine-3'-phosphate
  modified_base 6: mod_base = OTHER; note = 2'-O-methylguanosine-3'-phosphate
  modified_base 7: mod_base = OTHER; note = 2'-O-methyladenosine-3'-phosphate
  modified_base 8: mod_base = OTHER; note = 2'-O-methyladenosine-3'-phosphate
  modified_base 9: mod_base = OTHER; note = 2'-fluorocytidine-3'-phosphate
  modified_base 10: mod_base = OTHER; note = 2'-fluorocytidine-3'-phosphate
  modified_base 11: mod_base = OTHER; note = 2'-fluorouridine-3'-phosphate
  modified_base 12: mod_base = OTHER; note = 2'-O-methylguanosine-3'-phosphate
  modified_base 13: mod_base = OTHER; note = 2'-O-methylcytidine-3'-phosphate
  modified_base 14: mod_base = OTHER; note = 2'-O-methyladenosine-3'-phosphate
  modified_base 15: mod_base = OTHER; note = 2'-O-methyladenosine-3'-phosphate
  modified_base 16: mod_base = OTHER; note = 2'-O-methyladenosine-3'-phosphate
  modified_base 17: mod_base = OTHER; note = 2'-O-methyladenosine-3'-phosphate
  modified_base 18: mod_base = OTHER; note = 2'-O-methyladenosine-3'-phosphate
  modified_base 19: mod_base = OTHER; note = 2'-O-methyluridine-3'-phosphate
  modified_base 20: mod_base = OTHER; note = 2'-O-methyluridine-3'-phosphate
  modified_base 21: mod_base = OTHER; note = 2'-O-methyluridine-3'-phosphate N-[tris(GalNAc-alkyl)-amidodecanoyl)]-4-hydroxyprolinol (Hyp-(GalNAc-alkyl)3)
gagctgaacctgcaaaaattt

SEQ ID NO: 2161 - RNA, 21 nt, synthetic construct
  source 1..21: mol_type = other RNA
  modified_base 1: mod_base = OTHER; note = 2'-O-methyladenosine-3'-phosphorothioate
  modified_base 2: mod_base = OTHER; note = 2'-O-methylguanosine-3'-phosphorothioate
  modified_base 3: mod_base = OTHER; note = 2'-O-methylcytidine-3'-phosphate
  modified_base 4: mod_base = OTHER; note = 2'-O-methyluridine-3'-phosphate
  modified_base 5: mod_base = OTHER; note = 2'-O-methylguanosine-3'-phosphate
  modified_base 6: mod_base = OTHER; note = 2'-O-methyladenosine-3'-phosphate
  modified_base 7: mod_base = OTHER; note = 2'-O-methyladenosine-3'-phosphate
  modified_base 8: mod_base = OTHER; note = 2'-O-methylcytidine-3'-phosphate
  modified_base 9: mod_base = OTHER; note = 2'-fluorocytidine-3'-phosphate
  modified_base 10: mod_base = OTHER; note = 2'-fluorouridine-3'-phosphate
  modified_base 11: mod_base = OTHER; note = 2'-fluoroguanosine-3'-phosphate
  modified_base 12: mod_base = OTHER; note = 2'-O-methylcytidine-3'-phosphate
  modified_base 13: mod_base = OTHER; note = 2'-O-methyladenosine-3'-phosphate
  modified_base 14: mod_base = OTHER; note = 2'-O-methyladenosine-3'-phosphate
  modified_base 15: mod_base = OTHER; note = 2'-O-methyladenosine-3'-phosphate
  modified_base 16: mod_base = OTHER; note = 2'-O-methyladenosine-3'-phosphate
  modified_base 17: mod_base = OTHER; note = 2'-O-methyladenosine-3'-phosphate
  modified_base 18: mod_base = OTHER; note = 2'-O-methyluridine-3'-phosphate
  modified_base 19: mod_base = OTHER; note = 2'-O-methyluridine-3'-phosphate
  modified_base 20: mod_base = OTHER; note = 2'-O-methylguanosine-3'-phosphate
  modified_base 21: mod_base = OTHER; note = 2'-O-methyluridine-3'-phosphate N-[tris(GalNAc-alkyl)-amidodecanoyl)]-4-hydroxyprolinol (Hyp-(GalNAc-alkyl)3)
agctgaacctgcaaaaattgt

SEQ ID NO: 2162 - RNA, 21 nt, synthetic construct
  source 1..21: mol_type = other RNA
  modified_base 1: mod_base = OTHER; note = 2'-O-methylguanosine-3'-phosphorothioate
  modified_base 2: mod_base = OTHER; note = 2'-O-methylcytidine-3'-phosphorothioate
  modified_base 3: mod_base = OTHER; note = 2'-O-methyluridine-3'-phosphate
  modified_base 4: mod_base = OTHER; note = 2'-O-methylguanosine-3'-phosphate
  modified_base 5: mod_base = OTHER; note = 2'-O-methyladenosine-3'-phosphate
  modified_base 6: mod_base = OTHER; note = 2'-O-methyladenosine-3'-phosphate
  modified_base 7: mod_base = OTHER; note = 2'-O-methylcytidine-3'-phosphate
  modified_base 8: mod_base = OTHER; note = 2'-O-methylcytidine-3'-phosphate
  modified_base 9: mod_base = OTHER; note = 2'-fluorouridine-3'-phosphate
  modified_base 10: mod_base = OTHER; note = 2'-fluoroguanosine-3'-phosphate
  modified_base 11: mod_base = OTHER; note = 2'-fluorocytidine-3'-phosphate
  modified_base 12: mod_base = OTHER; note = 2'-O-methyladenosine-3'-phosphate
  modified_base 13: mod_base = OTHER; note = 2'-O-methyladenosine-3'-phosphate
  modified_base 14: mod_base = OTHER; note = 2'-O-methyladenosine-3'-phosphate
  modified_base 15: mod_base = OTHER; note = 2'-O-methyladenosine-3'-phosphate
  modified_base 16: mod_base = OTHER; note = 2'-O-methyladenosine-3'-phosphate
  modified_base 17: mod_base = OTHER; note = 2'-O-methyluridine-3'-phosphate
  modified_base 18: mod_base = OTHER; note = 2'-O-methyluridine-3'-phosphate
  modified_base 19: mod_base = OTHER; note = 2'-O-methylguanosine-3'-phosphate
  modified_base 20: mod_base = OTHER; note = 2'-O-methyladenosine-3'-phosphate
  modified_base 21: mod_base = OTHER; note = 2'-O-methyluridine-3'-phosphate N-[tris(GalNAc-alkyl)-amidodecanoyl)]-4-hydroxyprolinol (Hyp-(GalNAc-alkyl)3)
gctgaacctgcaaaaattgat

SEQ ID NO: 2163 - RNA, 21 nt, synthetic construct
  source 1..21: mol_type = other RNA
  modified_base 1: mod_base = OTHER; note = 2'-O-methylcytidine-3'-phosphorothioate
  modified_base 2: mod_base = OTHER; note = 2'-O-methyluridine-3'-phosphorothioate
  modified_base 3: mod_base = OTHER; note = 2'-O-methylguanosine-3'-phosphate
  modified_base 4: mod_base = OTHER; note = 2'-O-methyladenosine-3'-phosphate
  modified_base 5: mod_base = OTHER; note = 2'-O-methyladenosine-3'-phosphate
  modified_base 6: mod_base = OTHER; note = 2'-O-methylcytidine-3'-phosphate
  modified_base 7: mod_base = OTHER; note = 2'-O-methylcytidine-3'-phosphate
  modified_base 8: mod_base = OTHER; note = 2'-O-methyluridine-3'-phosphate
  modified_base 9: mod_base = OTHER; note = 2'-fluoroguanosine-3'-phosphate
  modified_base 10: mod_base = OTHER; note = 2'-fluorocytidine-3'-phosphate
  modified_base 11: mod_base = OTHER; note = 2'-fluoroadenosine-3'-phosphate
  modified_base 12: mod_base = OTHER; note = 2'-O-methyladenosine-3'-phosphate
  modified_base 13: mod_base = OTHER; note = 2'-O-methyladenosine-3'-phosphate
  modified_base 14: mod_base = OTHER; note = 2'-O-methyladenosine-3'-phosphate
  modified_base 15: mod_base = OTHER; note = 2'-O-methyladenosine-3'-phosphate
  modified_base 16: mod_base = OTHER; note = 2'-O-methyluridine-3'-phosphate
  modified_base 17: mod_base = OTHER; note = 2'-O-methyluridine-3'-phosphate
  modified_base 18: mod_base = OTHER; note = 2'-O-methylguanosine-3'-phosphate
  modified_base 19: mod_base = OTHER; note = 2'-O-methyladenosine-3'-phosphate
  modified_base 20: mod_base = OTHER; note = 2'-O-methylguanosine-3'-phosphate
  modified_base 21: mod_base = OTHER; note = 2'-O-methyluridine-3'-phosphate N-[tris(GalNAc-alkyl)-amidodecanoyl)]-4-hydroxyprolinol (Hyp-(GalNAc-alkyl)3)
ctgaacctgcaaaaattgagt

SEQ ID NO: 2164 - RNA, 21 nt, synthetic construct
  source 1..21: mol_type = other RNA
  modified_base 1: mod_base = OTHER; note = 2'-O-methyluridine-3'-phosphorothioate
  modified_base 2: mod_base = OTHER; note = 2'-O-methylguanosine-3'-phosphorothioate
  modified_base 3: mod_base = OTHER; note = 2'-O-methyladenosine-3'-phosphate
  modified_base 4: mod_base = OTHER; note = 2'-O-methyladenosine-3'-phosphate
  modified_base 5: mod_base = OTHER; note = 2'-O-methylcytidine-3'-phosphate
  modified_base 6: mod_base = OTHER; note = 2'-O-methylcytidine-3'-phosphate
  modified_base 7: mod_base = OTHER; note = 2'-O-methyluridine-3'-phosphate
  modified_base 8: mod_base = OTHER; note = 2'-O-methylguanosine-3'-phosphate
  modified_base 9: mod_base = OTHER; note = 2'-fluorocytidine-3'-phosphate
  modified_base 10: mod_base = OTHER; note = 2'-fluoroadenosine-3'-phosphate
  modified_base 11: mod_base = OTHER; note = 2'-fluoroadenosine-3'-phosphate
  modified_base 12: mod_base = OTHER; note = 2'-O-methyladenosine-3'-phosphate
  modified_base 13: mod_base = OTHER; note = 2'-O-methyladenosine-3'-phosphate
  modified_base 14: mod_base = OTHER; note = 2'-O-methyladenosine-3'-phosphate
  modified_base 15: mod_base = OTHER; note = 2'-O-methyluridine-3'-phosphate
  modified_base 16: mod_base = OTHER; note = 2'-O-methyluridine-3'-phosphate
  modified_base 17: mod_base = OTHER; note = 2'-O-methylguanosine-3'-phosphate
  modified_base 18: mod_base = OTHER; note = 2'-O-methyladenosine-3'-phosphate
  modified_base 19: mod_base = OTHER; note = 2'-O-methylguanosine-3'-phosphate
  modified_base 20: mod_base = OTHER; note = 2'-O-methylcytidine-3'-phosphate
  modified_base 21: mod_base = OTHER; note = 2'-O-methyluridine-3'-phosphate N-[tris(GalNAc-alkyl)-amidodecanoyl)]-4-hydroxyprolinol (Hyp-(GalNAc-alkyl)3)
tgaacctgcaaaaattgagct

SEQ ID NO: 2165 - RNA, 21 nt, synthetic construct
  source 1..21: mol_type = other RNA
  modified_base 1: mod_base = OTHER; note = 2'-O-methylguanosine-3'-phosphorothioate
  modified_base 2: mod_base = OTHER; note = 2'-O-methyladenosine-3'-phosphorothioate
  modified_base 3: mod_base = OTHER; note = 2'-O-methyladenosine-3'-phosphate
  modified_base 4: mod_base = OTHER; note = 2'-O-methylcytidine-3'-phosphate
  modified_base 5: mod_base = OTHER; note = 2'-O-methylcytidine-3'-phosphate
  modified_base 6: mod_base = OTHER; note = 2'-O-methyluridine-3'-phosphate
  modified_base 7: mod_base = OTHER; note = 2'-O-methylguanosine-3'-phosphate
  modified_base 8: mod_base = OTHER; note = 2'-O-methylcytidine-3'-phosphate
  modified_base 9: mod_base = OTHER; note = 2'-fluoroadenosine-3'-phosphate
  modified_base 10: mod_base = OTHER; note = 2'-fluoroadenosine-3'-phosphate
  modified_base 11: mod_base = OTHER; note = 2'-fluoroadenosine-3'-phosphate
  modified_base 12: mod_base = OTHER; note = 2'-O-methyladenosine-3'-phosphate
  modified_base 13: mod_base = OTHER; note = 2'-O-methyladenosine-3'-phosphate
  modified_base 14: mod_base = OTHER; note = 2'-O-methyluridine-3'-phosphate
  modified_base 15: mod_base = OTHER; note = 2'-O-methyluridine-3'-phosphate
  modified_base 16: mod_base = OTHER; note = 2'-O-methylguanosine-3'-phosphate
  modified_base 17: mod_base = OTHER; note = 2'-O-methyladenosine-3'-phosphate
  modified_base 18: mod_base = OTHER; note = 2'-O-methylguanosine-3'-phosphate
  modified_base 19: mod_base = OTHER; note = 2'-O-methylcytidine-3'-phosphate
  modified_base 20: mod_base = OTHER; note = 2'-O-methyladenosine-3'-phosphate
  modified_base 21: mod_base = OTHER; note = 2'-O-methyluridine-3'-phosphate N-[tris(GalNAc-alkyl)-amidodecanoyl)]-4-hydroxyprolinol (Hyp-(GalNAc-alkyl)3)
gaacctgcaaaaattgagcat

SEQ ID NO: 2166 - RNA, 21 nt, synthetic construct
  source 1..21: mol_type = other RNA
  modified_base 1: mod_base = OTHER; note = 2'-O-methyluridine-3'-phosphorothioate
  modified_base 2: mod_base = OTHER; note = 2'-O-methylguanosine-3'-phosphorothioate
  modified_base 3: mod_base = OTHER; note = 2'-O-methylcytidine-3'-phosphate
  modified_base 4: mod_base = OTHER; note = 2'-O-methyladenosine-3'-phosphate
  modified_base 5: mod_base = OTHER; note = 2'-O-methyladenosine-3'-phosphate
  modified_base 6: mod_base = OTHER; note = 2'-O-methyladenosine-3'-phosphate
  modified_base 7: mod_base = OTHER; note = 2'-O-methyladenosine-3'-phosphate
  modified_base 8: mod_base = OTHER; note = 2'-O-methyladenosine-3'-phosphate
  modified_base 9: mod_base = OTHER; note = 2'-fluorouridine-3'-phosphate
  modified_base 10: mod_base = OTHER; note = 2'-fluorouridine-3'-phosphate
  modified_base 11: mod_base = OTHER; note = 2'-fluoroguanosine-3'-phosphate
  modified_base 12: mod_base = OTHER; note = 2'-O-methyladenosine-3'-phosphate
  modified_base 13: mod_base = OTHER; note = 2'-O-methylguanosine-3'-phosphate
  modified_base 14: mod_base = OTHER; note = 2'-O-methylcytidine-3'-phosphate
  modified_base 15: mod_base = OTHER; note = 2'-O-methyladenosine-3'-phosphate
  modified_base 16: mod_base = OTHER; note = 2'-O-methyladenosine-3'-phosphate
  modified_base 17: mod_base = OTHER; note = 2'-O-methyluridine-3'-phosphate
  modified_base 18: mod_base = OTHER; note = 2'-O-methylguanosine-3'-phosphate
  modified_base 19: mod_base = OTHER; note = 2'-O-methyladenosine-3'-phosphate
  modified_base 20: mod_base = OTHER; note = 2'-O-methylcytidine-3'-phosphate
  modified_base 21: mod_base = OTHER; note = 2'-O-methyluridine-3'-phosphate N-[tris(GalNAc-alkyl)-amidodecanoyl)]-4-hydroxyprolinol (Hyp-(GalNAc-alkyl)3)
tgcaaaaattgagcaatgact

SEQ ID NO: 2167 - RNA, 21 nt, synthetic construct
  source 1..21: mol_type = other RNA
  modified_base 1: mod_base = OTHER; note = 2'-O-methylguanosine-3'-phosphorothioate
  modified_base 2: mod_base = OTHER; note = 2'-O-methyladenosine-3'-phosphorothioate
  modified_base 3: mod_base = OTHER; note = 2'-O-methylguanosine-3'-phosphate
  modified_base 4: mod_base = OTHER; note = 2'-O-methylguanosine-3'-phosphate
  modified_base 5: mod_base = OTHER; note = 2'-O-methyluridine-3'-phosphate
  modified_base 6: mod_base = OTHER; note = 2'-O-methylguanosine-3'-phosphate
  modified_base 7: mod_base = OTHER; note = 2'-O-methylcytidine-3'-phosphate
  modified_base 8: mod_base = OTHER; note = 2'-O-methyluridine-3'-phosphate
  modified_base 9: mod_base = OTHER; note = 2'-fluoroguanosine-3'-phosphate
  modified_base 10: mod_base = OTHER; note = 2'-fluoroadenosine-3'-phosphate
  modified_base 11: mod_base = OTHER; note = 2'-fluoroadenosine-3'-phosphate
  modified_base 12: mod_base = OTHER; note = 2'-O-methylcytidine-3'-phosphate
  modified_base 13: mod_base = OTHER; note = 2'-O-methyladenosine-3'-phosphate
  modified_base 14: mod_base = OTHER; note = 2'-O-methylguanosine-3'-phosphate
  modified_base 15: mod_base = OTHER; note = 2'-O-methylcytidine-3'-phosphate
  modified_base 16: mod_base = OTHER; note = 2'-O-methyladenosine-3'-phosphate
  modified_base 17: mod_base = OTHER; note = 2'-O-methyluridine-3'-phosphate
  modified_base 18: mod_base = OTHER; note = 2'-O-methyluridine-3'-phosphate
  modified_base 19: mod_base = OTHER; note = 2'-O-methyluridine-3'-phosphate
  modified_base 20: mod_base = OTHER; note = 2'-O-methyluridine-3'-phosphate
  modified_base 21: mod_base = OTHER; note = 2'-O-methyluridine-3'-phosphate N-[tris(GalNAc-alkyl)-amidodecanoyl)]-4-hydroxyprolinol (Hyp-(GalNAc-alkyl)3)
gaggtgctgaacagcattttt

SEQ ID NO: 2168 - RNA, 21 nt, synthetic construct
  source 1..21: mol_type = other RNA
  modified_base 1: mod_base = OTHER; note = 2'-O-methyladenosine-3'-phosphorothioate
  modified_base 2: mod_base = OTHER; note = 2'-O-methylguanosine-3'-phosphorothioate
  modified_base 3: mod_base = OTHER; note = 2'-O-methylguanosine-3'-phosphate
  modified_base 4: mod_base = OTHER; note = 2'-O-methyluridine-3'-phosphate
  modified_base 5: mod_base = OTHER; note = 2'-O-methylguanosine-3'-phosphate
  modified_base 6: mod_base = OTHER; note = 2'-O-methylcytidine-3'-phosphate
  modified_base 7: mod_base = OTHER; note = 2'-O-methyluridine-3'-phosphate
  modified_base 8: mod_base = OTHER; note = 2'-O-methylguanosine-3'-phosphate
  modified_base 9: mod_base = OTHER; note = 2'-fluoroadenosine-3'-phosphate
  modified_base 10: mod_base = OTHER; note = 2'-fluoroadenosine-3'-phosphate
  modified_base 11: mod_base = OTHER; note = 2'-fluorocytidine-3'-phosphate
  modified_base 12: mod_base = OTHER; note = 2'-O-methyladenosine-3'-phosphate
  modified_base 13: mod_base = OTHER; note = 2'-O-methylguanosine-3'-phosphate
  modified_base 14: mod_base = OTHER; note = 2'-O-methylcytidine-3'-phosphate
  modified_base 15: mod_base = OTHER; note = 2'-O-methyladenosine-3'-phosphate
  modified_base 16: mod_base = OTHER; note = 2'-O-methyluridine-3'-phosphate
  modified_base 17: mod_base = OTHER; note = 2'-O-methyluridine-3'-phosphate
  modified_base 18: mod_base = OTHER; note = 2'-O-methyluridine-3'-phosphate
  modified_base 19: mod_base = OTHER; note = 2'-O-methyluridine-3'-phosphate
  modified_base 20: mod_base = OTHER; note = 2'-O-methyluridine-3'-phosphate
  modified_base 21: mod_base = OTHER; note = 2'-O-methyluridine-3'-phosphate N-[tris(GalNAc-alkyl)-amidodecanoyl)]-4-hydroxyprolinol (Hyp-(GalNAc-alkyl)3)
aggtgctgaacagcatttttt

SEQ ID NO: 2169 - RNA, 21 nt, synthetic construct
  source 1..21: mol_type = other RNA
  modified_base 1: mod_base = OTHER; note = 2'-O-methylguanosine-3'-phosphorothioate
  modified_base 2: mod_base = OTHER; note = 2'-O-methylguanosine-3'-phosphorothioate
  modified_base 3: mod_base = OTHER; note = 2'-O-methyluridine-3'-phosphate
  modified_base 4: mod_base = OTHER; note = 2'-O-methylguanosine-3'-phosphate
  modified_base 5: mod_base = OTHER; note = 2'-O-methylcytidine-3'-phosphate
  modified_base 6: mod_base = OTHER; note = 2'-O-methyluridine-3'-phosphate
  modified_base 7: mod_base = OTHER; note = 2'-O-methylguanosine-3'-phosphate
  modified_base 8: mod_base = OTHER; note = 2'-O-methyladenosine-3'-phosphate
  modified_base 9: mod_base = OTHER; note = 2'-fluoroadenosine-3'-phosphate
  modified_base 10: mod_base = OTHER; note = 2'-fluorocytidine-3'-phosphate
  modified_base 11: mod_base = OTHER; note = 2'-fluoroadenosine-3'-phosphate
  modified_base 12: mod_base = OTHER; note = 2'-O-methylguanosine-3'-phosphate
  modified_base 13: mod_base = OTHER; note = 2'-O-methylcytidine-3'-phosphate
  modified_base 14: mod_base = OTHER; note = 2'-O-methyladenosine-3'-phosphate
  modified_base 15: mod_base = OTHER; note = 2'-O-methyluridine-3'-phosphate
  modified_base 16: mod_base = OTHER; note = 2'-O-methyluridine-3'-phosphate
  modified_base 17: mod_base = OTHER; note = 2'-O-methyluridine-3'-phosphate
  modified_base 18: mod_base = OTHER; note = 2'-O-methyluridine-3'-phosphate
  modified_base 19: mod_base = OTHER; note = 2'-O-methyluridine-3'-phosphate
  modified_base 20: mod_base = OTHER; note = 2'-O-methyluridine-3'-phosphate
  modified_base 21: mod_base = OTHER; note = 2'-O-methyluridine-3'-phosphate N-[tris(GalNAc-alkyl)-amidodecanoyl)]-4-hydroxyprolinol (Hyp-(GalNAc-alkyl)3)
ggtgctgaacagcattttttt

SEQ ID NO: 2170 - RNA, 21 nt, synthetic construct
  source 1..21: mol_type = other RNA
  modified_base 1: mod_base = OTHER; note = 2'-O-methylguanosine-3'-phosphorothioate
  modified_base 2: mod_base = OTHER; note = 2'-O-methyluridine-3'-phosphorothioate
  modified_base 3: mod_base = OTHER; note = 2'-O-methylguanosine-3'-phosphate
  modified_base 4: mod_base = OTHER; note = 2'-O-methylcytidine-3'-phosphate
  modified_base 5: mod_base = OTHER; note = 2'-O-methyluridine-3'-phosphate
  modified_base 6: mod_base = OTHER; note = 2'-O-methylguanosine-3'-phosphate
  modified_base 7: mod_base = OTHER; note = 2'-O-methyladenosine-3'-phosphate
  modified_base 8: mod_base = OTHER; note = 2'-O-methyladenosine-3'-phosphate
  modified_base 9: mod_base = OTHER; note = 2'-fluorocytidine-3'-phosphate
  modified_base 10: mod_base = OTHER; note = 2'-fluoroadenosine-3'-phosphate
  modified_base 11: mod_base = OTHER; note = 2'-fluoroguanosine-3'-phosphate
  modified_base 12: mod_base = OTHER; note = 2'-O-methylcytidine-3'-phosphate
  modified_base 13: mod_base = OTHER; note = 2'-O-methyladenosine-3'-phosphate
  modified_base 14: mod_base = OTHER; note = 2'-O-methyluridine-3'-phosphate
  modified_base 15: mod_base = OTHER; note = 2'-O-methyluridine-3'-phosphate
  modified_base 16: mod_base = OTHER; note = 2'-O-methyluridine-3'-phosphate
  modified_base 17: mod_base = OTHER; note = 2'-O-methyluridine-3'-phosphate
  modified_base 18: mod_base = OTHER; note = 2'-O-methyluridine-3'-phosphate
  modified_base 19: mod_base = OTHER; note = 2'-O-methyluridine-3'-phosphate
  modified_base 20: mod_base = OTHER; note = 2'-O-methyluridine-3'-phosphate
  modified_base 21: mod_base = OTHER; note = 2'-O-methyluridine-3'-phosphate N-[tris(GalNAc-alkyl)-amidodecanoyl)]-4-hydroxyprolinol (Hyp-(GalNAc-alkyl)3)
gtgctgaacagcatttttttt

SEQ ID NO: 2171 - RNA, 21 nt, synthetic construct
  source 1..21: mol_type = other RNA
  modified_base 1: mod_base = OTHER; note = 2'-O-methyluridine-3'-phosphorothioate
  modified_base 2: mod_base = OTHER; note = 2'-O-methylguanosine-3'-phosphorothioate
  modified_base 3: mod_base = OTHER; note = 2'-O-methylcytidine-3'-phosphate
  modified_base 4: mod_base = OTHER; note = 2'-O-methyluridine-3'-phosphate
  modified_base 5: mod_base = OTHER; note = 2'-O-methylguanosine-3'-phosphate
  modified_base 6: mod_base = OTHER; note = 2'-O-methyladenosine-3'-phosphate
  modified_base 7: mod_base = OTHER; note = 2'-O-methyladenosine-3'-phosphate
  modified_base 8: mod_base = OTHER; note = 2'-O-methylcytidine-3'-phosphate
  modified_base 9: mod_base = OTHER; note = 2'-fluoroadenosine-3'-phosphate
  modified_base 10: mod_base = OTHER; note = 2'-fluoroguanosine-3'-phosphate
  modified_base 11: mod_base = OTHER; note = 2'-fluorocytidine-3'-phosphate
  modified_base 12: mod_base = OTHER; note = 2'-O-methyladenosine-3'-phosphate
  modified_base 13: mod_base = OTHER; note = 2'-O-methyluridine-3'-phosphate
  modified_base 14: mod_base = OTHER; note = 2'-O-methyluridine-3'-phosphate
  modified_base 15: mod_base = OTHER; note = 2'-O-methyluridine-3'-phosphate
  modified_base 16: mod_base = OTHER; note = 2'-O-methyluridine-3'-phosphate
  modified_base 17: mod_base = OTHER; note = 2'-O-methyluridine-3'-phosphate
  modified_base 18: mod_base = OTHER; note = 2'-O-methyluridine-3'-phosphate
  modified_base 19: mod_base = OTHER; note = 2'-O-methyluridine-3'-phosphate
  modified_base 20: mod_base = OTHER; note = 2'-O-methyluridine-3'-phosphate
  modified_base 21: mod_base = OTHER; note = 2'-O-methyluridine-3'-phosphate N-[tris(GalNAc-alkyl)-amidodecanoyl)]-4-hydroxyprolinol (Hyp-(GalNAc-alkyl)3)
tgctgaacagcattttttttt

SEQ ID NO: 2172 - RNA, 21 nt, synthetic construct
  source 1..21: mol_type = other RNA
  modified_base 1: mod_base = OTHER; note = 2'-O-methylguanosine-3'-phosphorothioate
  modified_base 2: mod_base = OTHER; note = 2'-O-methylcytidine-3'-phosphorothioate
  modified_base 3: mod_base = OTHER; note = 2'-O-methyluridine-3'-phosphate
  modified_base 4: mod_base = OTHER; note = 2'-O-methylguanosine-3'-phosphate
  modified_base 5: mod_base = OTHER; note = 2'-O-methyladenosine-3'-phosphate
  modified_base 6: mod_base = OTHER; note = 2'-O-methyladenosine-3'-phosphate
  modified_base 7: mod_base = OTHER; note = 2'-O-methylcytidine-3'-phosphate
  modified_base 8: mod_base = OTHER; note = 2'-O-methyladenosine-3'-phosphate
  modified_base 9: mod_base = OTHER; note = 2'-fluoroguanosine-3'-phosphate
  modified_base 10: mod_base = OTHER; note = 2'-fluorocytidine-3'-phosphate
  modified_base 11: mod_base = OTHER; note = 2'-fluoroadenosine-3'-phosphate
  modified_base 12: mod_base = OTHER; note = 2'-O-methyluridine-3'-phosphate
  modified_base 13: mod_base = OTHER; note = 2'-O-methyluridine-3'-phosphate
  modified_base 14: mod_base = OTHER; note = 2'-O-methyluridine-3'-phosphate
  modified_base 15: mod_base = OTHER; note = 2'-O-methyluridine-3'-phosphate
  modified_base 16: mod_base = OTHER; note = 2'-O-methyluridine-3'-phosphate
  modified_base 17: mod_base = OTHER; note = 2'-O-methyluridine-3'-phosphate
  modified_base 18: mod_base = OTHER; note = 2'-O-methyluridine-3'-phosphate
  modified_base 19: mod_base = OTHER; note = 2'-O-methyluridine-3'-phosphate
  modified_base 20: mod_base = OTHER; note = 2'-O-methylguanosine-3'-phosphate
  modified_base 21: mod_base = OTHER; note = 2'-O-methyluridine-3'-phosphate N-[tris(GalNAc-alkyl)-amidodecanoyl)]-4-hydroxyprolinol (Hyp-(GalNAc-alkyl)3)
gctgaacagcattttttttgt

SEQ ID NO: 2173 - RNA, 21 nt, synthetic construct
  source 1..21: mol_type = other RNA
  modified_base 1: mod_base = OTHER; note = 2'-O-methylcytidine-3'-phosphorothioate
  modified_base 2: mod_base = OTHER; note = 2'-O-methyluridine-3'-phosphorothioate
  modified_base 3: mod_base = OTHER; note = 2'-O-methylguanosine-3'-phosphate
  modified_base 4: mod_base = OTHER; note = 2'-O-methyladenosine-3'-phosphate
  modified_base 5: mod_base = OTHER; note = 2'-O-methyladenosine-3'-phosphate
  modified_base 6: mod_base = OTHER; note = 2'-O-methylcytidine-3'-phosphate
  modified_base 7: mod_base = OTHER; note = 2'-O-methyladenosine-3'-phosphate
  modified_base 8: mod_base = OTHER; note = 2'-O-methylguanosine-3'-phosphate
  modified_base 9: mod_base = OTHER; note = 2'-fluorocytidine-3'-phosphate
  modified_base 10: mod_base = OTHER; note = 2'-fluoroadenosine-3'-phosphate
  modified_base 11: mod_base = OTHER; note = 2'-fluorouridine-3'-phosphate
  modified_base 12: mod_base = OTHER; note = 2'-O-methyluridine-3'-phosphate
  modified_base 13: mod_base = OTHER; note = 2'-O-methyluridine-3'-phosphate
  modified_base 14: mod_base = OTHER; note = 2'-O-methyluridine-3'-phosphate
  modified_base 15: mod_base = OTHER; note = 2'-O-methyluridine-3'-phosphate
  modified_base 16: mod_base = OTHER; note = 2'-O-methyluridine-3'-phosphate
  modified_base 17: mod_base = OTHER; note = 2'-O-methyluridine-3'-phosphate
  modified_base 18: mod_base = OTHER; note = 2'-O-methyluridine-3'-phosphate
  modified_base 19: mod_base = OTHER; note = 2'-O-methylguanosine-3'-phosphate
  modified_base 20: mod_base = OTHER; note = 2'-O-methyladenosine-3'-phosphate
  modified_base 21: mod_base = OTHER; note = 2'-O-methyluridine-3'-phosphate N-[tris(GalNAc-alkyl)-amidodecanoyl)]-4-hydroxyprolinol (Hyp-(GalNAc-alkyl)3)
ctgaacagcattttttttgat

SEQ ID NO: 2174 - RNA, 21 nt, synthetic construct
  source 1..21: mol_type = other RNA
  modified_base 1: mod_base = OTHER; note = 2'-O-methyluridine-3'-phosphorothioate
  modified_base 2: mod_base = OTHER; note = 2'-O-methylguanosine-3'-phosphorothioate
  modified_base 3: mod_base = OTHER; note = 2'-O-methyladenosine-3'-phosphate
  modified_base 4: mod_base = OTHER; note = 2'-O-methylguanosine-3'-phosphate
  modified_base 5: mod_base = OTHER; note = 2'-O-methyladenosine-3'-phosphate
  modified_base 6: mod_base = OTHER; note = 2'-O-methylguanosine-3'-phosphate
  modified_base 7: mod_base = OTHER; note = 2'-O-methyladenosine-3'-phosphate
  modified_base 8: mod_base = OTHER; note = 2'-O-methylguanosine-3'-phosphate
  modified_base 9: mod_base = OTHER; note = 2'-fluoroadenosine-3'-phosphate
  modified_base 10: mod_base = OTHER; note = 2'-fluoroguanosine-3'-phosphate
  modified_base 11: mod_base = OTHER; note = 2'-fluorocytidine-3'-phosphate
  modified_base 12: mod_base = OTHER; note = 2'-O-methylcytidine-3'-phosphate
  modified_base 13: mod_base = OTHER; note = 2'-O-methylcytidine-3'-phosphate
  modified_base 14: mod_base = OTHER; note = 2'-O-methyladenosine-3'-phosphate
  modified_base 15: mod_base = OTHER; note = 2'-O-methylcytidine-3'-phosphate
  modified_base 16: mod_base = OTHER; note = 2'-O-methyladenosine-3'-phosphate
  modified_base 17: mod_base = OTHER; note = 2'-O-methylguanosine-3'-phosphate
  modified_base 18: mod_base = OTHER; note = 2'-O-methyladenosine-3'-phosphate
  modified_base 19: mod_base = OTHER; note = 2'-O-methylguanosine-3'-phosphate
  modified_base 20: mod_base = OTHER; note = 2'-O-methyluridine-3'-phosphate
  modified_base 21: mod_base = OTHER; note = 2'-O-methyluridine-3'-phosphate N-[tris(GalNAc-alkyl)-amidodecanoyl)]-4-hydroxyprolinol (Hyp-(GalNAc-alkyl)3)
tgagagagagcccacagagtt

SEQ ID NO: 2175 - RNA, 21 nt, synthetic construct
  source 1..21: mol_type = other RNA
  modified_base 1: mod_base = OTHER; note = 2'-O-methyladenosine-3'-phosphorothioate
  modified_base 2: mod_base = OTHER; note = 2'-O-methylguanosine-3'-phosphorothioate
  modified_base 3: mod_base = OTHER; note = 2'-O-methyladenosine-3'-phosphate
  modified_base 4: mod_base = OTHER; note = 2'-O-methylguanosine-3'-phosphate
  modified_base 5: mod_base = OTHER; note = 2'-O-methyladenosine-3'-phosphate
  modified_base 6: mod_base = OTHER; note = 2'-O-methylguanosine-3'-phosphate
  modified_base 7: mod_base = OTHER; note = 2'-O-methyladenosine-3'-phosphate
  modified_base 8: mod_base = OTHER; note = 2'-O-methylguanosine-3'-phosphate
  modified_base 9: mod_base = OTHER; note = 2'-fluorocytidine-3'-phosphate
  modified_base 10: mod_base = OTHER; note = 2'-fluorocytidine-3'-phosphate
  modified_base 11: mod_base = OTHER; note = 2'-fluorocytidine-3'-phosphate
  modified_base 12: mod_base = OTHER; note = 2'-O-methyladenosine-3'-phosphate
  modified_base 13: mod_base = OTHER; note = 2'-O-methylcytidine-3'-phosphate
  modified_base 14: mod_base = OTHER; note = 2'-O-methyladenosine-3'-phosphate
  modified_base 15: mod_base = OTHER; note = 2'-O-methylguanosine-3'-phosphate
  modified_base 16: mod_base = OTHER; note = 2'-O-methyladenosine-3'-phosphate
  modified_base 17: mod_base = OTHER; note = 2'-O-methylguanosine-3'-phosphate
  modified_base 18: mod_base = OTHER; note = 2'-O-methyluridine-3'-phosphate
  modified_base 19: mod_base = OTHER; note = 2'-O-methylcytidine-3'-phosphate
  modified_base 20: mod_base = OTHER; note = 2'-O-methyluridine-3'-phosphate
  modified_base 21: mod_base = OTHER; note = 2'-O-methyluridine-3'-phosphate N-[tris(GalNAc-alkyl)-amidodecanoyl)]-4-hydroxyprolinol (Hyp-(GalNAc-alkyl)3)
agagagagcccacagagtctt

SEQ ID NO: 2176 - RNA, 21 nt, synthetic construct
  source 1..21: mol_type = other RNA
  modified_base 1: mod_base = OTHER; note = 2'-O-methylguanosine-3'-phosphorothioate
  modified_base 2: mod_base = OTHER; note = 2'-O-methyladenosine-3'-phosphorothioate
  modified_base 3: mod_base = OTHER; note = 2'-O-methylguanosine-3'-phosphate
  modified_base 4: mod_base = OTHER; note = 2'-O-methyladenosine-3'-phosphate
  modified_base 5: mod_base = OTHER; note = 2'-O-methylguanosine-3'-phosphate
  modified_base 6: mod_base = OTHER; note = 2'-O-methyladenosine-3'-phosphate
  modified_base 7: mod_base = OTHER; note = 2'-O-methylguanosine-3'-phosphate
  modified_base 8: mod_base = OTHER; note = 2'-O-methylcytidine-3'-phosphate
  modified_base 9: mod_base = OTHER; note = 2'-fluorocytidine-3'-phosphate
  modified_base 10: mod_base = OTHER; note = 2'-fluorocytidine-3'-phosphate
  modified_base 11: mod_base = OTHER; note = 2'-fluoroadenosine-3'-phosphate
  modified_base 12: mod_base = OTHER; note = 2'-O-methylcytidine-3'-phosphate
  modified_base 13: mod_base = OTHER; note = 2'-O-methyladenosine-3'-phosphate
  modified_base 14: mod_base = OTHER; note = 2'-O-methylguanosine-3'-phosphate
  modified_base 15: mod_base = OTHER; note = 2'-O-methyladenosine-3'-phosphate
  modified_base 16: mod_base = OTHER; note = 2'-O-methylguanosine-3'-phosphate
  modified_base 17: mod_base = OTHER; note = 2'-O-methyluridine-3'-phosphate
  modified_base 18: mod_base = OTHER; note = 2'-O-methylcytidine-3'-phosphate
  modified_base 19: mod_base = OTHER; note = 2'-O-methyluridine-3'-phosphate
  modified_base 20: mod_base = OTHER; note = 2'-O-methyladenosine-3'-phosphate
  modified_base 21: mod_base = OTHER; note = 2'-O-methyluridine-3'-phosphate N-[tris(GalNAc-alkyl)-amidodecanoyl)]-4-hydroxyprolinol (Hyp-(GalNAc-alkyl)3)
gagagagcccacagagtctat

SEQ ID NO: 2177 - RNA, 21 nt, synthetic construct
  source 1..21: mol_type = other RNA
  modified_base 1: mod_base = OTHER; note = 2'-O-methylguanosine-3'-phosphorothioate
  modified_base 2: mod_base = OTHER; note = 2'-O-methyladenosine-3'-phosphorothioate
  modified_base 3: mod_base = OTHER; note = 2'-O-methyladenosine-3'-phosphate
  modified_base 4: mod_base = OTHER; note = 2'-O-methylcytidine-3'-phosphate
  modified_base 5: mod_base = OTHER; note = 2'-O-methylcytidine-3'-phosphate
  modified_base 6: mod_base = OTHER; note = 2'-O-methylguanosine-3'-phosphate
  modified_base 7: mod_base = OTHER; note = 2'-O-methylcytidine-3'-phosphate
  modified_base 8: mod_base = OTHER; note = 2'-O-methylcytidine-3'-phosphate
  modified_base 9: mod_base = OTHER; note = 2'-fluorocytidine-3'-phosphate
  modified_base 10: mod_base = OTHER; note = 2'-fluoroadenosine-3'-phosphate
  modified_base 11: mod_base = OTHER; note = 2'-fluorouridine-3'-phosphate
  modified_base 12: mod_base = OTHER; note = 2'-O-methyluridine-3'-phosphate
  modified_base 13: mod_base = OTHER; note = 2'-O-methylcytidine-3'-phosphate
  modified_base 14: mod_base = OTHER; note = 2'-O-methylcytidine-3'-phosphate
  modified_base 15: mod_base = OTHER; note = 2'-O-methyluridine-3'-phosphate
  modified_base 16: mod_base = OTHER; note = 2'-O-methylguanosine-3'-phosphate
  modified_base 17: mod_base = OTHER; note = 2'-O-methyluridine-3'-phosphate
  modified_base 18: mod_base = OTHER; note = 2'-O-methyluridine-3'-phosphate
  modified_base 19: mod_base = OTHER; note = 2'-O-methyluridine-3'-phosphate
  modified_base 20: mod_base = OTHER; note = 2'-O-methylguanosine-3'-phosphate
  modified_base 21: mod_base = OTHER; note = 2'-O-methyluridine-3'-phosphate N-[tris(GalNAc-alkyl)-amidodecanoyl)]-4-hydroxyprolinol (Hyp-(GalNAc-alkyl)3)
gaaccgcccattcctgtttgt

SEQ ID NO: 2178 - RNA, 21 nt, synthetic construct
  source 1..21: mol_type = other RNA
  modified_base 1: mod_base = OTHER; note = 2'-O-methyladenosine-3'-phosphorothioate
  modified_base 2: mod_base = OTHER; note = 2'-O-methyladenosine-3'-phosphorothioate
  modified_base 3: mod_base = OTHER; note = 2'-O-methylcytidine-3'-phosphate
  modified_base 4: mod_base = OTHER; note = 2'-O-methylcytidine-3'-phosphate
  modified_base 5: mod_base = OTHER; note = 2'-O-methylguanosine-3'-phosphate
  modified_base 6: mod_base = OTHER; note = 2'-O-methylcytidine-3'-phosphate
  modified_base 7: mod_base = OTHER; note = 2'-O-methylcytidine-3'-phosphate
  modified_base 8: mod_base = OTHER; note = 2'-O-methylcytidine-3'-phosphate
  modified_base 9: mod_base = OTHER; note = 2'-fluoroadenosine-3'-phosphate
  modified_base 10: mod_base = OTHER; note = 2'-fluorouridine-3'-phosphate
  modified_base 11: mod_base = OTHER; note = 2'-fluorouridine-3'-phosphate
  modified_base 12: mod_base = OTHER; note = 2'-O-methylcytidine-3'-phosphate
  modified_base 13: mod_base = OTHER; note = 2'-O-methylcytidine-3'-phosphate
  modified_base 14: mod_base = OTHER; note = 2'-O-methyluridine-3'-phosphate
  modified_base 15: mod_base = OTHER; note = 2'-O-methylguanosine-3'-phosphate
  modified_base 16: mod_base = OTHER; note = 2'-O-methyluridine-3'-phosphate
  modified_base 17: mod_base = OTHER; note = 2'-O-methyluridine-3'-phosphate
  modified_base 18: mod_base = OTHER; note = 2'-O-methyluridine-3'-phosphate
  modified_base 19: mod_base = OTHER; note = 2'-O-methylguanosine-3'-phosphate
  modified_base 20: mod_base = OTHER; note = 2'-O-methylcytidine-3'-phosphate
  modified_base 21: mod_base = OTHER; note = 2'-O-methyluridine-3'-phosphate N-[tris(GalNAc-alkyl)-amidodecanoyl)]-4-hydroxyprolinol (Hyp-(GalNAc-alkyl)3)
aaccgcccattcctgtttgct

SEQ ID NO: 2179 - RNA, 21 nt, synthetic construct
  source 1..21: mol_type = other RNA
  modified_base 1: mod_base = OTHER; note = 2'-O-methyladenosine-3'-phosphorothioate
  modified_base 2: mod_base = OTHER; note = 2'-O-methylcytidine-3'-phosphorothioate
  modified_base 3: mod_base = OTHER; note = 2'-O-methylcytidine-3'-phosphate
  modified_base 4: mod_base = OTHER; note = 2'-O-methylguanosine-3'-phosphate
  modified_base 5: mod_base = OTHER; note = 2'-O-methylcytidine-3'-phosphate
  modified_base 6: mod_base = OTHER; note = 2'-O-methylcytidine-3'-phosphate
  modified_base 7: mod_base = OTHER; note = 2'-O-methylcytidine-3'-phosphate
  modified_base 8: mod_base = OTHER; note = 2'-O-methyladenosine-3'-phosphate
  modified_base 9: mod_base = OTHER; note = 2'-fluorouridine-3'-phosphate
  modified_base 10: mod_base = OTHER; note = 2'-fluorouridine-3'-phosphate
  modified_base 11: mod_base = OTHER; note = 2'-fluorocytidine-3'-phosphate
  modified_base 12: mod_base = OTHER; note = 2'-O-methylcytidine-3'-phosphate
  modified_base 13: mod_base = OTHER; note = 2'-O-methyluridine-3'-phosphate
  modified_base 14: mod_base = OTHER; note = 2'-O-methylguanosine-3'-phosphate
  modified_base 15: mod_base = OTHER; note = 2'-O-methyluridine-3'-phosphate
  modified_base 16: mod_base = OTHER; note = 2'-O-methyluridine-3'-phosphate
  modified_base 17: mod_base = OTHER; note = 2'-O-methyluridine-3'-phosphate
  modified_base 18: mod_base = OTHER; note = 2'-O-methylguanosine-3'-phosphate
  modified_base 19: mod_base = OTHER; note = 2'-O-methylcytidine-3'-phosphate
  modified_base 20: mod_base = OTHER; note = 2'-O-methyluridine-3'-phosphate
  modified_base 21: mod_base = OTHER; note = 2'-O-methyluridine-3'-phosphate N-[tris(GalNAc-alkyl)-amidodecanoyl)]-4-hydroxyprolinol (Hyp-(GalNAc-alkyl)3)
accgcccattcctgtttgctt

SEQ ID NO: 2180 - RNA, 21 nt, synthetic construct
  source 1..21: mol_type = other RNA
  modified_base 1: mod_base = OTHER; note = 2'-O-methylcytidine-3'-phosphorothioate
  modified_base 2: mod_base = OTHER; note = 2'-O-methylcytidine-3'-phosphorothioate
  modified_base 3: mod_base = OTHER; note = 2'-O-methylguanosine-3'-phosphate
  modified_base 4: mod_base = OTHER; note = 2'-O-methylcytidine-3'-phosphate
  modified_base 5: mod_base = OTHER; note = 2'-O-methylcytidine-3'-phosphate
  modified_base 6: mod_base = OTHER; note = 2'-O-methylcytidine-3'-phosphate
  modified_base 7: mod_base = OTHER; note = 2'-O-methyladenosine-3'-phosphate
  modified_base 8: mod_base = OTHER; note = 2'-O-methyluridine-3'-phosphate
  modified_base 9: mod_base = OTHER; note = 2'-fluorouridine-3'-phosphate
  modified_base 10: mod_base = OTHER; note = 2'-fluorocytidine-3'-phosphate
  modified_base 11: mod_base = OTHER; note = 2'-fluorocytidine-3'-phosphate
  modified_base 12: mod_base = OTHER; note = 2'-O-methyluridine-3'-phosphate
  modified_base 13: mod_base = OTHER; note = 2'-O-methylguanosine-3'-phosphate
  modified_base 14: mod_base = OTHER; note = 2'-O-methyluridine-3'-phosphate
  modified_base 15: mod_base = OTHER; note = 2'-O-methyluridine-3'-phosphate
  modified_base 16: mod_base = OTHER; note = 2'-O-methyluridine-3'-phosphate
  modified_base 17: mod_base = OTHER; note = 2'-O-methylguanosine-3'-phosphate
  modified_base 18: mod_base = OTHER; note = 2'-O-methylcytidine-3'-phosphate
  modified_base 19: mod_base = OTHER; note = 2'-O-methyluridine-3'-phosphate
  modified_base 20: mod_base = OTHER; note = 2'-O-methylguanosine-3'-phosphate
  modified_base 21: mod_base = OTHER; note = 2'-O-methyluridine-3'-phosphate N-[tris(GalNAc-alkyl)-amidodecanoyl)]-4-hydroxyprolinol (Hyp-(GalNAc-alkyl)3)
ccgcccattcctgtttgctgt

SEQ ID NO: 2181 - RNA, 21 nt, synthetic construct
  source 1..21: mol_type = other RNA
  modified_base 1: mod_base = OTHER; note = 2'-O-methylcytidine-3'-phosphorothioate
  modified_base 2: mod_base = OTHER; note = 2'-O-methylguanosine-3'-phosphorothioate
  modified_base 3: mod_base = OTHER; note = 2'-O-methylcytidine-3'-phosphate
  modified_base 4: mod_base = OTHER; note = 2'-O-methylcytidine-3'-phosphate
  modified_base 5: mod_base = OTHER; note = 2'-O-methylcytidine-3'-phosphate
  modified_base 6: mod_base = OTHER; note = 2'-O-methyladenosine-3'-phosphate
  modified_base 7: mod_base = OTHER; note = 2'-O-methyluridine-3'-phosphate
  modified_base 8: mod_base = OTHER; note = 2'-O-methyluridine-3'-phosphate
  modified_base 9: mod_base = OTHER; note = 2'-fluorocytidine-3'-phosphate
  modified_base 10: mod_base = OTHER; note = 2'-fluorocytidine-3'-phosphate
  modified_base 11: mod_base = OTHER; note = 2'-fluorouridine-3'-phosphate
  modified_base 12: mod_base = OTHER; note = 2'-O-methylguanosine-3'-phosphate
  modified_base 13: mod_base = OTHER; note = 2'-O-methyluridine-3'-phosphate
  modified_base 14: mod_base = OTHER; note = 2'-O-methyluridine-3'-phosphate
  modified_base 15: mod_base = OTHER; note = 2'-O-methyluridine-3'-phosphate
  modified_base 16: mod_base = OTHER; note = 2'-O-methylguanosine-3'-phosphate
  modified_base 17: mod_base = OTHER; note = 2'-O-methylcytidine-3'-phosphate
  modified_base 18: mod_base = OTHER; note = 2'-O-methyluridine-3'-phosphate
  modified_base 19: mod_base = OTHER; note = 2'-O-methylguanosine-3'-phosphate
  modified_base 20: mod_base = OTHER; note = 2'-O-methyluridine-3'-phosphate
  modified_base 21: mod_base = OTHER; note = 2'-O-methyluridine-3'-phosphate N-[tris(GalNAc-alkyl)-amidodecanoyl)]-4-hydroxyprolinol (Hyp-(GalNAc-alkyl)3)
cgcccattcctgtttgctgtt

SEQ ID NO: 2182 - RNA, 21 nt, synthetic construct
  source 1..21: mol_type = other RNA
  modified_base 1: mod_base = OTHER; note = 2'-O-methylguanosine-3'-phosphorothioate
  modified_base 2: mod_base = OTHER; note = 2'-O-methylcytidine-3'-phosphorothioate
  modified_base 3: mod_base = OTHER; note = 2'-O-methylcytidine-3'-phosphate
  modified_base 4: mod_base = OTHER; note = 2'-O-methylcytidine-3'-phosphate
  modified_base 5: mod_base = OTHER; note = 2'-O-methyladenosine-3'-phosphate
  modified_base 6: mod_base = OTHER; note = 2'-O-methyluridine-3'-phosphate
  modified_base 7: mod_base = OTHER; note = 2'-O-methyluridine-3'-phosphate
  modified_base 8: mod_base = OTHER; note = 2'-O-methylcytidine-3'-phosphate
  modified_base 9: mod_base = OTHER; note = 2'-fluorocytidine-3'-phosphate
  modified_base 10: mod_base = OTHER; note = 2'-fluorouridine-3'-phosphate
  modified_base 11: mod_base = OTHER; note = 2'-fluoroguanosine-3'-phosphate
  modified_base 12: mod_base = OTHER; note = 2'-O-methyluridine-3'-phosphate
  modified_base 13: mod_base = OTHER; note = 2'-O-methyluridine-3'-phosphate
  modified_base 14: mod_base = OTHER; note = 2'-O-methyluridine-3'-phosphate
  modified_base 15: mod_base = OTHER; note = 2'-O-methylguanosine-3'-phosphate
  modified_base 16: mod_base = OTHER; note = 2'-O-methylcytidine-3'-phosphate
  modified_base 17: mod_base = OTHER; note = 2'-O-methyluridine-3'-phosphate
  modified_base 18: mod_base = OTHER; note = 2'-O-methylguanosine-3'-phosphate
  modified_base 19: mod_base = OTHER; note = 2'-O-methyluridine-3'-phosphate
  modified_base 20: mod_base = OTHER; note = 2'-O-methylguanosine-3'-phosphate
  modified_base 21: mod_base = OTHER; note = 2'-O-methyluridine-3'-phosphate N-[tris(GalNAc-alkyl)-amidodecanoyl)]-4-hydroxyprolinol (Hyp-(GalNAc-alkyl)3)
gcccattcctgtttgctgtgt

SEQ ID NO: 2183 - RNA, 21 nt, synthetic construct
  source 1..21: mol_type = other RNA
  modified_base 1: mod_base = OTHER; note = 2'-O-methylcytidine-3'-phosphorothioate
  modified_base 2: mod_base = OTHER; note = 2'-O-methylcytidine-3'-phosphorothioate
  modified_base 3: mod_base = OTHER; note = 2'-O-methylcytidine-3'-phosphate
  modified_base 4: mod_base = OTHER; note = 2'-O-methyladenosine-3'-phosphate
  modified_base 5: mod_base = OTHER; note = 2'-O-methyluridine-3'-phosphate
  modified_base 6: mod_base = OTHER; note = 2'-O-methyluridine-3'-phosphate
  modified_base 7: mod_base = OTHER; note = 2'-O-methylcytidine-3'-phosphate
  modified_base 8: mod_base = OTHER; note = 2'-O-methylcytidine-3'-phosphate
  modified_base 9: mod_base = OTHER; note = 2'-fluorouridine-3'-phosphate
  modified_base 10: mod_base = OTHER; note = 2'-fluoroguanosine-3'-phosphate
  modified_base 11: mod_base = OTHER; note = 2'-fluorouridine-3'-phosphate
  modified_base 12: mod_base = OTHER; note = 2'-O-methyluridine-3'-phosphate
  modified_base 13: mod_base = OTHER; note = 2'-O-methyluridine-3'-phosphate
  modified_base 14: mod_base = OTHER; note = 2'-O-methylguanosine-3'-phosphate
  modified_base 15: mod_base = OTHER; note = 2'-O-methylcytidine-3'-phosphate
  modified_base 16: mod_base = OTHER; note = 2'-O-methyluridine-3'-phosphate
  modified_base 17: mod_base = OTHER; note = 2'-O-methylguanosine-3'-phosphate
  modified_base 18: mod_base = OTHER; note = 2'-O-methyluridine-3'-phosphate
  modified_base 19: mod_base = OTHER; note = 2'-O-methylguanosine-3'-phosphate
  modified_base 20: mod_base = OTHER; note = 2'-O-methyluridine-3'-phosphate
  modified_base 21: mod_base = OTHER; note = 2'-O-methyluridine-3'-phosphate N-[tris(GalNAc-alkyl)-amidodecanoyl)]-4-hydroxyprolinol (Hyp-(GalNAc-alkyl)3)
cccattcctgtttgctgtgtt

SEQ ID NO: 2184 - RNA, 21 nt, synthetic construct
  source 1..21: mol_type = other RNA
  modified_base 1: mod_base = OTHER; note = 2'-O-methylcytidine-3'-phosphorothioate
  modified_base 2: mod_base = OTHER; note = 2'-O-methylcytidine-3'-phosphorothioate
  modified_base 3: mod_base = OTHER; note = 2'-O-methyladenosine-3'-phosphate
  modified_base 4: mod_base = OTHER; note = 2'-O-methyluridine-3'-phosphate
  modified_base 5: mod_base = OTHER; note = 2'-O-methyluridine-3'-phosphate
  modified_base 6: mod_base = OTHER; note = 2'-O-methylcytidine-3'-phosphate
  modified_base 7: mod_base = OTHER; note = 2'-O-methylcytidine-3'-phosphate
  modified_base 8: mod_base = OTHER; note = 2'-O-methyluridine-3'-phosphate
  modified_base 9: mod_base = OTHER; note = 2'-fluoroguanosine-3'-phosphate
  modified_base 10: mod_base = OTHER; note = 2'-fluorouridine-3'-phosphate
  modified_base 11: mod_base = OTHER; note = 2'-fluorouridine-3'-phosphate
  modified_base 12: mod_base = OTHER; note = 2'-O-methyluridine-3'-phosphate
  modified_base 13: mod_base = OTHER; note = 2'-O-methylguanosine-3'-phosphate
  modified_base 14: mod_base = OTHER; note = 2'-O-methylcytidine-3'-phosphate
  modified_base 15: mod_base = OTHER; note = 2'-O-methyluridine-3'-phosphate
  modified_base 16: mod_base = OTHER; note = 2'-O-methylguanosine-3'-phosphate
  modified_base 17: mod_base = OTHER; note = 2'-O-methyluridine-3'-phosphate
  modified_base 18: mod_base = OTHER; note = 2'-O-methylguanosine-3'-phosphate
  modified_base 19: mod_base = OTHER; note = 2'-O-methyluridine-3'-phosphate
  modified_base 20: mod_base = OTHER; note = 2'-O-methyladenosine-3'-phosphate
  modified_base 21: mod_base = OTHER; note = 2'-O-methyluridine-3'-phosphate N-[tris(GalNAc-alkyl)-amidodecanoyl)]-4-hydroxyprolinol (Hyp-(GalNAc-alkyl)3)
ccattcctgtttgctgtgtat

SEQ ID NO: 2185 - RNA, 21 nt, synthetic construct
  source 1..21: mol_type = other RNA
  modified_base 1: mod_base = OTHER; note = 2'-O-methylcytidine-3'-phosphorothioate
  modified_base 2: mod_base = OTHER; note = 2'-O-methyladenosine-3'-phosphorothioate
  modified_base 3: mod_base = OTHER; note = 2'-O-methyluridine-3'-phosphate
  modified_base 4: mod_base = OTHER; note = 2'-O-methyluridine-3'-phosphate
  modified_base 5: mod_base = OTHER; note = 2'-O-methylcytidine-3'-phosphate
  modified_base 6: mod_base = OTHER; note = 2'-O-methylcytidine-3'-phosphate
  modified_base 7: mod_base = OTHER; note = 2'-O-methyluridine-3'-phosphate
  modified_base 8: mod_base = OTHER; note = 2'-O-methylguanosine-3'-phosphate
  modified_base 9: mod_base = OTHER; note = 2'-fluorouridine-3'-phosphate
  modified_base 10: mod_base = OTHER; note = 2'-fluorouridine-3'-phosphate
  modified_base 11: mod_base = OTHER; note = 2'-fluorouridine-3'-phosphate
  modified_base 12: mod_base = OTHER; note = 2'-O-methylguanosine-3'-phosphate
  modified_base 13: mod_base = OTHER; note = 2'-O-methylcytidine-3'-phosphate
  modified_base 14: mod_base = OTHER; note = 2'-O-methyluridine-3'-phosphate
  modified_base 15: mod_base = OTHER; note = 2'-O-methylguanosine-3'-phosphate
  modified_base 16: mod_base = OTHER; note = 2'-O-methyluridine-3'-phosphate
  modified_base 17: mod_base = OTHER; note = 2'-O-methylguanosine-3'-phosphate
  modified_base 18: mod_base = OTHER; note = 2'-O-methyluridine-3'-phosphate
  modified_base 19: mod_base = OTHER; note = 2'-O-methyladenosine-3'-phosphate
  modified_base 20: mod_base = OTHER; note = 2'-O-methyluridine-3'-phosphate
  modified_base 21: mod_base = OTHER; note = 2'-O-methyluridine-3'-phosphate N-[tris(GalNAc-alkyl)-amidodecanoyl)]-4-hydroxyprolinol (Hyp-(GalNAc-alkyl)3)
cattcctgtttgctgtgtatt

SEQ ID NO: 2186 - RNA, 21 nt, synthetic construct
  source 1..21: mol_type = other RNA
  modified_base 1: mod_base = OTHER; note = 2'-O-methyladenosine-3'-phosphorothioate
  modified_base 2: mod_base = OTHER; note = 2'-O-methyluridine-3'-phosphorothioate
  modified_base 3: mod_base = OTHER; note = 2'-O-methyluridine-3'-phosphate
  modified_base 4: mod_base = OTHER; note = 2'-O-methylcytidine-3'-phosphate
  modified_base 5: mod_base = OTHER; note = 2'-O-methylcytidine-3'-phosphate
  modified_base 6: mod_base = OTHER; note = 2'-O-methyluridine-3'-phosphate
  modified_base 7: mod_base = OTHER; note = 2'-O-methylguanosine-3'-phosphate
  modified_base 8: mod_base = OTHER; note = 2'-O-methyluridine-3'-phosphate
  modified_base 9: mod_base = OTHER; note = 2'-fluorouridine-3'-phosphate
  modified_base 10: mod_base = OTHER; note = 2'-fluorouridine-3'-phosphate
  modified_base 11: mod_base = OTHER; note = 2'-fluoroguanosine-3'-phosphate
  modified_base 12: mod_base = OTHER; note = 2'-O-methylcytidine-3'-phosphate
  modified_base 13: mod_base = OTHER; note = 2'-O-methyluridine-3'-phosphate
  modified_base 14: mod_base = OTHER; note = 2'-O-methylguanosine-3'-phosphate
  modified_base 15: mod_base = OTHER; note = 2'-O-methyluridine-3'-phosphate
  modified_base 16: mod_base = OTHER; note = 2'-O-methylguanosine-3'-phosphate
  modified_base 17: mod_base = OTHER; note = 2'-O-methyluridine-3'-phosphate
  modified_base 18: mod_base = OTHER; note = 2'-O-methyladenosine-3'-phosphate
  modified_base 19: mod_base = OTHER; note = 2'-O-methyluridine-3'-phosphate
  modified_base 20: mod_base = OTHER; note = 2'-O-methylguanosine-3'-phosphate
  modified_base 21: mod_base = OTHER; note = 2'-O-methyluridine-3'-phosphate N-[tris(GalNAc-alkyl)-amidodecanoyl)]-4-hydroxyprolinol (Hyp-(GalNAc-alkyl)3)
attcctgtttgctgtgtatgt

SEQ ID NO: 2187 - RNA, 21 nt, synthetic construct
  source 1..21: mol_type = other RNA
  modified_base 1: mod_base = OTHER; note = 2'-O-methyluridine-3'-phosphorothioate
  modified_base 2: mod_base = OTHER; note = 2'-O-methyluridine-3'-phosphorothioate
  modified_base 3: mod_base = OTHER; note = 2'-O-methylcytidine-3'-phosphate
  modified_base 4: mod_base = OTHER; note = 2'-O-methylcytidine-3'-phosphate
  modified_base 5: mod_base = OTHER; note = 2'-O-methyluridine-3'-phosphate
  modified_base 6: mod_base = OTHER; note = 2'-O-methylguanosine-3'-phosphate
  modified_base 7: mod_base = OTHER; note = 2'-O-methyluridine-3'-phosphate
  modified_base 8: mod_base = OTHER; note = 2'-O-methyluridine-3'-phosphate
  modified_base 9: mod_base = OTHER; note = 2'-fluorouridine-3'-phosphate
  modified_base 10: mod_base = OTHER; note = 2'-fluoroguanosine-3'-phosphate
  modified_base 11: mod_base = OTHER; note = 2'-fluorocytidine-3'-phosphate
  modified_base 12: mod_base = OTHER; note = 2'-O-methyluridine-3'-phosphate
  modified_base 13: mod_base = OTHER; note = 2'-O-methylguanosine-3'-phosphate
  modified_base 14: mod_base = OTHER; note = 2'-O-methyluridine-3'-phosphate
  modified_base 15: mod_base = OTHER; note = 2'-O-methylguanosine-3'-phosphate
  modified_base 16: mod_base = OTHER; note = 2'-O-methyluridine-3'-phosphate
  modified_base 17: mod_base = OTHER; note = 2'-O-methyladenosine-3'-phosphate
  modified_base 18: mod_base = OTHER; note = 2'-O-methyluridine-3'-phosphate
  modified_base 19: mod_base = OTHER; note = 2'-O-methylguanosine-3'-phosphate
  modified_base 20: mod_base = OTHER; note = 2'-O-methyladenosine-3'-phosphate
  modified_base 21: mod_base = OTHER; note = 2'-O-methyluridine-3'-phosphate N-[tris(GalNAc-alkyl)-amidodecanoyl)]-4-hydroxyprolinol (Hyp-(GalNAc-alkyl)3)
ttcctgtttgctgtgtatgat

SEQ ID NO: 2188 - RNA, 21 nt, synthetic construct
  source 1..21: mol_type = other RNA
  modified_base 1: mod_base = OTHER; note = 2'-O-methyluridine-3'-phosphorothioate
  modified_base 2: mod_base = OTHER; note = 2'-O-methylcytidine-3'-phosphorothioate
  modified_base 3: mod_base = OTHER; note = 2'-O-methylcytidine-3'-phosphate
  modified_base 4: mod_base = OTHER; note = 2'-O-methyluridine-3'-phosphate
  modified_base 5: mod_base = OTHER; note = 2'-O-methylguanosine-3'-phosphate
  modified_base 6: mod_base = OTHER; note = 2'-O-methyluridine-3'-phosphate
  modified_base 7: mod_base = OTHER; note = 2'-O-methyluridine-3'-phosphate
  modified_base 8: mod_base = OTHER; note = 2'-O-methyluridine-3'-phosphate
  modified_base 9: mod_base = OTHER; note = 2'-fluoroguanosine-3'-phosphate
  modified_base 10: mod_base = OTHER; note = 2'-fluorocytidine-3'-phosphate
  modified_base 11: mod_base = OTHER; note = 2'-fluorouridine-3'-phosphate
  modified_base 12: mod_base = OTHER; note = 2'-O-methylguanosine-3'-phosphate
  modified_base 13: mod_base = OTHER; note = 2'-O-methyluridine-3'-phosphate
  modified_base 14: mod_base = OTHER; note = 2'-O-methylguanosine-3'-phosphate
  modified_base 15: mod_base = OTHER; note = 2'-O-methyluridine-3'-phosphate
  modified_base 16: mod_base = OTHER; note = 2'-O-methyladenosine-3'-phosphate
  modified_base 17: mod_base = OTHER; note = 2'-O-methyluridine-3'-phosphate
  modified_base 18: mod_base = OTHER; note = 2'-O-methylguanosine-3'-phosphate
  modified_base 19: mod_base = OTHER; note = 2'-O-methyladenosine-3'-phosphate
  modified_base 20: mod_base = OTHER; note = 2'-O-methyluridine-3'-phosphate
  modified_base 21: mod_base = OTHER; note = 2'-O-methyluridine-3'-phosphate N-[tris(GalNAc-alkyl)-amidodecanoyl)]-4-hydroxyprolinol (Hyp-(GalNAc-alkyl)3)
tcctgtttgctgtgtatgatt

SEQ ID NO: 2189 - RNA, 21 nt, synthetic construct
  source 1..21: mol_type = other RNA
  modified_base 1: mod_base = OTHER; note = 2'-O-methylcytidine-3'-phosphorothioate
  modified_base 2: mod_base = OTHER; note = 2'-O-methylcytidine-3'-phosphorothioate
  modified_base 3: mod_base = OTHER; note = 2'-O-methyluridine-3'-phosphate
  modified_base 4: mod_base = OTHER; note = 2'-O-methylguanosine-3'-phosphate
  modified_base 5: mod_base = OTHER; note = 2'-O-methyluridine-3'-phosphate
  modified_base 6: mod_base = OTHER; note = 2'-O-methyluridine-3'-phosphate
  modified_base 7: mod_base = OTHER; note = 2'-O-methyluridine-3'-phosphate
  modified_base 8: mod_base = OTHER; note = 2'-O-methylguanosine-3'-phosphate
  modified_base 9: mod_base = OTHER; note = 2'-fluorocytidine-3'-phosphate
  modified_base 10: mod_base = OTHER; note = 2'-fluorouridine-3'-phosphate
  modified_base 11: mod_base = OTHER; note = 2'-fluoroguanosine-3'-phosphate
  modified_base 12: mod_base = OTHER; note = 2'-O-methyluridine-3'-phosphate
  modified_base 13: mod_base = OTHER; note = 2'-O-methylguanosine-3'-phosphate
  modified_base 14: mod_base = OTHER; note = 2'-O-methyluridine-3'-phosphate
  modified_base 15: mod_base = OTHER; note = 2'-O-methyladenosine-3'-phosphate
  modified_base 16: mod_base = OTHER; note = 2'-O-methyluridine-3'-phosphate
  modified_base 17: mod_base = OTHER; note = 2'-O-methylguanosine-3'-phosphate
  modified_base 18: mod_base = OTHER; note = 2'-O-methyladenosine-3'-phosphate
  modified_base 19: mod_base = OTHER; note = 2'-O-methyluridine-3'-phosphate
  modified_base 20: mod_base = OTHER; note = 2'-O-methylcytidine-3'-phosphate
  modified_base 21: mod_base = OTHER; note = 2'-O-methyluridine-3'-phosphate N-[tris(GalNAc-alkyl)-amidodecanoyl)]-4-hydroxyprolinol (Hyp-(GalNAc-alkyl)3)
cctgtttgctgtgtatgatct

SEQ ID NO: 2190 - RNA, 21 nt, synthetic construct
  source 1..21: mol_type = other RNA
  modified_base 1: mod_base = OTHER; note = 2'-O-methylcytidine-3'-phosphorothioate
  modified_base 2: mod_base = OTHER; note = 2'-O-methyluridine-3'-phosphorothioate
  modified_base 3: mod_base = OTHER; note = 2'-O-methylguanosine-3'-phosphate
  modified_base 4: mod_base = OTHER; note = 2'-O-methyluridine-3'-phosphate
  modified_base 5: mod_base = OTHER; note = 2'-O-methyluridine-3'-phosphate
  modified_base 6: mod_base = OTHER; note = 2'-O-methyluridine-3'-phosphate
  modified_base 7: mod_base = OTHER; note = 2'-O-methylguanosine-3'-phosphate
  modified_base 8: mod_base = OTHER; note = 2'-O-methylcytidine-3'-phosphate
  modified_base 9: mod_base = OTHER; note = 2'-fluorouridine-3'-phosphate
  modified_base 10: mod_base = OTHER; note = 2'-fluoroguanosine-3'-phosphate
  modified_base 11: mod_base = OTHER; note = 2'-fluorouridine-3'-phosphate
  modified_base 12: mod_base = OTHER; note = 2'-O-methylguanosine-3'-phosphate
  modified_base 13: mod_base = OTHER; note = 2'-O-methyluridine-3'-phosphate
  modified_base 14: mod_base = OTHER; note = 2'-O-methyladenosine-3'-phosphate
  modified_base 15: mod_base = OTHER; note = 2'-O-methyluridine-3'-phosphate
  modified_base 16: mod_base = OTHER; note = 2'-O-methylguanosine-3'-phosphate
  modified_base 17: mod_base = OTHER; note = 2'-O-methyladenosine-3'-phosphate
  modified_base 18: mod_base = OTHER; note = 2'-O-methyluridine-3'-phosphate
  modified_base 19: mod_base = OTHER; note = 2'-O-methylcytidine-3'-phosphate
  modified_base 20: mod_base = OTHER; note = 2'-O-methyladenosine-3'-phosphate
  modified_base 21: mod_base = OTHER; note = 2'-O-methyluridine-3'-phosphate N-[tris(GalNAc-alkyl)-amidodecanoyl)]-4-hydroxyprolinol (Hyp-(GalNAc-alkyl)3)
ctgtttgctgtgtatgatcat

SEQ ID NO: 2191 - RNA, 21 nt, synthetic construct
  source 1..21: mol_type = other RNA
  modified_base 1: mod_base = OTHER; note = 2'-O-methyluridine-3'-phosphorothioate
  modified_base 2: mod_base = OTHER; note = 2'-O-methylguanosine-3'-phosphorothioate
  modified_base 3: mod_base = OTHER; note = 2'-O-methyluridine-3'-phosphate
  modified_base 4: mod_base = OTHER; note = 2'-O-methyluridine-3'-phosphate
  modified_base 5: mod_base = OTHER; note = 2'-O-methyluridine-3'-phosphate
  modified_base 6: mod_base = OTHER; note = 2'-O-methylguanosine-3'-phosphate
  modified_base 7: mod_base = OTHER; note = 2'-O-methylcytidine-3'-phosphate
  modified_base 8: mod_base = OTHER; note = 2'-O-methyluridine-3'-phosphate
  modified_base 9: mod_base = OTHER; note = 2'-fluoroguanosine-3'-phosphate
  modified_base 10: mod_base = OTHER; note = 2'-fluorouridine-3'-phosphate
  modified_base 11: mod_base = OTHER; note = 2'-fluoroguanosine-3'-phosphate
  modified_base 12: mod_base = OTHER; note = 2'-O-methyluridine-3'-phosphate
  modified_base 13: mod_base = OTHER; note = 2'-O-methyladenosine-3'-phosphate
  modified_base 14: mod_base = OTHER; note = 2'-O-methyluridine-3'-phosphate
  modified_base 15: mod_base = OTHER; note = 2'-O-methylguanosine-3'-phosphate
  modified_base 16: mod_base = OTHER; note = 2'-O-methyladenosine-3'-phosphate
  modified_base 17: mod_base = OTHER; note = 2'-O-methyluridine-3'-phosphate
  modified_base 18: mod_base = OTHER; note = 2'-O-methylcytidine-3'-phosphate
  modified_base 19: mod_base = OTHER; note = 2'-O-methyladenosine-3'-phosphate
  modified_base 20: mod_base = OTHER; note = 2'-O-methyladenosine-3'-phosphate
  modified_base 21: mod_base = OTHER; note = 2'-O-methyluridine-3'-phosphate N-[tris(GalNAc-alkyl)-amidodecanoyl)]-4-hydroxyprolinol (Hyp-(GalNAc-alkyl)3)
tgtttgctgtgtatgatcaat

SEQ ID NO: 2192 - RNA, 21 nt, synthetic construct
  source 1..21: mol_type = other RNA
  modified_base 1: mod_base = OTHER; note = 2'-O-methylguanosine-3'-phosphorothioate
  modified_base 2: mod_base = OTHER; note = 2'-O-methyluridine-3'-phosphorothioate
  modified_base 3: mod_base = OTHER; note = 2'-O-methyluridine-3'-phosphate
  modified_base 4: mod_base = OTHER; note = 2'-O-methyluridine-3'-phosphate
  modified_base 5: mod_base = OTHER; note = 2'-O-methylguanosine-3'-phosphate
  modified_base 6: mod_base = OTHER; note = 2'-O-methylcytidine-3'-phosphate
  modified_base 7: mod_base = OTHER; note = 2'-O-methyluridine-3'-phosphate
  modified_base 8: mod_base = OTHER; note = 2'-O-methylguanosine-3'-phosphate
  modified_base 9: mod_base = OTHER; note = 2'-fluorouridine-3'-phosphate
  modified_base 10: mod_base = OTHER; note = 2'-fluoroguanosine-3'-phosphate
  modified_base 11: mod_base = OTHER; note = 2'-fluorouridine-3'-phosphate
  modified_base 12: mod_base = OTHER; note = 2'-O-methyladenosine-3'-phosphate
  modified_base 13: mod_base = OTHER; note = 2'-O-methyluridine-3'-phosphate
  modified_base 14: mod_base = OTHER; note = 2'-O-methylguanosine-3'-phosphate
  modified_base 15: mod_base = OTHER; note = 2'-O-methyladenosine-3'-phosphate
  modified_base 16: mod_base = OTHER; note = 2'-O-methyluridine-3'-phosphate
  modified_base 17: mod_base = OTHER; note = 2'-O-methylcytidine-3'-phosphate
  modified_base 18: mod_base = OTHER; note = 2'-O-methyladenosine-3'-phosphate
  modified_base 19: mod_base = OTHER; note = 2'-O-methyladenosine-3'-phosphate
  modified_base 20: mod_base = OTHER; note = 2'-O-methyladenosine-3'-phosphate
  modified_base 21: mod_base = OTHER; note = 2'-O-methyluridine-3'-phosphate N-[tris(GalNAc-alkyl)-amidodecanoyl)]-4-hydroxyprolinol (Hyp-(GalNAc-alkyl)3)
gtttgctgtgtatgatcaaat

SEQ ID NO: 2193 - RNA, 21 nt, synthetic construct
  source 1..21: mol_type = other RNA
  modified_base 1: mod_base = OTHER; note = 2'-O-methyluridine-3'-phosphorothioate
  modified_base 2: mod_base = OTHER; note = 2'-O-methyluridine-3'-phosphorothioate
  modified_base 3: mod_base = OTHER; note = 2'-O-methyluridine-3'-phosphate
  modified_base 4: mod_base = OTHER; note = 2'-O-methylguanosine-3'-phosphate
  modified_base 5: mod_base = OTHER; note = 2'-O-methylcytidine-3'-phosphate
  modified_base 6: mod_base = OTHER; note = 2'-O-methyluridine-3'-phosphate
  modified_base 7: mod_base = OTHER; note = 2'-O-methylguanosine-3'-phosphate
  modified_base 8: mod_base = OTHER; note = 2'-O-methyluridine-3'-phosphate
  modified_base 9: mod_base = OTHER; note = 2'-fluoroguanosine-3'-phosphate
  modified_base 10: mod_base = OTHER; note = 2'-fluorouridine-3'-phosphate
  modified_base 11: mod_base = OTHER; note = 2'-fluoroadenosine-3'-phosphate
  modified_base 12: mod_base = OTHER; note = 2'-O-methyluridine-3'-phosphate
  modified_base 13: mod_base = OTHER; note = 2'-O-methylguanosine-3'-phosphate
  modified_base 14: mod_base = OTHER; note = 2'-O-methyladenosine-3'-phosphate
  modified_base 15: mod_base = OTHER; note = 2'-O-methyluridine-3'-phosphate
  modified_base 16: mod_base = OTHER; note = 2'-O-methylcytidine-3'-phosphate
  modified_base 17: mod_base = OTHER; note = 2'-O-methyladenosine-3'-phosphate
  modified_base 18: mod_base = OTHER; note = 2'-O-methyladenosine-3'-phosphate
  modified_base 19: mod_base = OTHER; note = 2'-O-methyladenosine-3'-phosphate
  modified_base 20: mod_base = OTHER; note = 2'-O-methylguanosine-3'-phosphate
  modified_base 21: mod_base = OTHER; note = 2'-O-methyluridine-3'-phosphate N-[tris(GalNAc-alkyl)-amidodecanoyl)]-4-hydroxyprolinol (Hyp-(GalNAc-alkyl)3)
tttgctgtgtatgatcaaagt

SEQ ID NO: 2194 - RNA, 21 nt, synthetic construct
  source 1..21: mol_type = other RNA
  modified_base 1: mod_base = OTHER; note = 2'-O-methylcytidine-3'-phosphorothioate
  modified_base 2: mod_base = OTHER; note = 2'-O-methyladenosine-3'-phosphorothioate
  modified_base 3: mod_base = OTHER; note = 2'-O-methylguanosine-3'-phosphate
  modified_base 4: mod_base = OTHER; note = 2'-O-methyluridine-3'-phosphate
  modified_base 5: mod_base = OTHER; note = 2'-O-methylcytidine-3'-phosphate
  modified_base 6: mod_base = OTHER; note = 2'-O-methyluridine-3'-phosphate
  modified_base 7: mod_base = OTHER; note = 2'-O-methylcytidine-3'-phosphate
  modified_base 8: mod_base = OTHER; note = 2'-O-methylcytidine-3'-phosphate
  modified_base 9: mod_base = OTHER; note = 2'-fluorocytidine-3'-phosphate
  modified_base 10: mod_base = OTHER; note = 2'-fluoroadenosine-3'-phosphate
  modified_base 11: mod_base = OTHER; note = 2'-fluorocytidine-3'-phosphate
  modified_base 12: mod_base = OTHER; note = 2'-O-methylcytidine-3'-phosphate
  modified_base 13: mod_base = OTHER; note = 2'-O-methyluridine-3'-phosphate
  modified_base 14: mod_base = OTHER; note = 2'-O-methyluridine-3'-phosphate
  modified_base 15: mod_base = OTHER; note = 2'-O-methyluridine-3'-phosphate
  modified_base 16: mod_base = OTHER; note = 2'-O-methyluridine-3'-phosphate
  modified_base 17: mod_base = OTHER; note = 2'-O-methylcytidine-3'-phosphate
  modified_base 18: mod_base = OTHER; note = 2'-O-methyluridine-3'-phosphate
  modified_base 19: mod_base = OTHER; note = 2'-O-methyluridine-3'-phosphate
  modified_base 20: mod_base = OTHER; note = 2'-O-methylcytidine-3'-phosphate
  modified_base 21: mod_base = OTHER; note = 2'-O-methyluridine-3'-phosphate N-[tris(GalNAc-alkyl)-amidodecanoyl)]-4-hydroxyprolinol (Hyp-(GalNAc-alkyl)3)
cagtctcccaccttttcttct

SEQ ID NO: 2195 - RNA, 21 nt, synthetic construct
  source 1..21: mol_type = other RNA
  modified_base 1: mod_base = OTHER; note = 2'-O-methylguanosine-3'-phosphorothioate
  modified_base 2: mod_base = OTHER; note = 2'-O-methyluridine-3'-phosphorothioate
  modified_base 3: mod_base = OTHER; note = 2'-O-methylcytidine-3'-phosphate
  modified_base 4: mod_base = OTHER; note = 2'-O-methyluridine-3'-phosphate
  modified_base 5: mod_base = OTHER; note = 2'-O-methylcytidine-3'-phosphate
  modified_base 6: mod_base = OTHER; note = 2'-O-methylcytidine-3'-phosphate
  modified_base 7: mod_base = OTHER; note = 2'-O-methylcytidine-3'-phosphate
  modified_base 8: mod_base = OTHER; note = 2'-O-methyladenosine-3'-phosphate
  modified_base 9: mod_base = OTHER; note = 2'-fluorocytidine-3'-phosphate
  modified_base 10: mod_base = OTHER; note = 2'-fluorocytidine-3'-phosphate
  modified_base 11: mod_base = OTHER; note = 2'-fluorouridine-3'-phosphate
  modified_base 12: mod_base = OTHER; note = 2'-O-methyluridine-3'-phosphate
  modified_base 13: mod_base = OTHER; note = 2'-O-methyluridine-3'-phosphate
  modified_base 14: mod_base = OTHER; note = 2'-O-methyluridine-3'-phosphate
  modified_base 15: mod_base = OTHER; note = 2'-O-methylcytidine-3'-phosphate
  modified_base 16: mod_base = OTHER; note = 2'-O-methyluridine-3'-phosphate
  modified_base 17: mod_base = OTHER; note = 2'-O-methyluridine-3'-phosphate
  modified_base 18: mod_base = OTHER; note = 2'-O-methylcytidine-3'-phosphate
  modified_base 19: mod_base = OTHER; note = 2'-O-methyluridine-3'-phosphate
  modified_base 20: mod_base = OTHER; note = 2'-O-methyladenosine-3'-phosphate
  modified_base 21: mod_base = OTHER; note = 2'-O-methyluridine-3'-phosphate N-[tris(GalNAc-alkyl)-amidodecanoyl)]-4-hydroxyprolinol (Hyp-(GalNAc-alkyl)3)
gtctcccaccttttcttctat

SEQ ID NO: 2196 - RNA, 21 nt, synthetic construct
  source 1..21: mol_type = other RNA
  modified_base 1: mod_base = OTHER; note = 2'-O-methylcytidine-3'-phosphorothioate
  modified_base 2: mod_base = OTHER; note = 2'-O-methyluridine-3'-phosphorothioate
  modified_base 3: mod_base = OTHER; note = 2'-O-methylcytidine-3'-phosphate
  modified_base 4: mod_base = OTHER; note = 2'-O-methylcytidine-3'-phosphate
  modified_base 5: mod_base = OTHER; note = 2'-O-methylcytidine-3'-phosphate
  modified_base 6: mod_base = OTHER; note = 2'-O-methyladenosine-3'-phosphate
  modified_base 7: mod_base = OTHER; note = 2'-O-methylcytidine-3'-phosphate
  modified_base 8: mod_base = OTHER; note = 2'-O-methylcytidine-3'-phosphate
  modified_base 9: mod_base = OTHER; note = 2'-fluorouridine-3'-phosphate
  modified_base 10: mod_base = OTHER; note = 2'-fluorouridine-3'-phosphate
  modified_base 11: mod_base = OTHER; note = 2'-fluorouridine-3'-phosphate
  modified_base 12: mod_base = OTHER; note = 2'-O-methyluridine-3'-phosphate
  modified_base 13: mod_base = OTHER; note = 2'-O-methylcytidine-3'-phosphate
  modified_base 14: mod_base = OTHER; note = 2'-O-methyluridine-3'-phosphate
  modified_base 15: mod_base = OTHER; note = 2'-O-methyluridine-3'-phosphate
  modified_base 16: mod_base = OTHER; note = 2'-O-methylcytidine-3'-phosphate
  modified_base 17: mod_base = OTHER; note = 2'-O-methyluridine-3'-phosphate
  modified_base 18: mod_base = OTHER; note = 2'-O-methyladenosine-3'-phosphate
  modified_base 19: mod_base = OTHER; note = 2'-O-methyladenosine-3'-phosphate
  modified_base 20: mod_base = OTHER; note = 2'-O-methyluridine-3'-phosphate
  modified_base 21: mod_base = OTHER; note = 2'-O-methyluridine-3'-phosphate N-[tris(GalNAc-alkyl)-amidodecanoyl)]-4-hydroxyprolinol (Hyp-(GalNAc-alkyl)3)
ctcccaccttttcttctaatt

SEQ ID NO: 2197 - RNA, 21 nt, synthetic construct
  source 1..21: mol_type = other RNA
  modified_base 1: mod_base = OTHER; note = 2'-O-methyluridine-3'-phosphorothioate
  modified_base 2: mod_base = OTHER; note = 2'-O-methylcytidine-3'-phosphorothioate
  modified_base 3: mod_base = OTHER; note = 2'-O-methylcytidine-3'-phosphate
  modified_base 4: mod_base = OTHER; note = 2'-O-methylcytidine-3'-phosphate
  modified_base 5: mod_base = OTHER; note = 2'-O-methyladenosine-3'-phosphate
  modified_base 6: mod_base = OTHER; note = 2'-O-methylcytidine-3'-phosphate
  modified_base 7: mod_base = OTHER; note = 2'-O-methylcytidine-3'-phosphate
  modified_base 8: mod_base = OTHER; note = 2'-O-methyluridine-3'-phosphate
  modified_base 9: mod_base = OTHER; note = 2'-fluorouridine-3'-phosphate
  modified_base 10: mod_base = OTHER; note = 2'-fluorouridine-3'-phosphate
  modified_base 11: mod_base = OTHER; note = 2'-fluorouridine-3'-phosphate
  modified_base 12: mod_base = OTHER; note = 2'-O-methylcytidine-3'-phosphate
  modified_base 13: mod_base = OTHER; note = 2'-O-methyluridine-3'-phosphate
  modified_base 14: mod_base = OTHER; note = 2'-O-methyluridine-3'-phosphate
  modified_base 15: mod_base = OTHER; note = 2'-O-methylcytidine-3'-phosphate
  modified_base 16: mod_base = OTHER; note = 2'-O-methyluridine-3'-phosphate
  modified_base 17: mod_base = OTHER; note = 2'-O-methyladenosine-3'-phosphate
  modified_base 18: mod_base = OTHER; note = 2'-O-methyladenosine-3'-phosphate
  modified_base 19: mod_base = OTHER; note = 2'-O-methyluridine-3'-phosphate
  modified_base 20: mod_base = OTHER; note = 2'-O-methylguanosine-3'-phosphate
  modified_base 21: mod_base = OTHER; note = 2'-O-methyluridine-3'-phosphate N-[tris(GalNAc-alkyl)-amidodecanoyl)]-4-hydroxyprolinol (Hyp-(GalNAc-alkyl)3)
tcccaccttttcttctaatgt

SEQ ID NO: 2198 - RNA, 21 nt, synthetic construct
  source 1..21: mol_type = other RNA
  modified_base 1: mod_base = OTHER; note = 2'-O-methylcytidine-3'-phosphorothioate
  modified_base 2: mod_base = OTHER; note = 2'-O-methylcytidine-3'-phosphorothioate
  modified_base 3: mod_base = OTHER; note = 2'-O-methylcytidine-3'-phosphate
  modified_base 4: mod_base = OTHER; note = 2'-O-methyladenosine-3'-phosphate
  modified_base 5: mod_base = OTHER; note = 2'-O-methylcytidine-3'-phosphate
  modified_base 6: mod_base = OTHER; note = 2'-O-methylcytidine-3'-phosphate
  modified_base 7: mod_base = OTHER; note = 2'-O-methyluridine-3'-phosphate
  modified_base 8: mod_base = OTHER; note = 2'-O-methyluridine-3'-phosphate
  modified_base 9: mod_base = OTHER; note = 2'-fluorouridine-3'-phosphate
  modified_base 10: mod_base = OTHER; note = 2'-fluorouridine-3'-phosphate
  modified_base 11: mod_base = OTHER; note = 2'-fluorocytidine-3'-phosphate
  modified_base 12: mod_base = OTHER; note = 2'-O-methyluridine-3'-phosphate
  modified_base 13: mod_base = OTHER; note = 2'-O-methyluridine-3'-phosphate
  modified_base 14: mod_base = OTHER; note = 2'-O-methylcytidine-3'-phosphate
  modified_base 15: mod_base = OTHER; note = 2'-O-methyluridine-3'-phosphate
  modified_base 16: mod_base = OTHER; note = 2'-O-methyladenosine-3'-phosphate
  modified_base 17: mod_base = OTHER; note = 2'-O-methyladenosine-3'-phosphate
  modified_base 18: mod_base = OTHER; note = 2'-O-methyluridine-3'-phosphate
  modified_base 19: mod_base = OTHER; note = 2'-O-methylguanosine-3'-phosphate
  modified_base 20: mod_base = OTHER; note = 2'-O-methyladenosine-3'-phosphate
  modified_base 21: mod_base = OTHER; note = 2'-O-methyluridine-3'-phosphate N-[tris(GalNAc-alkyl)-amidodecanoyl)]-4-hydroxyprolinol (Hyp-(GalNAc-alkyl)3)
cccaccttttcttctaatgat

SEQ ID NO: 2199 - RNA, 21 nt, synthetic construct
  source 1..21: mol_type = other RNA
  modified_base 1: mod_base = OTHER; note = 2'-O-methylcytidine-3'-phosphorothioate
  modified_base 2: mod_base = OTHER; note = 2'-O-methylcytidine-3'-phosphorothioate
  modified_base 3: mod_base = OTHER; note = 2'-O-methyladenosine-3'-phosphate
  modified_base 4: mod_base = OTHER; note = 2'-O-methylcytidine-3'-phosphate
  modified_base 5: mod_base = OTHER; note = 2'-O-methylcytidine-3'-phosphate
  modified_base 6: mod_base = OTHER; note = 2'-O-methyluridine-3'-phosphate
  modified_base 7: mod_base = OTHER; note = 2'-O-methyluridine-3'-phosphate
  modified_base 8: mod_base = OTHER; note = 2'-O-methyluridine-3'-phosphate
  modified_base 9: mod_base = OTHER; note = 2'-fluorouridine-3'-phosphate
  modified_base 10: mod_base = OTHER; note = 2'-fluorocytidine-3'-phosphate
  modified_base 11: mod_base = OTHER; note = 2'-fluorouridine-3'-phosphate
  modified_base 12: mod_base = OTHER; note = 2'-O-methyluridine-3'-phosphate
  modified_base 13: mod_base = OTHER; note = 2'-O-methylcytidine-3'-phosphate
  modified_base 14: mod_base = OTHER; note = 2'-O-methyluridine-3'-phosphate
  modified_base 15: mod_base = OTHER; note = 2'-O-methyladenosine-3'-phosphate
  modified_base 16: mod_base = OTHER; note = 2'-O-methyladenosine-3'-phosphate
  modified_base 17: mod_base = OTHER; note = 2'-O-methyluridine-3'-phosphate
  modified_base 18: mod_base = OTHER; note = 2'-O-methylguanosine-3'-phosphate
  modified_base 19: mod_base = OTHER; note = 2'-O-methyladenosine-3'-phosphate
  modified_base 20: mod_base = OTHER; note = 2'-O-methylguanosine-3'-phosphate
  modified_base 21: mod_base = OTHER; note = 2'-O-methyluridine-3'-phosphate N-[tris(GalNAc-alkyl)-amidodecanoyl)]-4-hydroxyprolinol (Hyp-(GalNAc-alkyl)3)
ccaccttttcttctaatgagt

SEQ ID NO: 2200 - RNA, 21 nt, synthetic construct
  source 1..21: mol_type = other RNA
  modified_base 1: mod_base = OTHER; note = 2'-O-methylcytidine-3'-phosphorothioate
  modified_base 2: mod_base = OTHER; note = 2'-O-methyladenosine-3'-phosphorothioate
  modified_base 3: mod_base = OTHER; note = 2'-O-methylcytidine-3'-phosphate
  modified_base 4: mod_base = OTHER; note = 2'-O-methylcytidine-3'-phosphate
  modified_base 5: mod_base = OTHER; note = 2'-O-methyluridine-3'-phosphate
  modified_base 6: mod_base = OTHER; note = 2'-O-methyluridine-3'-phosphate
  modified_base 7: mod_base = OTHER; note = 2'-O-methyluridine-3'-phosphate
  modified_base 8: mod_base = OTHER; note = 2'-O-methyluridine-3'-phosphate
  modified_base 9: mod_base = OTHER; note = 2'-fluorocytidine-3'-phosphate
  modified_base 10: mod_base = OTHER; note = 2'-fluorouridine-3'-phosphate
  modified_base 11: mod_base = OTHER; note = 2'-fluorouridine-3'-phosphate
  modified_base 12: mod_base = OTHER; note = 2'-O-methylcytidine-3'-phosphate
  modified_base 13: mod_base = OTHER; note = 2'-O-methyluridine-3'-phosphate
  modified_base 14: mod_base = OTHER; note = 2'-O-methyladenosine-3'-phosphate
  modified_base 15: mod_base = OTHER; note = 2'-O-methyladenosine-3'-phosphate
  modified_base 16: mod_base = OTHER; note = 2'-O-methyluridine-3'-phosphate
  modified_base 17: mod_base = OTHER; note = 2'-O-methylguanosine-3'-phosphate
  modified_base 18: mod_base = OTHER; note = 2'-O-methyladenosine-3'-phosphate
  modified_base 19: mod_base = OTHER; note = 2'-O-methylguanosine-3'-phosphate
  modified_base 20: mod_base = OTHER; note = 2'-O-methyluridine-3'-phosphate
  modified_base 21: mod_base = OTHER; note = 2'-O-methyluridine-3'-phosphate N-[tris(GalNAc-alkyl)-amidodecanoyl)]-4-hydroxyprolinol (Hyp-(GalNAc-alkyl)3)
caccttttcttctaatgagtt

SEQ ID NO: 2201 - RNA, 21 nt, synthetic construct
  source 1..21: mol_type = other RNA
  modified_base 1: mod_base = OTHER; note = 2'-O-methyladenosine-3'-phosphorothioate
  modified_base 2: mod_base = OTHER; note = 2'-O-methylcytidine-3'-phosphorothioate
  modified_base 3: mod_base = OTHER; note = 2'-O-methylcytidine-3'-phosphate
  modified_base 4: mod_base = OTHER; note = 2'-O-methyluridine-3'-phosphate
  modified_base 5: mod_base = OTHER; note = 2'-O-methyluridine-3'-phosphate
  modified_base 6: mod_base = OTHER; note = 2'-O-methyluridine-3'-phosphate
  modified_base 7: mod_base = OTHER; note = 2'-O-methyluridine-3'-phosphate
  modified_base 8: mod_base = OTHER; note = 2'-O-methylcytidine-3'-phosphate
  modified_base 9: mod_base = OTHER; note = 2'-fluorouridine-3'-phosphate
  modified_base 10: mod_base = OTHER; note = 2'-fluorouridine-3'-phosphate
  modified_base 11: mod_base = OTHER; note = 2'-fluorocytidine-3'-phosphate
  modified_base 12: mod_base = OTHER; note = 2'-O-methyluridine-3'-phosphate
  modified_base 13: mod_base = OTHER; note = 2'-O-methyladenosine-3'-phosphate
  modified_base 14: mod_base = OTHER; note = 2'-O-methyladenosine-3'-phosphate
  modified_base 15: mod_base = OTHER; note = 2'-O-methyluridine-3'-phosphate
  modified_base 16: mod_base = OTHER; note = 2'-O-methylguanosine-3'-phosphate
  modified_base 17: mod_base = OTHER; note = 2'-O-methyladenosine-3'-phosphate
  modified_base 18: mod_base = OTHER; note = 2'-O-methylguanosine-3'-phosphate
  modified_base 19: mod_base = OTHER; note = 2'-O-methyluridine-3'-phosphate
  modified_base 20: mod_base = OTHER; note = 2'-O-methylcytidine-3'-phosphate
  modified_base 21: mod_base = OTHER; note = 2'-O-methyluridine-3'-phosphate N-[tris(GalNAc-alkyl)-amidodecanoyl)]-4-hydroxyprolinol (Hyp-(GalNAc-alkyl)3)
accttttcttctaatgagtct

SEQ ID NO: 2202 - RNA, 21 nt, synthetic construct
  source 1..21: mol_type = other RNA
  modified_base 1: mod_base = OTHER; note = 2'-O-methylcytidine-3'-phosphorothioate
  modified_base 2: mod_base = OTHER; note = 2'-O-methylcytidine-3'-phosphorothioate
  modified_base 3: mod_base = OTHER; note = 2'-O-methylguanosine-3'-phosphate
  modified_base 4: mod_base = OTHER; note = 2'-O-methyluridine-3'-phosphate
  modified_base 5: mod_base = OTHER; note = 2'-O-methyluridine-3'-phosphate
  modified_base 6: mod_base = OTHER; note = 2'-O-methyluridine-3'-phosphate
  modified_base 7: mod_base = OTHER; note = 2'-O-methylcytidine-3'-phosphate
  modified_base 8: mod_base = OTHER; note = 2'-O-methyluridine-3'-phosphate
  modified_base 9: mod_base = OTHER; note = 2'-fluorocytidine-3'-phosphate
  modified_base 10: mod_base = OTHER; note = 2'-fluorocytidine-3'-phosphate
  modified_base 11: mod_base = OTHER; note = 2'-fluorouridine-3'-phosphate
  modified_base 12: mod_base = OTHER; note = 2'-O-methyluridine-3'-phosphate
  modified_base 13: mod_base = OTHER; note = 2'-O-methylguanosine-3'-phosphate
  modified_base 14: mod_base = OTHER; note = 2'-O-methylguanosine-3'-phosphate
  modified_base 15: mod_base = OTHER; note = 2'-O-methyluridine-3'-phosphate
  modified_base 16: mod_base = OTHER; note = 2'-O-methylcytidine-3'-phosphate
  modified_base 17: mod_base = OTHER; note = 2'-O-methyluridine-3'-phosphate
  modified_base 18: mod_base = OTHER; note = 2'-O-methyladenosine-3'-phosphate
  modified_base 19: mod_base = OTHER; note = 2'-O-methyladenosine-3'-phosphate
  modified_base 20: mod_base = OTHER; note = 2'-O-methylguanosine-3'-phosphate
  modified_base 21: mod_base = OTHER; note = 2'-O-methyluridine-3'-phosphate N-[tris(GalNAc-alkyl)-amidodecanoyl)]-4-hydroxyprolinol (Hyp-(GalNAc-alkyl)3)
ccgtttctccttggtctaagt

SEQ ID NO: 2203 - RNA, 21 nt, synthetic construct
  source 1..21: mol_type = other RNA
  modified_base 1: mod_base = OTHER; note = 2'-O-methylcytidine-3'-phosphorothioate
  modified_base 2: mod_base = OTHER; note = 2'-O-methylguanosine-3'-phosphorothioate
  modified_base 3: mod_base = OTHER; note = 2'-O-methyluridine-3'-phosphate
  modified_base 4: mod_base = OTHER; note = 2'-O-methyluridine-3'-phosphate
  modified_base 5: mod_base = OTHER; note = 2'-O-methyluridine-3'-phosphate
  modified_base 6: mod_base = OTHER; note = 2'-O-methylcytidine-3'-phosphate
  modified_base 7: mod_base = OTHER; note = 2'-O-methyluridine-3'-phosphate
  modified_base 8: mod_base = OTHER; note = 2'-O-methylcytidine-3'-phosphate
  modified_base 9: mod_base = OTHER; note = 2'-fluorocytidine-3'-phosphate
  modified_base 10: mod_base = OTHER; note = 2'-fluorouridine-3'-phosphate
  modified_base 11: mod_base = OTHER; note = 2'-fluorouridine-3'-phosphate
  modified_base 12: mod_base = OTHER; note = 2'-O-methylguanosine-3'-phosphate
  modified_base 13: mod_base = OTHER; note = 2'-O-methylguanosine-3'-phosphate
  modified_base 14: mod_base = OTHER; note = 2'-O-methyluridine-3'-phosphate
  modified_base 15: mod_base = OTHER; note = 2'-O-methylcytidine-3'-phosphate
  modified_base 16: mod_base = OTHER; note = 2'-O-methyluridine-3'-phosphate
  modified_base 17: mod_base = OTHER; note = 2'-O-methyladenosine-3'-phosphate
  modified_base 18: mod_base = OTHER; note = 2'-O-methyladenosine-3'-phosphate
  modified_base 19: mod_base = OTHER; note = 2'-O-methylguanosine-3'-phosphate
  modified_base 20: mod_base = OTHER; note = 2'-O-methyluridine-3'-phosphate
  modified_base 21: mod_base = OTHER; note = 2'-O-methyluridine-3'-phosphate N-[tris(GalNAc-alkyl)-amidodecanoyl)]-4-hydroxyprolinol (Hyp-(GalNAc-alkyl)3)
cgtttctccttggtctaagtt

SEQ ID NO: 2204 - RNA, 21 nt, synthetic construct
  source 1..21: mol_type = other RNA
  modified_base 1: mod_base = OTHER; note = 2'-O-methylguanosine-3'-phosphorothioate
  modified_base 2: mod_base = OTHER; note = 2'-O-methyluridine-3'-phosphorothioate
  modified_base 3: mod_base = OTHER; note = 2'-O-methyluridine-3'-phosphate
  modified_base 4: mod_base = OTHER; note = 2'-O-methyluridine-3'-phosphate
  modified_base 5: mod_base = OTHER; note = 2'-O-methylcytidine-3'-phosphate
  modified_base 6: mod_base = OTHER; note = 2'-O-methyluridine-3'-phosphate
  modified_base 7: mod_base = OTHER; note = 2'-O-methylcytidine-3'-phosphate
  modified_base 8: mod_base = OTHER; note = 2'-O-methylcytidine-3'-phosphate
  modified_base 9: mod_base = OTHER; note = 2'-fluorouridine-3'-phosphate
  modified_base 10: mod_base = OTHER; note = 2'-fluorouridine-3'-phosphate
  modified_base 11: mod_base = OTHER; note = 2'-fluoroguanosine-3'-phosphate
  modified_base 12: mod_base = OTHER; note = 2'-O-methylguanosine-3'-phosphate
  modified_base 13: mod_base = OTHER; note = 2'-O-methyluridine-3'-phosphate
  modified_base 14: mod_base = OTHER; note = 2'-O-methylcytidine-3'-phosphate
  modified_base 15: mod_base = OTHER; note = 2'-O-methyluridine-3'-phosphate
  modified_base 16: mod_base = OTHER; note = 2'-O-methyladenosine-3'-phosphate
  modified_base 17: mod_base = OTHER; note = 2'-O-methyladenosine-3'-phosphate
  modified_base 18: mod_base = OTHER; note = 2'-O-methylguanosine-3'-phosphate
  modified_base 19: mod_base = OTHER; note = 2'-O-methyluridine-3'-phosphate
  modified_base 20: mod_base = OTHER; note = 2'-O-methylguanosine-3'-phosphate
  modified_base 21: mod_base = OTHER; note = 2'-O-methyluridine-3'-phosphate N-[tris(GalNAc-alkyl)-amidodecanoyl)]-4-hydroxyprolinol (Hyp-(GalNAc-alkyl)3)
gtttctccttggtctaagtgt

SEQ ID NO: 2205 - RNA, 21 nt, synthetic construct
  source 1..21: mol_type = other RNA
  modified_base 1: mod_base = OTHER; note = 2'-O-methylguanosine-3'-phosphorothioate
  modified_base 2: mod_base = OTHER; note = 2'-O-methyluridine-3'-phosphorothioate
  modified_base 3: mod_base = OTHER; note = 2'-O-methyluridine-3'-phosphate
  modified_base 4: mod_base = OTHER; note = 2'-O-methyluridine-3'-phosphate
  modified_base 5: mod_base = OTHER; note = 2'-O-methylguanosine-3'-phosphate
  modified_base 6: mod_base = OTHER; note = 2'-O-methylcytidine-3'-phosphate
  modified_base 7: mod_base = OTHER; note = 2'-O-methyluridine-3'-phosphate
  modified_base 8: mod_base = OTHER; note = 2'-O-methylguanosine-3'-phosphate
  modified_base 9: mod_base = OTHER; note = 2'-fluoroguanosine-3'-phosphate
  modified_base 10: mod_base = OTHER; note = 2'-fluoroguanosine-3'-phosphate
  modified_base 11: mod_base = OTHER; note = 2'-fluorouridine-3'-phosphate
  modified_base 12: mod_base = OTHER; note = 2'-O-methyluridine-3'-phosphate
  modified_base 13: mod_base = OTHER; note = 2'-O-methyluridine-3'-phosphate
  modified_base 14: mod_base = OTHER; note = 2'-O-methyladenosine-3'-phosphate
  modified_base 15: mod_base = OTHER; note = 2'-O-methyluridine-3'-phosphate
  modified_base 16: mod_base = OTHER; note = 2'-O-methyluridine-3'-phosphate
  modified_base 17: mod_base = OTHER; note = 2'-O-methyluridine-3'-phosphate
  modified_base 18: mod_base = OTHER; note = 2'-O-methyluridine-3'-phosphate
  modified_base 19: mod_base = OTHER; note = 2'-O-methyladenosine-3'-phosphate
  modified_base 20: mod_base = OTHER; note = 2'-O-methylguanosine-3'-phosphate
  modified_base 21: mod_base = OTHER; note = 2'-O-methyluridine-3'-phosphate N-[tris(GalNAc-alkyl)-amidodecanoyl)]-4-hydroxyprolinol (Hyp-(GalNAc-alkyl)3)
gtttgctgggtttattttagt

SEQ ID NO: 2206 - RNA, 21 nt, synthetic construct
  source 1..21: mol_type = other RNA
  modified_base 1: mod_base = OTHER; note = 2'-O-methyluridine-3'-phosphorothioate
  modified_base 2: mod_base = OTHER; note = 2'-O-methyluridine-3'-phosphorothioate
  modified_base 3: mod_base = OTHER; note = 2'-O-methyluridine-3'-phosphate
  modified_base 4: mod_base = OTHER; note = 2'-O-methylguanosine-3'-phosphate
  modified_base 5: mod_base = OTHER; note = 2'-O-methylcytidine-3'-phosphate
  modified_base 6: mod_base = OTHER; note = 2'-O-methyluridine-3'-phosphate
  modified_base 7: mod_base = OTHER; note = 2'-O-methylguanosine-3'-phosphate
  modified_base 8: mod_base = OTHER; note = 2'-O-methylguanosine-3'-phosphate
  modified_base 9: mod_base = OTHER; note = 2'-fluoroguanosine-3'-phosphate
  modified_base 10: mod_base = OTHER; note = 2'-fluorouridine-3'-phosphate
  modified_base 11: mod_base = OTHER; note = 2'-fluorouridine-3'-phosphate
  modified_base 12: mod_base = OTHER; note = 2'-O-methyluridine-3'-phosphate
  modified_base 13: mod_base = OTHER; note = 2'-O-methyladenosine-3'-phosphate
  modified_base 14: mod_base = OTHER; note = 2'-O-methyluridine-3'-phosphate
  modified_base 15: mod_base = OTHER; note = 2'-O-methyluridine-3'-phosphate
  modified_base 16: mod_base = OTHER; note = 2'-O-methyluridine-3'-phosphate
  modified_base 17: mod_base = OTHER; note = 2'-O-methyluridine-3'-phosphate
  modified_base 18: mod_base = OTHER; note = 2'-O-methyladenosine-3'-phosphate
  modified_base 19: mod_base = OTHER; note = 2'-O-methylguanosine-3'-phosphate
  modified_base 20: mod_base = OTHER; note = 2'-O-methyladenosine-3'-phosphate
  modified_base 21: mod_base = OTHER; note = 2'-O-methyluridine-3'-phosphate N-[tris(GalNAc-alkyl)-amidodecanoyl)]-4-hydroxyprolinol (Hyp-(GalNAc-alkyl)3)
tttgctgggtttattttagat

SEQ ID NO: 2207 - RNA, 21 nt, synthetic construct
  source 1..21: mol_type = other RNA
  modified_base 1: mod_base = OTHER; note = 2'-O-methyluridine-3'-phosphorothioate
  modified_base 2: mod_base = OTHER; note = 2'-O-methyluridine-3'-phosphorothioate
  modified_base 3: mod_base = OTHER; note = 2'-O-methylguanosine-3'-phosphate
  modified_base 4: mod_base = OTHER; note = 2'-O-methylcytidine-3'-phosphate
  modified_base 5: mod_base = OTHER; note = 2'-O-methyluridine-3'-phosphate
  modified_base 6: mod_base = OTHER; note = 2'-O-methylguanosine-3'-phosphate
  modified_base 7: mod_base = OTHER; note = 2'-O-methylguanosine-3'-phosphate
  modified_base 8: mod_base = OTHER; note = 2'-O-methylguanosine-3'-phosphate
  modified_base 9: mod_base = OTHER; note = 2'-fluorouridine-3'-phosphate
  modified_base 10: mod_base = OTHER; note = 2'-fluorouridine-3'-phosphate
  modified_base 11: mod_base = OTHER; note = 2'-fluorouridine-3'-phosphate
  modified_base 12: mod_base = OTHER; note = 2'-O-methyladenosine-3'-phosphate
  modified_base 13: mod_base = OTHER; note = 2'-O-methyluridine-3'-phosphate
  modified_base 14: mod_base = OTHER; note = 2'-O-methyluridine-3'-phosphate
  modified_base 15: mod_base = OTHER; note = 2'-O-methyluridine-3'-phosphate
  modified_base 16: mod_base = OTHER; note = 2'-O-methyluridine-3'-phosphate
  modified_base 17: mod_base = OTHER; note = 2'-O-methyladenosine-3'-phosphate
  modified_base 18: mod_base = OTHER; note = 2'-O-methylguanosine-3'-phosphate
  modified_base 19: mod_base = OTHER; note = 2'-O-methyladenosine-3'-phosphate
  modified_base 20: mod_base = OTHER; note = 2'-O-methylguanosine-3'-phosphate
  modified_base 21: mod_base = OTHER; note = 2'-O-methyluridine-3'-phosphate N-[tris(GalNAc-alkyl)-amidodecanoyl)]-4-hydroxyprolinol (Hyp-(GalNAc-alkyl)3)
ttgctgggtttattttagagt

SEQ ID NO: 2208 - RNA, 21 nt, synthetic construct
  source 1..21: mol_type = other RNA
  modified_base 1: mod_base = OTHER; note = 2'-O-methyluridine-3'-phosphorothioate
  modified_base 2: mod_base = OTHER; note = 2'-O-methylguanosine-3'-phosphorothioate
  modified_base 3: mod_base = OTHER; note = 2'-O-methylcytidine-3'-phosphate
  modified_base 4: mod_base = OTHER; note = 2'-O-methyluridine-3'-phosphate
  modified_base 5: mod_base = OTHER; note = 2'-O-methylguanosine-3'-phosphate
  modified_base 6: mod_base = OTHER; note = 2'-O-methylguanosine-3'-phosphate
  modified_base 7: mod_base = OTHER; note = 2'-O-methylguanosine-3'-phosphate
  modified_base 8: mod_base = OTHER; note = 2'-O-methyluridine-3'-phosphate
  modified_base 9: mod_base = OTHER; note = 2'-fluorouridine-3'-phosphate
  modified_base 10: mod_base = OTHER; note = 2'-fluorouridine-3'-phosphate
  modified_base 11: mod_base = OTHER; note = 2'-fluoroadenosine-3'-phosphate
  modified_base 12: mod_base = OTHER; note = 2'-O-methyluridine-3'-phosphate
  modified_base 13: mod_base = OTHER; note = 2'-O-methyluridine-3'-phosphate
  modified_base 14: mod_base = OTHER; note = 2'-O-methyluridine-3'-phosphate
  modified_base 15: mod_base = OTHER; note = 2'-O-methyluridine-3'-phosphate
  modified_base 16: mod_base = OTHER; note = 2'-O-methyladenosine-3'-phosphate
  modified_base 17: mod_base = OTHER; note = 2'-O-methylguanosine-3'-phosphate
  modified_base 18: mod_base = OTHER; note = 2'-O-methyladenosine-3'-phosphate
  modified_base 19: mod_base = OTHER; note = 2'-O-methylguanosine-3'-phosphate
  modified_base 20: mod_base = OTHER; note = 2'-O-methyladenosine-3'-phosphate
  modified_base 21: mod_base = OTHER; note = 2'-O-methyluridine-3'-phosphate N-[tris(GalNAc-alkyl)-amidodecanoyl)]-4-hydroxyprolinol (Hyp-(GalNAc-alkyl)3)
tgctgggtttattttagagat

SEQ ID NO: 2209 - RNA, 21 nt, synthetic construct
  source 1..21: mol_type = other RNA
  modified_base 1: mod_base = OTHER; note = 2'-O-methylguanosine-3'-phosphorothioate
  modified_base 2: mod_base = OTHER; note = 2'-O-methylcytidine-3'-phosphorothioate
  modified_base 3: mod_base = OTHER; note = 2'-O-methyluridine-3'-phosphate
  modified_base 4: mod_base = OTHER; note = 2'-O-methylguanosine-3'-phosphate
  modified_base 5: mod_base = OTHER; note = 2'-O-methylguanosine-3'-phosphate
  modified_base 6: mod_base = OTHER; note = 2'-O-methylguanosine-3'-phosphate
  modified_base 7: mod_base = OTHER; note = 2'-O-methyluridine-3'-phosphate
  modified_base 8: mod_base = OTHER; note = 2'-O-methyluridine-3'-phosphate
  modified_base 9: mod_base = OTHER; note = 2'-fluorouridine-3'-phosphate
  modified_base 10: mod_base = OTHER; note = 2'-fluoroadenosine-3'-phosphate
  modified_base 11: mod_base = OTHER; note = 2'-fluorouridine-3'-phosphate
  modified_base 12: mod_base = OTHER; note = 2'-O-methyluridine-3'-phosphate
  modified_base 13: mod_base = OTHER; note = 2'-O-methyluridine-3'-phosphate
  modified_base 14: mod_base = OTHER; note = 2'-O-methyluridine-3'-phosphate
  modified_base 15: mod_base = OTHER; note = 2'-O-methyladenosine-3'-phosphate
  modified_base 16: mod_base = OTHER; note = 2'-O-methylguanosine-3'-phosphate
  modified_base 17: mod_base = OTHER; note = 2'-O-methyladenosine-3'-phosphate
  modified_base 18: mod_base = OTHER; note = 2'-O-methylguanosine-3'-phosphate
  modified_base 19: mod_base = OTHER; note = 2'-O-methyladenosine-3'-phosphate
  modified_base 20: mod_base = OTHER; note = 2'-O-methyladenosine-3'-phosphate
  modified_base 21: mod_base = OTHER; note = 2'-O-methyluridine-3'-phosphate N-[tris(GalNAc-alkyl)-amidodecanoyl)]-4-hydroxyprolinol (Hyp-(GalNAc-alkyl)3)
gctgggtttattttagagaat

SEQ ID NO: 2210 - RNA, 21 nt, synthetic construct
  source 1..21: mol_type = other RNA
  modified_base 1: mod_base = OTHER; note = 2'-O-methylcytidine-3'-phosphorothioate
  modified_base 2: mod_base = OTHER; note = 2'-O-methyluridine-3'-phosphorothioate
  modified_base 3: mod_base = OTHER; note = 2'-O-methylguanosine-3'-phosphate
  modified_base 4: mod_base = OTHER; note = 2'-O-methylguanosine-3'-phosphate
  modified_base 5: mod_base = OTHER; note = 2'-O-methylguanosine-3'-phosphate
  modified_base 6: mod_base = OTHER; note = 2'-O-methyluridine-3'-phosphate
  modified_base 7: mod_base = OTHER; note = 2'-O-methyluridine-3'-phosphate
  modified_base 8: mod_base = OTHER; note = 2'-O-methyluridine-3'-phosphate
  modified_base 9: mod_base = OTHER; note = 2'-fluoroadenosine-3'-phosphate
  modified_base 10: mod_base = OTHER; note = 2'-fluorouridine-3'-phosphate
  modified_base 11: mod_base = OTHER; note = 2'-fluorouridine-3'-phosphate
  modified_base 12: mod_base = OTHER; note = 2'-O-methyluridine-3'-phosphate
  modified_base 13: mod_base = OTHER; note = 2'-O-methyluridine-3'-phosphate
  modified_base 14: mod_base = OTHER; note = 2'-O-methyladenosine-3'-phosphate
  modified_base 15: mod_base = OTHER; note = 2'-O-methylguanosine-3'-phosphate
  modified_base 16: mod_base = OTHER; note = 2'-O-methyladenosine-3'-phosphate
  modified_base 17: mod_base = OTHER; note = 2'-O-methylguanosine-3'-phosphate
  modified_base 18: mod_base = OTHER; note = 2'-O-methyladenosine-3'-phosphate
  modified_base 19: mod_base = OTHER; note = 2'-O-methyladenosine-3'-phosphate
  modified_base 20: mod_base = OTHER; note = 2'-O-methyluridine-3'-phosphate
  modified_base 21: mod_base = OTHER; note = 2'-O-methyluridine-3'-phosphate N-[tris(GalNAc-alkyl)-amidodecanoyl)]-4-hydroxyprolinol (Hyp-(GalNAc-alkyl)3)
ctgggtttattttagagaatt

SEQ ID NO: 2211 - RNA, 21 nt, synthetic construct
  source 1..21: mol_type = other RNA
  modified_base 1: mod_base = OTHER; note = 2'-O-methyluridine-3'-phosphorothioate
  modified_base 2: mod_base = OTHER; note = 2'-O-methylguanosine-3'-phosphorothioate
  modified_base 3: mod_base = OTHER; note = 2'-O-methylguanosine-3'-phosphate
  modified_base 4: mod_base = OTHER; note = 2'-O-methylguanosine-3'-phosphate
  modified_base 5: mod_base = OTHER; note = 2'-O-methyluridine-3'-phosphate
  modified_base 6: mod_base = OTHER; note = 2'-O-methyluridine-3'-phosphate
  modified_base 7: mod_base = OTHER; note = 2'-O-methyluridine-3'-phosphate
  modified_base 8: mod_base = OTHER; note = 2'-O-methyladenosine-3'-phosphate
  modified_base 9: mod_base = OTHER; note = 2'-fluorouridine-3'-phosphate
  modified_base 10: mod_base = OTHER; note = 2'-fluorouridine-3'-phosphate
  modified_base 11: mod_base = OTHER; note = 2'-fluorouridine-3'-phosphate
  modified_base 12: mod_base = OTHER; note = 2'-O-methyluridine-3'-phosphate
  modified_base 13: mod_base = OTHER; note = 2'-O-methyladenosine-3'-phosphate
  modified_base 14: mod_base = OTHER; note = 2'-O-methylguanosine-3'-phosphate
  modified_base 15: mod_base = OTHER; note = 2'-O-methyladenosine-3'-phosphate
  modified_base 16: mod_base = OTHER; note = 2'-O-methylguanosine-3'-phosphate
  modified_base 17: mod_base = OTHER; note = 2'-O-methyladenosine-3'-phosphate
  modified_base 18: mod_base = OTHER; note = 2'-O-methyladenosine-3'-phosphate
  modified_base 19: mod_base = OTHER; note = 2'-O-methyluridine-3'-phosphate
  modified_base 20: mod_base = OTHER; note = 2'-O-methylguanosine-3'-phosphate
  modified_base 21: mod_base = OTHER; note = 2'-O-methyluridine-3'-phosphate N-[tris(GalNAc-alkyl)-amidodecanoyl)]-4-hydroxyprolinol (Hyp-(GalNAc-alkyl)3)
tgggtttattttagagaatgt

SEQ ID NO: 2212 - RNA, 21 nt, synthetic construct
  source 1..21: mol_type = other RNA
  modified_base 1: mod_base = OTHER; note = 2'-O-methylguanosine-3'-phosphorothioate
  modified_base 2: mod_base = OTHER; note = 2'-O-methylguanosine-3'-phosphorothioate
  modified_base 3: mod_base = OTHER; note = 2'-O-methylguanosine-3'-phosphate
  modified_base 4: mod_base = OTHER; note = 2'-O-methyluridine-3'-phosphate
  modified_base 5: mod_base = OTHER; note = 2'-O-methyluridine-3'-phosphate
  modified_base 6: mod_base = OTHER; note = 2'-O-methyluridine-3'-phosphate
  modified_base 7: mod_base = OTHER; note = 2'-O-methyladenosine-3'-phosphate
  modified_base 8: mod_base = OTHER; note = 2'-O-methyluridine-3'-phosphate
  modified_base 9: mod_base = OTHER; note = 2'-fluorouridine-3'-phosphate
  modified_base 10: mod_base = OTHER; note = 2'-fluorouridine-3'-phosphate
  modified_base 11: mod_base = OTHER; note = 2'-fluorouridine-3'-phosphate
  modified_base 12: mod_base = OTHER; note = 2'-O-methyladenosine-3'-phosphate
  modified_base 13: mod_base = OTHER; note = 2'-O-methylguanosine-3'-phosphate
  modified_base 14: mod_base = OTHER; note = 2'-O-methyladenosine-3'-phosphate
  modified_base 15: mod_base = OTHER; note = 2'-O-methylguanosine-3'-phosphate
  modified_base 16: mod_base = OTHER; note = 2'-O-methyladenosine-3'-phosphate
  modified_base 17: mod_base = OTHER; note = 2'-O-methyladenosine-3'-phosphate
  modified_base 18: mod_base = OTHER; note = 2'-O-methyluridine-3'-phosphate
  modified_base 19: mod_base = OTHER; note = 2'-O-methylguanosine-3'-phosphate
  modified_base 20: mod_base = OTHER; note = 2'-O-methylguanosine-3'-phosphate
  modified_base 21: mod_base = OTHER; note = 2'-O-methyluridine-3'-phosphate N-[tris(GalNAc-alkyl)-amidodecanoyl)]-4-hydroxyprolinol (Hyp-(GalNAc-alkyl)3)
gggtttattttagagaatggt

SEQ ID NO: 2213 - RNA, 21 nt, synthetic construct
  source 1..21: mol_type = other RNA
  modified_base 1: mod_base = OTHER; note = 2'-O-methylguanosine-3'-phosphorothioate
  modified_base 2: mod_base = OTHER; note = 2'-O-methyladenosine-3'-phosphorothioate
  modified_base 3: mod_base = OTHER; note = 2'-O-methylguanosine-3'-phosphate
  modified_base 4: mod_base = OTHER; note = 2'-O-methylguanosine-3'-phosphate
  modified_base 5: mod_base = OTHER; note = 2'-O-methylcytidine-3'-phosphate
  modified_base 6: mod_base = OTHER; note = 2'-O-methyladenosine-3'-phosphate
  modified_base 7: mod_base = OTHER; note = 2'-O-methyladenosine-3'-phosphate
  modified_base 8: mod_base = OTHER; note = 2'-O-methylguanosine-3'-phosphate
  modified_base 9: mod_base = OTHER; note = 2'-fluoroadenosine-3'-phosphate
  modified_base 10: mod_base = OTHER; note = 2'-fluoroadenosine-3'-phosphate
  modified_base 11: mod_base = OTHER; note = 2'-fluorocytidine-3'-phosphate
  modified_base 12: mod_base = OTHER; note = 2'-O-methylcytidine-3'-phosphate
  modified_base 13: mod_base = OTHER; note = 2'-O-methyladenosine-3'-phosphate
  modified_base 14: mod_base = OTHER; note = 2'-O-methylguanosine-3'-phosphate
  modified_base 15: mod_base = OTHER; note = 2'-O-methyluridine-3'-phosphate
  modified_base 16: mod_base = OTHER; note = 2'-O-methylguanosine-3'-phosphate
  modified_base 17: mod_base = OTHER; note = 2'-O-methyluridine-3'-phosphate
  modified_base 18: mod_base = OTHER; note = 2'-O-methyluridine-3'-phosphate
  modified_base 19: mod_base = OTHER; note = 2'-O-methyluridine-3'-phosphate
  modified_base 20: mod_base = OTHER; note = 2'-O-methyladenosine-3'-phosphate
  modified_base 21: mod_base = OTHER; note = 2'-O-methyluridine-3'-phosphate N-[tris(GalNAc-alkyl)-amidodecanoyl)]-4-hydroxyprolinol (Hyp-(GalNAc-alkyl)3)
gaggcaagaaccagtgtttat

SEQ ID NO: 2214 - RNA, 21 nt, synthetic construct
  source 1..21: mol_type = other RNA
  modified_base 1: mod_base = OTHER; note = 2'-O-methyladenosine-3'-phosphorothioate
  modified_base 2: mod_base = OTHER; note = 2'-O-methylguanosine-3'-phosphorothioate
  modified_base 3: mod_base = OTHER; note = 2'-O-methylguanosine-3'-phosphate
  modified_base 4: mod_base = OTHER; note = 2'-O-methylcytidine-3'-phosphate
  modified_base 5: mod_base = OTHER; note = 2'-O-methyladenosine-3'-phosphate
  modified_base 6: mod_base = OTHER; note = 2'-O-methyladenosine-3'-phosphate
  modified_base 7: mod_base = OTHER; note = 2'-O-methylguanosine-3'-phosphate
  modified_base 8: mod_base = OTHER; note = 2'-O-methyladenosine-3'-phosphate
  modified_base 9: mod_base = OTHER; note = 2'-fluoroadenosine-3'-phosphate
  modified_base 10: mod_base = OTHER; note = 2'-fluorocytidine-3'-phosphate
  modified_base 11: mod_base = OTHER; note = 2'-fluorocytidine-3'-phosphate
  modified_base 12: mod_base = OTHER; note = 2'-O-methyladenosine-3'-phosphate
  modified_base 13: mod_base = OTHER; note = 2'-O-methylguanosine-3'-phosphate
  modified_base 14: mod_base = OTHER; note = 2'-O-methyluridine-3'-phosphate
  modified_base 15: mod_base = OTHER; note = 2'-O-methylguanosine-3'-phosphate
  modified_base 16: mod_base = OTHER; note = 2'-O-methyluridine-3'-phosphate
  modified_base 17: mod_base = OTHER; note = 2'-O-methyluridine-3'-phosphate
  modified_base 18: mod_base = OTHER; note = 2'-O-methyluridine-3'-phosphate
  modified_base 19: mod_base = OTHER; note = 2'-O-methyladenosine-3'-phosphate
  modified_base 20: mod_base = OTHER; note = 2'-O-methylguanosine-3'-phosphate
  modified_base 21: mod_base = OTHER; note = 2'-O-methyluridine-3'-phosphate N-[tris(GalNAc-alkyl)-amidodecanoyl)]-4-hydroxyprolinol (Hyp-(GalNAc-alkyl)3)
aggcaagaaccagtgtttagt

SEQ ID NO: 2215 - RNA, 21 nt, synthetic construct
  source 1..21: mol_type = other RNA
  modified_base 1: mod_base = OTHER; note = 2'-O-methylguanosine-3'-phosphorothioate
  modified_base 2: mod_base = OTHER; note = 2'-O-methylguanosine-3'-phosphorothioate
  modified_base 3: mod_base = OTHER; note = 2'-O-methylcytidine-3'-phosphate
  modified_base 4: mod_base = OTHER; note = 2'-O-methyladenosine-3'-phosphate
  modified_base 5: mod_base = OTHER; note = 2'-O-methyladenosine-3'-phosphate
  modified_base 6: mod_base = OTHER; note = 2'-O-methylguanosine-3'-phosphate
  modified_base 7: mod_base = OTHER; note = 2'-O-methyladenosine-3'-phosphate
  modified_base 8: mod_base = OTHER; note = 2'-O-methyladenosine-3'-phosphate
  modified_base 9: mod_base = OTHER; note = 2'-fluorocytidine-3'-phosphate
  modified_base 10: mod_base = OTHER; note = 2'-fluorocytidine-3'-phosphate
  modified_base 11: mod_base = OTHER; note = 2'-fluoroadenosine-3'-phosphate
  modified_base 12: mod_base = OTHER; note = 2'-O-methylguanosine-3'-phosphate
  modified_base 13: mod_base = OTHER; note = 2'-O-methyluridine-3'-phosphate
  modified_base 14: mod_base = OTHER; note = 2'-O-methylguanosine-3'-phosphate
  modified_base 15: mod_base = OTHER; note = 2'-O-methyluridine-3'-phosphate
  modified_base 16: mod_base = OTHER; note = 2'-O-methyluridine-3'-phosphate
  modified_base 17: mod_base = OTHER; note = 2'-O-methyluridine-3'-phosphate
  modified_base 18: mod_base = OTHER; note = 2'-O-methyladenosine-3'-phosphate
  modified_base 19: mod_base = OTHER; note = 2'-O-methylguanosine-3'-phosphate
  modified_base 20: mod_base = OTHER; note = 2'-O-methylcytidine-3'-phosphate
  modified_base 21: mod_base = OTHER; note = 2'-O-methyluridine-3'-phosphate N-[tris(GalNAc-alkyl)-amidodecanoyl)]-4-hydroxyprolinol (Hyp-(GalNAc-alkyl)3)
ggcaagaaccagtgtttagct

SEQ ID NO: 2216 - RNA, 21 nt, synthetic construct
  source 1..21: mol_type = other RNA
  modified_base 1: mod_base = OTHER; note = 2'-O-methylguanosine-3'-phosphorothioate
  modified_base 2: mod_base = OTHER; note = 2'-O-methylcytidine-3'-phosphorothioate
  modified_base 3: mod_base = OTHER; note = 2'-O-methyladenosine-3'-phosphate
  modified_base 4: mod_base = OTHER; note = 2'-O-methyladenosine-3'-phosphate
  modified_base 5: mod_base = OTHER; note = 2'-O-methylguanosine-3'-phosphate
  modified_base 6: mod_base = OTHER; note = 2'-O-methyladenosine-3'-phosphate
  modified_base 7: mod_base = OTHER; note = 2'-O-methyladenosine-3'-phosphate
  modified_base 8: mod_base = OTHER; note = 2'-O-methylcytidine-3'-phosphate
  modified_base 9: mod_base = OTHER; note = 2'-fluorocytidine-3'-phosphate
  modified_base 10: mod_base = OTHER; note = 2'-fluoroadenosine-3'-phosphate
  modified_base 11: mod_base = OTHER; note = 2'-fluoroguanosine-3'-phosphate
  modified_base 12: mod_base = OTHER; note = 2'-O-methyluridine-3'-phosphate
  modified_base 13: mod_base = OTHER; note = 2'-O-methylguanosine-3'-phosphate
  modified_base 14: mod_base = OTHER; note = 2'-O-methyluridine-3'-phosphate
  modified_base 15: mod_base = OTHER; note = 2'-O-methyluridine-3'-phosphate
  modified_base 16: mod_base = OTHER; note = 2'-O-methyluridine-3'-phosphate
  modified_base 17: mod_base = OTHER; note = 2'-O-methyladenosine-3'-phosphate
  modified_base 18: mod_base = OTHER; note = 2'-O-methylguanosine-3'-phosphate
  modified_base 19: mod_base = OTHER; note = 2'-O-methylcytidine-3'-phosphate
  modified_base 20: mod_base = OTHER; note = 2'-O-methylguanosine-3'-phosphate
  modified_base 21: mod_base = OTHER; note = 2'-O-methyluridine-3'-phosphate N-[tris(GalNAc-alkyl)-amidodecanoyl)]-4-hydroxyprolinol (Hyp-(GalNAc-alkyl)3)
gcaagaaccagtgtttagcgt

SEQ ID NO: 2217 - RNA, 21 nt, synthetic construct
  source 1..21: mol_type = other RNA
  modified_base 1: mod_base = OTHER; note = 2'-O-methylcytidine-3'-phosphorothioate
  modified_base 2: mod_base = OTHER; note = 2'-O-methyladenosine-3'-phosphorothioate
  modified_base 3: mod_base = OTHER; note = 2'-O-methyladenosine-3'-phosphate
  modified_base 4: mod_base = OTHER; note = 2'-O-methylguanosine-3'-phosphate
  modified_base 5: mod_base = OTHER; note = 2'-O-methyladenosine-3'-phosphate
  modified_base 6: mod_base = OTHER; note = 2'-O-methyladenosine-3'-phosphate
  modified_base 7: mod_base = OTHER; note = 2'-O-methylcytidine-3'-phosphate
  modified_base 8: mod_base = OTHER; note = 2'-O-methylcytidine-3'-phosphate
  modified_base 9: mod_base = OTHER; note = 2'-fluoroadenosine-3'-phosphate
  modified_base 10: mod_base = OTHER; note = 2'-fluoroguanosine-3'-phosphate
  modified_base 11: mod_base = OTHER; note = 2'-fluorouridine-3'-phosphate
  modified_base 12: mod_base = OTHER; note = 2'-O-methylguanosine-3'-phosphate
  modified_base 13: mod_base = OTHER; note = 2'-O-methyluridine-3'-phosphate
  modified_base 14: mod_base = OTHER; note = 2'-O-methyluridine-3'-phosphate
  modified_base 15: mod_base = OTHER; note = 2'-O-methyluridine-3'-phosphate
  modified_base 16: mod_base = OTHER; note = 2'-O-methyladenosine-3'-phosphate
  modified_base 17: mod_base = OTHER; note = 2'-O-methylguanosine-3'-phosphate
  modified_base 18: mod_base = OTHER; note = 2'-O-methylcytidine-3'-phosphate
  modified_base 19: mod_base = OTHER; note = 2'-O-methylguanosine-3'-phosphate
  modified_base 20: mod_base = OTHER; note = 2'-O-methylcytidine-3'-phosphate
  modified_base 21: mod_base = OTHER; note = 2'-O-methyluridine-3'-phosphate N-[tris(GalNAc-alkyl)-amidodecanoyl)]-4-hydroxyprolinol (Hyp-(GalNAc-alkyl)3)
caagaaccagtgtttagcgct

SEQ ID NO: 2218 - RNA, 21 nt, synthetic construct
  source 1..21: mol_type = other RNA
  modified_base 1: mod_base = OTHER; note = 2'-O-methyladenosine-3'-phosphorothioate
  modified_base 2: mod_base = OTHER; note = 2'-O-methyladenosine-3'-phosphorothioate
  modified_base 3: mod_base = OTHER; note = 2'-O-methylguanosine-3'-phosphate
  modified_base 4: mod_base = OTHER; note = 2'-O-methyladenosine-3'-phosphate
  modified_base 5: mod_base = OTHER; note = 2'-O-methyladenosine-3'-phosphate
  modified_base 6: mod_base = OTHER; note = 2'-O-methylcytidine-3'-phosphate
  modified_base 7: mod_base = OTHER; note = 2'-O-methylcytidine-3'-phosphate
  modified_base 8: mod_base = OTHER; note = 2'-O-methyladenosine-3'-phosphate
  modified_base 9: mod_base = OTHER; note = 2'-fluoroguanosine-3'-phosphate
  modified_base 10: mod_base = OTHER; note = 2'-fluorouridine-3'-phosphate
  modified_base 11: mod_base = OTHER; note = 2'-fluoroguanosine-3'-phosphate
  modified_base 12: mod_base = OTHER; note = 2'-O-methyluridine-3'-phosphate
  modified_base 13: mod_base = OTHER; note = 2'-O-methyluridine-3'-phosphate
  modified_base 14: mod_base = OTHER; note = 2'-O-methyluridine-3'-phosphate
  modified_base 15: mod_base = OTHER; note = 2'-O-methyladenosine-3'-phosphate
  modified_base 16: mod_base = OTHER; note = 2'-O-methylguanosine-3'-phosphate
  modified_base 17: mod_base = OTHER; note = 2'-O-methylcytidine-3'-phosphate
  modified_base 18: mod_base = OTHER; note = 2'-O-methylguanosine-3'-phosphate
  modified_base 19: mod_base = OTHER; note = 2'-O-methylcytidine-3'-phosphate
  modified_base 20: mod_base = OTHER; note = 2'-O-methylguanosine-3'-phosphate
  modified_base 21: mod_base = OTHER; note = 2'-O-methyluridine-3'-phosphate N-[tris(GalNAc-alkyl)-amidodecanoyl)]-4-hydroxyprolinol (Hyp-(GalNAc-alkyl)3)
aagaaccagtgtttagcgcgt

SEQ ID NO: 2219 - RNA, 21 nt, synthetic construct
  source 1..21: mol_type = other RNA
  modified_base 1: mod_base = OTHER; note = 2'-O-methyladenosine-3'-phosphorothioate
  modified_base 2: mod_base = OTHER; note = 2'-O-methylguanosine-3'-phosphorothioate
  modified_base 3: mod_base = OTHER; note = 2'-O-methyladenosine-3'-phosphate
  modified_base 4: mod_base = OTHER; note = 2'-O-methyladenosine-3'-phosphate
  modified_base 5: mod_base = OTHER; note = 2'-O-methylcytidine-3'-phosphate
  modified_base 6: mod_base = OTHER; note = 2'-O-methylcytidine-3'-phosphate
  modified_base 7: mod_base = OTHER; note = 2'-O-methyladenosine-3'-phosphate
  modified_base 8: mod_base = OTHER; note = 2'-O-methylguanosine-3'-phosphate
  modified_base 9: mod_base = OTHER; note = 2'-fluorouridine-3'-phosphate
  modified_base 10: mod_base = OTHER; note = 2'-fluoroguanosine-3'-phosphate
  modified_base 11: mod_base = OTHER; note = 2'-fluorouridine-3'-phosphate
  modified_base 12: mod_base = OTHER; note = 2'-O-methyluridine-3'-phosphate
  modified_base 13: mod_base = OTHER; note = 2'-O-methyluridine-3'-phosphate
  modified_base 14: mod_base = OTHER; note = 2'-O-methyladenosine-3'-phosphate
  modified_base 15: mod_base = OTHER; note = 2'-O-methylguanosine-3'-phosphate
  modified_base 16: mod_base = OTHER; note = 2'-O-methylcytidine-3'-phosphate
  modified_base 17: mod_base = OTHER; note = 2'-O-methylguanosine-3'-phosphate
  modified_base 18: mod_base = OTHER; note = 2'-O-methylcytidine-3'-phosphate
  modified_base 19: mod_base = OTHER; note = 2'-O-methylguanosine-3'-phosphate
  modified_base 20: mod_base = OTHER; note = 2'-O-methylguanosine-3'-phosphate
  modified_base 21: mod_base = OTHER; note = 2'-O-methyluridine-3'-phosphate N-[tris(GalNAc-alkyl)-amidodecanoyl)]-4-hydroxyprolinol (Hyp-(GalNAc-alkyl)3)
agaaccagtgtttagcgcggt

SEQ ID NO: 2220 - RNA, 21 nt, synthetic construct
  source 1..21: mol_type = other RNA
  modified_base 1: mod_base = OTHER; note = 2'-O-methylguanosine-3'-phosphorothioate
  modified_base 2: mod_base = OTHER; note = 2'-O-methyladenosine-3'-phosphorothioate
  modified_base 3: mod_base = OTHER; note = 2'-O-methyladenosine-3'-phosphate
  modified_base 4: mod_base = OTHER; note = 2'-O-methylcytidine-3'-phosphate
  modified_base 5: mod_base = OTHER; note = 2'-O-methylcytidine-3'-phosphate
  modified_base 6: mod_base = OTHER; note = 2'-O-methyladenosine-3'-phosphate
  modified_base 7: mod_base = OTHER; note = 2'-O-methylguanosine-3'-phosphate
  modified_base 8: mod_base = OTHER; note = 2'-O-methyluridine-3'-phosphate
  modified_base 9: mod_base = OTHER; note = 2'-fluoroguanosine-3'-phosphate
  modified_base 10: mod_base = OTHER; note = 2'-fluorouridine-3'-phosphate
  modified_base 11: mod_base = OTHER; note = 2'-fluorouridine-3'-phosphate
  modified_base 12: mod_base = OTHER; note = 2'-O-methyluridine-3'-phosphate
  modified_base 13: mod_base = OTHER; note = 2'-O-methyladenosine-3'-phosphate
  modified_base 14: mod_base = OTHER; note = 2'-O-methylguanosine-3'-phosphate
  modified_base 15: mod_base = OTHER; note = 2'-O-methylcytidine-3'-phosphate
  modified_base 16: mod_base = OTHER; note = 2'-O-methylguanosine-3'-phosphate
  modified_base 17: mod_base = OTHER; note = 2'-O-methylcytidine-3'-phosphate
  modified_base 18: mod_base = OTHER; note = 2'-O-methylguanosine-3'-phosphate
  modified_base 19: mod_base = OTHER; note = 2'-O-methylguanosine-3'-phosphate
  modified_base 20: mod_base = OTHER; note = 2'-O-methylguanosine-3'-phosphate
  modified_base 21: mod_base = OTHER; note = 2'-O-methyluridine-3'-phosphate N-[tris(GalNAc-alkyl)-amidodecanoyl)]-4-hydroxyprolinol (Hyp-(GalNAc-alkyl)3)
gaaccagtgtttagcgcgggt

SEQ ID NO: 2221 - RNA, 21 nt, synthetic construct
  source 1..21: mol_type = other RNA
  modified_base 1: mod_base = OTHER; note = 2'-O-methyladenosine-3'-phosphorothioate
  modified_base 2: mod_base = OTHER; note = 2'-O-methyladenosine-3'-phosphorothioate
  modified_base 3: mod_base = OTHER; note = 2'-O-methylcytidine-3'-phosphate
  modified_base 4: mod_base = OTHER; note = 2'-O-methylcytidine-3'-phosphate
  modified_base 5: mod_base = OTHER; note = 2'-O-methyladenosine-3'-phosphate
  modified_base 6: mod_base = OTHER; note = 2'-O-methylguanosine-3'-phosphate
  modified_base 7: mod_base = OTHER; note = 2'-O-methyluridine-3'-phosphate
  modified_base 8: mod_base = OTHER; note = 2'-O-methylguanosine-3'-phosphate
  modified_base 9: mod_base = OTHER; note = 2'-fluorouridine-3'-phosphate
  modified_base 10: mod_base = OTHER; note = 2'-fluorouridine-3'-phosphate
  modified_base 11: mod_base = OTHER; note = 2'-fluorouridine-3'-phosphate
  modified_base 12: mod_base = OTHER; note = 2'-O-methyladenosine-3'-phosphate
  modified_base 13: mod_base = OTHER; note = 2'-O-methylguanosine-3'-phosphate
  modified_base 14: mod_base = OTHER; note = 2'-O-methylcytidine-3'-phosphate
  modified_base 15: mod_base = OTHER; note = 2'-O-methylguanosine-3'-phosphate
  modified_base 16: mod_base = OTHER; note = 2'-O-methylcytidine-3'-phosphate
  modified_base 17: mod_base = OTHER; note = 2'-O-methylguanosine-3'-phosphate
  modified_base 18: mod_base = OTHER; note = 2'-O-methylguanosine-3'-phosphate
  modified_base 19: mod_base = OTHER; note = 2'-O-methylguanosine-3'-phosphate
  modified_base 20: mod_base = OTHER; note = 2'-O-methyladenosine-3'-phosphate
  modified_base 21: mod_base = OTHER; note = 2'-O-methyluridine-3'-phosphate N-[tris(GalNAc-alkyl)-amidodecanoyl)]-4-hydroxyprolinol (Hyp-(GalNAc-alkyl)3)
aaccagtgtttagcgcgggat

SEQ ID NO: 2222 - RNA, 21 nt, synthetic construct
  source 1..21: mol_type = other RNA
  modified_base 1: mod_base = OTHER; note = 2'-O-methylcytidine-3'-phosphorothioate
  modified_base 2: mod_base = OTHER; note = 2'-O-methyluridine-3'-phosphorothioate
  modified_base 3: mod_base = OTHER; note = 2'-O-methylguanosine-3'-phosphate
  modified_base 4: mod_base = OTHER; note = 2'-O-methyluridine-3'-phosphate
  modified_base 5: mod_base = OTHER; note = 2'-O-methyluridine-3'-phosphate
  modified_base 6: mod_base = OTHER; note = 2'-O-methylcytidine-3'-phosphate
  modified_base 7: mod_base = OTHER; note = 2'-O-methylcytidine-3'-phosphate
  modified_base 8: mod_base = OTHER; note = 2'-O-methyladenosine-3'-phosphate
  modified_base 9: mod_base = OTHER; note = 2'-fluoroadenosine-3'-phosphate
  modified_base 10: mod_base = OTHER; note = 2'-fluoroadenosine-3'-phosphate
  modified_base 11: mod_base = OTHER; note = 2'-fluoroadenosine-3'-phosphate
  modified_base 12: mod_base = OTHER; note = 2'-O-methyladenosine-3'-phosphate
  modified_base 13: mod_base = OTHER; note = 2'-O-methylguanosine-3'-phosphate
  modified_base 14: mod_base = OTHER; note = 2'-O-methyladenosine-3'-phosphate
  modified_base 15: mod_base = OTHER; note = 2'-O-methyladenosine-3'-phosphate
  modified_base 16: mod_base = OTHER; note = 2'-O-methyluridine-3'-phosphate
  modified_base 17: mod_base = OTHER; note = 2'-O-methyluridine-3'-phosphate
  modified_base 18: mod_base = OTHER; note = 2'-O-methylcytidine-3'-phosphate
  modified_base 19: mod_base = OTHER; note = 2'-O-methylcytidine-3'-phosphate
  modified_base 20: mod_base = OTHER; note = 2'-O-methyladenosine-3'-phosphate
  modified_base 21: mod_base = OTHER; note = 2'-O-methyluridine-3'-phosphate N-[tris(GalNAc-alkyl)-amidodecanoyl)]-4-hydroxyprolinol (Hyp-(GalNAc-alkyl)3)
ctgttccaaaaagaattccat

SEQ ID NO: 2223 - RNA, 21 nt, synthetic construct
  source 1..21: mol_type = other RNA
  modified_base 1: mod_base = OTHER; note = 2'-O-methyluridine-3'-phosphorothioate
  modified_base 2: mod_base = OTHER; note = 2'-O-methylguanosine-3'-phosphorothioate
  modified_base 3: mod_base = OTHER; note = 2'-O-methyluridine-3'-phosphate
  modified_base 4: mod_base = OTHER; note = 2'-O-methyluridine-3'-phosphate
  modified_base 5: mod_base = OTHER; note = 2'-O-methylcytidine-3'-phosphate
  modified_base 6: mod_base = OTHER; note = 2'-O-methylcytidine-3'-phosphate
  modified_base 7: mod_base = OTHER; note = 2'-O-methyladenosine-3'-phosphate
  modified_base 8: mod_base = OTHER; note = 2'-O-methyladenosine-3'-phosphate
  modified_base 9: mod_base = OTHER; note = 2'-fluoroadenosine-3'-phosphate
  modified_base 10: mod_base = OTHER; note = 2'-fluoroadenosine-3'-phosphate
  modified_base 11: mod_base = OTHER; note = 2'-fluoroadenosine-3'-phosphate
  modified_base 12: mod_base = OTHER; note = 2'-O-methylguanosine-3'-phosphate
  modified_base 13: mod_base = OTHER; note = 2'-O-methyladenosine-3'-phosphate
  modified_base 14: mod_base = OTHER; note = 2'-O-methyladenosine-3'-phosphate
  modified_base 15: mod_base = OTHER; note = 2'-O-methyluridine-3'-phosphate
  modified_base 16: mod_base = OTHER; note = 2'-O-methyluridine-3'-phosphate
  modified_base 17: mod_base = OTHER; note = 2'-O-methylcytidine-3'-phosphate
  modified_base 18: mod_base = OTHER; note = 2'-O-methylcytidine-3'-phosphate
  modified_base 19: mod_base = OTHER; note = 2'-O-methyladenosine-3'-phosphate
  modified_base 20: mod_base = OTHER; note = 2'-O-methyladenosine-3'-phosphate
  modified_base 21: mod_base = OTHER; note = 2'-O-methyluridine-3'-phosphate N-[tris(GalNAc-alkyl)-amidodecanoyl)]-4-hydroxyprolinol (Hyp-(GalNAc-alkyl)3)
tgttccaaaaagaattccaat

SEQ ID NO: 2224 - RNA, 21 nt, synthetic construct
  source 1..21: mol_type = other RNA
  modified_base 1: mod_base = OTHER; note = 2'-O-methylguanosine-3'-phosphorothioate
  modified_base 2: mod_base = OTHER; note = 2'-O-methyluridine-3'-phosphorothioate
  modified_base 3: mod_base = OTHER; note = 2'-O-methyluridine-3'-phosphate
  modified_base 4: mod_base = OTHER; note = 2'-O-methylcytidine-3'-phosphate
  modified_base 5: mod_base = OTHER; note = 2'-O-methylcytidine-3'-phosphate
  modified_base 6: mod_base = OTHER; note = 2'-O-methyladenosine-3'-phosphate
  modified_base 7: mod_base = OTHER; note = 2'-O-methyladenosine-3'-phosphate
  modified_base 8: mod_base = OTHER; note = 2'-O-methyladenosine-3'-phosphate
  modified_base 9: mod_base = OTHER; note = 2'-fluoroadenosine-3'-phosphate
  modified_base 10: mod_base = OTHER; note = 2'-fluoroadenosine-3'-phosphate
  modified_base 11: mod_base = OTHER; note = 2'-fluoroguanosine-3'-phosphate
  modified_base 12: mod_base = OTHER; note = 2'-O-methyladenosine-3'-phosphate
  modified_base 13: mod_base = OTHER; note = 2'-O-methyladenosine-3'-phosphate
  modified_base 14: mod_base = OTHER; note = 2'-O-methyluridine-3'-phosphate
  modified_base 15: mod_base = OTHER; note = 2'-O-methyluridine-3'-phosphate
  modified_base 16: mod_base = OTHER; note = 2'-O-methylcytidine-3'-phosphate
  modified_base 17: mod_base = OTHER; note = 2'-O-methylcytidine-3'-phosphate
  modified_base 18: mod_base = OTHER; note = 2'-O-methyladenosine-3'-phosphate
  modified_base 19: mod_base = OTHER; note = 2'-O-methyladenosine-3'-phosphate
  modified_base 20: mod_base = OTHER; note = 2'-O-methylcytidine-3'-phosphate
  modified_base 21: mod_base = OTHER; note = 2'-O-methyluridine-3'-phosphate N-[tris(GalNAc-alkyl)-amidodecanoyl)]-4-hydroxyprolinol (Hyp-(GalNAc-alkyl)3)
gttccaaaaagaattccaact

SEQ ID NO: 2225 - RNA, 21 nt, synthetic construct
  source 1..21: mol_type = other RNA
  modified_base 1: mod_base = OTHER; note = 2'-O-methyluridine-3'-phosphorothioate
  modified_base 2: mod_base = OTHER; note = 2'-O-methylcytidine-3'-phosphorothioate
  modified_base 3: mod_base = OTHER; note = 2'-O-methylcytidine-3'-phosphate
  modified_base 4: mod_base = OTHER; note = 2'-O-methyladenosine-3'-phosphate
  modified_base 5: mod_base = OTHER; note = 2'-O-methyladenosine-3'-phosphate
  modified_base 6: mod_base = OTHER; note = 2'-O-methyladenosine-3'-phosphate
  modified_base 7: mod_base = OTHER; note = 2'-O-methyladenosine-3'-phosphate
  modified_base 8: mod_base = OTHER; note = 2'-O-methyladenosine-3'-phosphate
  modified_base 9: mod_base = OTHER; note = 2'-fluoroguanosine-3'-phosphate
  modified_base 10: mod_base = OTHER; note = 2'-fluoroadenosine-3'-phosphate
  modified_base 11: mod_base = OTHER; note = 2'-fluoroadenosine-3'-phosphate
  modified_base 12: mod_base = OTHER; note = 2'-O-methyluridine-3'-phosphate
  modified_base 13: mod_base = OTHER; note = 2'-O-methyluridine-3'-phosphate
  modified_base 14: mod_base = OTHER; note = 2'-O-methylcytidine-3'-phosphate
  modified_base 15: mod_base = OTHER; note = 2'-O-methylcytidine-3'-phosphate
  modified_base 16: mod_base = OTHER; note = 2'-O-methyladenosine-3'-phosphate
  modified_base 17: mod_base = OTHER; note = 2'-O-methyladenosine-3'-phosphate
  modified_base 18: mod_base = OTHER; note = 2'-O-methylcytidine-3'-phosphate
  modified_base 19: mod_base = OTHER; note = 2'-O-methylcytidine-3'-phosphate
  modified_base 20: mod_base = OTHER; note = 2'-O-methylguanosine-3'-phosphate
  modified_base 21: mod_base = OTHER; note = 2'-O-methyluridine-3'-phosphate N-[tris(GalNAc-alkyl)-amidodecanoyl)]-4-hydroxyprolinol (Hyp-(GalNAc-alkyl)3)
tccaaaaagaattccaaccgt

SEQ ID NO: 2226 - RNA, 21 nt, synthetic construct
  source 1..21: mol_type = other RNA
  modified_base 1: mod_base = OTHER; note = 2'-O-methylcytidine-3'-phosphorothioate
  modified_base 2: mod_base = OTHER; note = 2'-O-methylcytidine-3'-phosphorothioate
  modified_base 3: mod_base = OTHER; note = 2'-O-methyladenosine-3'-phosphate
  modified_base 4: mod_base = OTHER; note = 2'-O-methyladenosine-3'-phosphate
  modified_base 5: mod_base = OTHER; note = 2'-O-methyladenosine-3'-phosphate
  modified_base 6: mod_base = OTHER; note = 2'-O-methyladenosine-3'-phosphate
  modified_base 7: mod_base = OTHER; note = 2'-O-methyladenosine-3'-phosphate
  modified_base 8: mod_base = OTHER; note = 2'-O-methylguanosine-3'-phosphate
  modified_base 9: mod_base = OTHER; note = 2'-fluoroadenosine-3'-phosphate
  modified_base 10: mod_base = OTHER; note = 2'-fluoroadenosine-3'-phosphate
  modified_base 11: mod_base = OTHER; note = 2'-fluorouridine-3'-phosphate
  modified_base 12: mod_base = OTHER; note = 2'-O-methyluridine-3'-phosphate
  modified_base 13: mod_base = OTHER; note = 2'-O-methylcytidine-3'-phosphate
  modified_base 14: mod_base = OTHER; note = 2'-O-methylcytidine-3'-phosphate
  modified_base 15: mod_base = OTHER; note = 2'-O-methyladenosine-3'-phosphate
  modified_base 16: mod_base = OTHER; note = 2'-O-methyladenosine-3'-phosphate
  modified_base 17: mod_base = OTHER; note = 2'-O-methylcytidine-3'-phosphate
  modified_base 18: mod_base = OTHER; note = 2'-O-methylcytidine-3'-phosphate
  modified_base 19: mod_base = OTHER; note = 2'-O-methylguanosine-3'-phosphate
  modified_base 20: mod_base = OTHER; note = 2'-O-methyladenosine-3'-phosphate
  modified_base 21: mod_base = OTHER; note = 2'-O-methyluridine-3'-phosphate N-[tris(GalNAc-alkyl)-amidodecanoyl)]-4-hydroxyprolinol (Hyp-(GalNAc-alkyl)3)
ccaaaaagaattccaaccgat

SEQ ID NO: 2227 - RNA, 21 nt, synthetic construct
  source 1..21: mol_type = other RNA
  modified_base 1: mod_base = OTHER; note = 2'-O-methylcytidine-3'-phosphorothioate
  modified_base 2: mod_base = OTHER; note = 2'-O-methyladenosine-3'-phosphorothioate
  modified_base 3: mod_base = OTHER; note = 2'-O-methyladenosine-3'-phosphate
  modified_base 4: mod_base = OTHER; note = 2'-O-methyladenosine-3'-phosphate
  modified_base 5: mod_base = OTHER; note = 2'-O-methyladenosine-3'-phosphate
  modified_base 6: mod_base = OTHER; note = 2'-O-methyladenosine-3'-phosphate
  modified_base 7: mod_base = OTHER; note = 2'-O-methylguanosine-3'-phosphate
  modified_base 8: mod_base = OTHER; note = 2'-O-methyladenosine-3'-phosphate
  modified_base 9: mod_base = OTHER; note = 2'-fluoroadenosine-3'-phosphate
  modified_base 10: mod_base = OTHER; note = 2'-fluorouridine-3'-phosphate
  modified_base 11: mod_base = OTHER; note = 2'-fluorouridine-3'-phosphate
  modified_base 12: mod_base = OTHER; note = 2'-O-methylcytidine-3'-phosphate
  modified_base 13: mod_base = OTHER; note = 2'-O-methylcytidine-3'-phosphate
  modified_base 14: mod_base = OTHER; note = 2'-O-methyladenosine-3'-phosphate
  modified_base 15: mod_base = OTHER; note = 2'-O-methyladenosine-3'-phosphate
  modified_base 16: mod_base = OTHER; note = 2'-O-methylcytidine-3'-phosphate
  modified_base 17: mod_base = OTHER; note = 2'-O-methylcytidine-3'-phosphate
  modified_base 18: mod_base = OTHER; note = 2'-O-methylguanosine-3'-phosphate
  modified_base 19: mod_base = OTHER; note = 2'-O-methyladenosine-3'-phosphate
  modified_base 20: mod_base = OTHER; note = 2'-O-methylcytidine-3'-phosphate
  modified_base 21: mod_base = OTHER; note = 2'-O-methyluridine-3'-phosphate N-[tris(GalNAc-alkyl)-amidodecanoyl)]-4-hydroxyprolinol (Hyp-(GalNAc-alkyl)3)
caaaaagaattccaaccgact

SEQ ID NO: 2228 - RNA, 21 nt, synthetic construct
  source 1..21: mol_type = other RNA
  modified_base 1: mod_base = OTHER; note = 2'-O-methyladenosine-3'-phosphorothioate
  modified_base 2: mod_base = OTHER; note = 2'-O-methyladenosine-3'-phosphorothioate
  modified_base 3: mod_base = OTHER; note = 2'-O-methyladenosine-3'-phosphate
  modified_base 4: mod_base = OTHER; note = 2'-O-methyladenosine-3'-phosphate
  modified_base 5: mod_base = OTHER; note = 2'-O-methyladenosine-3'-phosphate
  modified_base 6: mod_base = OTHER; note = 2'-O-methylguanosine-3'-phosphate
  modified_base 7: mod_base = OTHER; note = 2'-O-methyladenosine-3'-phosphate
  modified_base 8: mod_base = OTHER; note = 2'-O-methyladenosine-3'-phosphate
  modified_base 9: mod_base = OTHER; note = 2'-fluorouridine-3'-phosphate
  modified_base 10: mod_base = OTHER; note = 2'-fluorouridine-3'-phosphate
  modified_base 11: mod_base = OTHER; note = 2'-fluorocytidine-3'-phosphate
  modified_base 12: mod_base = OTHER; note = 2'-O-methylcytidine-3'-phosphate
  modified_base 13: mod_base = OTHER; note = 2'-O-methyladenosine-3'-phosphate
  modified_base 14: mod_base = OTHER; note = 2'-O-methyladenosine-3'-phosphate
  modified_base 15: mod_base = OTHER; note = 2'-O-methylcytidine-3'-phosphate
  modified_base 16: mod_base = OTHER; note = 2'-O-methylcytidine-3'-phosphate
  modified_base 17: mod_base = OTHER; note = 2'-O-methylguanosine-3'-phosphate
  modified_base 18: mod_base = OTHER; note = 2'-O-methyladenosine-3'-phosphate
  modified_base 19: mod_base = OTHER; note = 2'-O-methylcytidine-3'-phosphate
  modified_base 20: mod_base = OTHER; note = 2'-O-methylcytidine-3'-phosphate
  modified_base 21: mod_base = OTHER; note = 2'-O-methyluridine-3'-phosphate N-[tris(GalNAc-alkyl)-amidodecanoyl)]-4-hydroxyprolinol (Hyp-(GalNAc-alkyl)3)
aaaaagaattccaaccgacct

SEQ ID NO: 2229 - RNA, 21 nt, synthetic construct
  source 1..21: mol_type = other RNA
  modified_base 1: mod_base = OTHER; note = 2'-O-methyladenosine-3'-phosphorothioate
  modified_base 2: mod_base = OTHER; note = 2'-O-methyladenosine-3'-phosphorothioate
  modified_base 3: mod_base = OTHER; note = 2'-O-methyladenosine-3'-phosphate
  modified_base 4: mod_base = OTHER; note = 2'-O-methyladenosine-3'-phosphate
  modified_base 5: mod_base = OTHER; note = 2'-O-methylguanosine-3'-phosphate
  modified_base 6: mod_base = OTHER; note = 2'-O-methyladenosine-3'-phosphate
  modified_base 7: mod_base = OTHER; note = 2'-O-methyladenosine-3'-phosphate
  modified_base 8: mod_base = OTHER; note = 2'-O-methyluridine-3'-phosphate
  modified_base 9: mod_base = OTHER; note = 2'-fluorouridine-3'-phosphate
  modified_base 10: mod_base = OTHER; note = 2'-fluorocytidine-3'-phosphate
  modified_base 11: mod_base = OTHER; note = 2'-fluorocytidine-3'-phosphate
  modified_base 12: mod_base = OTHER; note = 2'-O-methyladenosine-3'-phosphate
  modified_base 13: mod_base = OTHER; note = 2'-O-methyladenosine-3'-phosphate
  modified_base 14: mod_base = OTHER; note = 2'-O-methylcytidine-3'-phosphate
  modified_base 15: mod_base = OTHER; note = 2'-O-methylcytidine-3'-phosphate
  modified_base 16: mod_base = OTHER; note = 2'-O-methylguanosine-3'-phosphate
  modified_base 17: mod_base = OTHER; note = 2'-O-methyladenosine-3'-phosphate
  modified_base 18: mod_base = OTHER; note = 2'-O-methylcytidine-3'-phosphate
  modified_base 19: mod_base = OTHER; note = 2'-O-methylcytidine-3'-phosphate
  modified_base 20: mod_base = OTHER; note = 2'-O-methyladenosine-3'-phosphate
  modified_base 21: mod_base = OTHER; note = 2'-O-methyluridine-3'-phosphate N-[tris(GalNAc-alkyl)-amidodecanoyl)]-4-hydroxyprolinol (Hyp-(GalNAc-alkyl)3)
aaaagaattccaaccgaccat

SEQ ID NO: 2230 - RNA, 21 nt, synthetic construct
  source 1..21: mol_type = other RNA
  modified_base 1: mod_base = OTHER; note = 2'-O-methyladenosine-3'-phosphorothioate
  modified_base 2: mod_base = OTHER; note = 2'-O-methyladenosine-3'-phosphorothioate
  modified_base 3: mod_base = OTHER; note = 2'-O-methyladenosine-3'-phosphate
  modified_base 4: mod_base = OTHER; note = 2'-O-methylguanosine-3'-phosphate
  modified_base 5: mod_base = OTHER; note = 2'-O-methyladenosine-3'-phosphate
  modified_base 6: mod_base = OTHER; note = 2'-O-methyladenosine-3'-phosphate
  modified_base 7: mod_base = OTHER; note = 2'-O-methyluridine-3'-phosphate
  modified_base 8: mod_base = OTHER; note = 2'-O-methyluridine-3'-phosphate
  modified_base 9: mod_base = OTHER; note = 2'-fluorocytidine-3'-phosphate
  modified_base 10: mod_base = OTHER; note = 2'-fluorocytidine-3'-phosphate
  modified_base 11: mod_base = OTHER; note = 2'-fluoroadenosine-3'-phosphate
  modified_base 12: mod_base = OTHER; note = 2'-O-methyladenosine-3'-phosphate
  modified_base 13: mod_base = OTHER; note = 2'-O-methylcytidine-3'-phosphate
  modified_base 14: mod_base = OTHER; note = 2'-O-methylcytidine-3'-phosphate
  modified_base 15: mod_base = OTHER; note = 2'-O-methylguanosine-3'-phosphate
  modified_base 16: mod_base = OTHER; note = 2'-O-methyladenosine-3'-phosphate
  modified_base 17: mod_base = OTHER; note = 2'-O-methylcytidine-3'-phosphate
  modified_base 18: mod_base = OTHER; note = 2'-O-methylcytidine-3'-phosphate
  modified_base 19: mod_base = OTHER; note = 2'-O-methyladenosine-3'-phosphate
  modified_base 20: mod_base = OTHER; note = 2'-O-methylguanosine-3'-phosphate
  modified_base 21: mod_base = OTHER; note = 2'-O-methyluridine-3'-phosphate N-[tris(GalNAc-alkyl)-amidodecanoyl)]-4-hydroxyprolinol (Hyp-(GalNAc-alkyl)3)
aaagaattccaaccgaccagt

SEQ ID NO: 2231 - RNA, 21 nt, synthetic construct
  source 1..21: mol_type = other RNA
  modified_base 1: mod_base = OTHER; note = 2'-O-methyladenosine-3'-phosphorothioate
  modified_base 2: mod_base = OTHER; note = 2'-O-methyladenosine-3'-phosphorothioate
  modified_base 3: mod_base = OTHER; note = 2'-O-methylguanosine-3'-phosphate
  modified_base 4: mod_base = OTHER; note = 2'-O-methyladenosine-3'-phosphate
  modified_base 5: mod_base = OTHER; note = 2'-O-methyladenosine-3'-phosphate
  modified_base 6: mod_base = OTHER; note = 2'-O-methyluridine-3'-phosphate
  modified_base 7: mod_base = OTHER; note = 2'-O-methyluridine-3'-phosphate
  modified_base 8: mod_base = OTHER; note = 2'-O-methylcytidine-3'-phosphate
  modified_base 9: mod_base = OTHER; note = 2'-fluorocytidine-3'-phosphate
  modified_base 10: mod_base = OTHER; note = 2'-fluoroadenosine-3'-phosphate
  modified_base 11: mod_base = OTHER; note = 2'-fluoroadenosine-3'-phosphate
  modified_base 12: mod_base = OTHER; note = 2'-O-methylcytidine-3'-phosphate
  modified_base 13: mod_base = OTHER; note = 2'-O-methylcytidine-3'-phosphate
  modified_base 14: mod_base = OTHER; note = 2'-O-methylguanosine-3'-phosphate
  modified_base 15: mod_base = OTHER; note = 2'-O-methyladenosine-3'-phosphate
  modified_base 16: mod_base = OTHER; note = 2'-O-methylcytidine-3'-phosphate
  modified_base 17: mod_base = OTHER; note = 2'-O-methylcytidine-3'-phosphate
  modified_base 18: mod_base = OTHER; note = 2'-O-methyladenosine-3'-phosphate
  modified_base 19: mod_base = OTHER; note = 2'-O-methylguanosine-3'-phosphate
  modified_base 20: mod_base = OTHER; note = 2'-O-methylcytidine-3'-phosphate
  modified_base 21: mod_base = OTHER; note = 2'-O-methyluridine-3'-phosphate N-[tris(GalNAc-alkyl)-amidodecanoyl)]-4-hydroxyprolinol (Hyp-(GalNAc-alkyl)3)
aagaattccaaccgaccagct

SEQ ID NO: 2232 - RNA, 21 nt, synthetic construct
  source 1..21: mol_type = other RNA
  modified_base 1: mod_base = OTHER; note = 2'-O-methyladenosine-3'-phosphorothioate
  modified_base 2: mod_base = OTHER; note = 2'-O-methylguanosine-3'-phosphorothioate
  modified_base 3: mod_base = OTHER; note = 2'-O-methyladenosine-3'-phosphate
  modified_base 4: mod_base = OTHER; note = 2'-O-methyladenosine-3'-phosphate
  modified_base 5: mod_base = OTHER; note = 2'-O-methyluridine-3'-phosphate
  modified_base 6: mod_base = OTHER; note = 2'-O-methyluridine-3'-phosphate
  modified_base 7: mod_base = OTHER; note = 2'-O-methylcytidine-3'-phosphate
  modified_base 8: mod_base = OTHER; note = 2'-O-methylcytidine-3'-phosphate
  modified_base 9: mod_base = OTHER; note = 2'-fluoroadenosine-3'-phosphate
  modified_base 10: mod_base = OTHER; note = 2'-fluoroadenosine-3'-phosphate
  modified_base 11: mod_base = OTHER; note = 2'-fluorocytidine-3'-phosphate
  modified_base 12: mod_base = OTHER; note = 2'-O-methylcytidine-3'-phosphate
  modified_base 13: mod_base = OTHER; note = 2'-O-methylguanosine-3'-phosphate
  modified_base 14: mod_base = OTHER; note = 2'-O-methyladenosine-3'-phosphate
  modified_base 15: mod_base = OTHER; note = 2'-O-methylcytidine-3'-phosphate
  modified_base 16: mod_base = OTHER; note = 2'-O-methylcytidine-3'-phosphate
  modified_base 17: mod_base = OTHER; note = 2'-O-methyladenosine-3'-phosphate
  modified_base 18: mod_base = OTHER; note = 2'-O-methylguanosine-3'-phosphate
  modified_base 19: mod_base = OTHER; note = 2'-O-methylcytidine-3'-phosphate
  modified_base 20: mod_base = OTHER; note = 2'-O-methyluridine-3'-phosphate
  modified_base 21: mod_base = OTHER; note = 2'-O-methyluridine-3'-phosphate N-[tris(GalNAc-alkyl)-amidodecanoyl)]-4-hydroxyprolinol (Hyp-(GalNAc-alkyl)3)
agaattccaaccgaccagctt

SEQ ID NO: 2233 - RNA, 21 nt, synthetic construct
  source 1..21: mol_type = other RNA
  modified_base 1: mod_base = OTHER; note = 2'-O-methylguanosine-3'-phosphorothioate
  modified_base 2: mod_base = OTHER; note = 2'-O-methyladenosine-3'-phosphorothioate
  modified_base 3: mod_base = OTHER; note = 2'-O-methyladenosine-3'-phosphate
  modified_base 4: mod_base = OTHER; note = 2'-O-methyluridine-3'-phosphate
  modified_base 5: mod_base = OTHER; note = 2'-O-methyluridine-3'-phosphate
  modified_base 6: mod_base = OTHER; note = 2'-O-methylcytidine-3'-phosphate
  modified_base 7: mod_base = OTHER; note = 2'-O-methylcytidine-3'-phosphate
  modified_base 8: mod_base = OTHER; note = 2'-O-methyladenosine-3'-phosphate
  modified_base 9: mod_base = OTHER; note = 2'-fluoroadenosine-3'-phosphate
  modified_base 10: mod_base = OTHER; note = 2'-fluorocytidine-3'-phosphate
  modified_base 11: mod_base = OTHER; note = 2'-fluorocytidine-3'-phosphate
  modified_base 12: mod_base = OTHER; note = 2'-O-methylguanosine-3'-phosphate
  modified_base 13: mod_base = OTHER; note = 2'-O-methyladenosine-3'-phosphate
  modified_base 14: mod_base = OTHER; note = 2'-O-methylcytidine-3'-phosphate
  modified_base 15: mod_base = OTHER; note = 2'-O-methylcytidine-3'-phosphate
  modified_base 16: mod_base = OTHER; note = 2'-O-methyladenosine-3'-phosphate
  modified_base 17: mod_base = OTHER; note = 2'-O-methylguanosine-3'-phosphate
  modified_base 18: mod_base = OTHER; note = 2'-O-methylcytidine-3'-phosphate
  modified_base 19: mod_base = OTHER; note = 2'-O-methyluridine-3'-phosphate
  modified_base 20: mod_base = OTHER; note = 2'-O-methyluridine-3'-phosphate
  modified_base 21: mod_base = OTHER; note = 2'-O-methyluridine-3'-phosphate N-[tris(GalNAc-alkyl)-amidodecanoyl)]-4-hydroxyprolinol (Hyp-(GalNAc-alkyl)3)
gaattccaaccgaccagcttt

SEQ ID NO: 2234 - RNA, 21 nt, synthetic construct
  source 1..21: mol_type = other RNA
  modified_base 1: mod_base = OTHER; note = 2'-O-methyladenosine-3'-phosphorothioate
  modified_base 2: mod_base = OTHER; note = 2'-O-methyladenosine-3'-phosphorothioate
  modified_base 3: mod_base = OTHER; note = 2'-O-methyluridine-3'-phosphate
  modified_base 4: mod_base = OTHER; note = 2'-O-methyluridine-3'-phosphate
  modified_base 5: mod_base = OTHER; note = 2'-O-methylcytidine-3'-phosphate
  modified_base 6: mod_base = OTHER; note = 2'-O-methylcytidine-3'-phosphate
  modified_base 7: mod_base = OTHER; note = 2'-O-methyladenosine-3'-phosphate
  modified_base 8: mod_base = OTHER; note = 2'-O-methyladenosine-3'-phosphate
  modified_base 9: mod_base = OTHER; note = 2'-fluorocytidine-3'-phosphate
  modified_base 10: mod_base = OTHER; note = 2'-fluorocytidine-3'-phosphate
  modified_base 11: mod_base = OTHER; note = 2'-fluoroguanosine-3'-phosphate
  modified_base 12: mod_base = OTHER; note = 2'-O-methyladenosine-3'-phosphate
  modified_base 13: mod_base = OTHER; note = 2'-O-methylcytidine-3'-phosphate
  modified_base 14: mod_base = OTHER; note = 2'-O-methylcytidine-3'-phosphate
  modified_base 15: mod_base = OTHER; note = 2'-O-methyladenosine-3'-phosphate
  modified_base 16: mod_base = OTHER; note = 2'-O-methylguanosine-3'-phosphate
  modified_base 17: mod_base = OTHER; note = 2'-O-methylcytidine-3'-phosphate
  modified_base 18: mod_base = OTHER; note = 2'-O-methyluridine-3'-phosphate
  modified_base 19: mod_base = OTHER; note = 2'-O-methyluridine-3'-phosphate
  modified_base 20: mod_base = OTHER; note = 2'-O-methylguanosine-3'-phosphate
  modified_base 21: mod_base = OTHER; note = 2'-O-methyluridine-3'-phosphate N-[tris(GalNAc-alkyl)-amidodecanoyl)]-4-hydroxyprolinol (Hyp-(GalNAc-alkyl)3)
aattccaaccgaccagcttgt

SEQ ID NO: 2235 - RNA, 21 nt, synthetic construct
  source 1..21: mol_type = other RNA
  modified_base 1: mod_base = OTHER; note = 2'-O-methyladenosine-3'-phosphorothioate
  modified_base 2: mod_base = OTHER; note = 2'-O-methyluridine-3'-phosphorothioate
  modified_base 3: mod_base = OTHER; note = 2'-O-methyluridine-3'-phosphate
  modified_base 4: mod_base = OTHER; note = 2'-O-methylcytidine-3'-phosphate
  modified_base 5: mod_base = OTHER; note = 2'-O-methylcytidine-3'-phosphate
  modified_base 6: mod_base = OTHER; note = 2'-O-methyladenosine-3'-phosphate
  modified_base 7: mod_base = OTHER; note = 2'-O-methyladenosine-3'-phosphate
  modified_base 8: mod_base = OTHER; note = 2'-O-methylcytidine-3'-phosphate
  modified_base 9: mod_base = OTHER; note = 2'-fluorocytidine-3'-phosphate
  modified_base 10: mod_base = OTHER; note = 2'-fluoroguanosine-3'-phosphate
  modified_base 11: mod_base = OTHER; note = 2'-fluoroadenosine-3'-phosphate
  modified_base 12: mod_base = OTHER; note = 2'-O-methylcytidine-3'-phosphate
  modified_base 13: mod_base = OTHER; note = 2'-O-methylcytidine-3'-phosphate
  modified_base 14: mod_base = OTHER; note = 2'-O-methyladenosine-3'-phosphate
  modified_base 15: mod_base = OTHER; note = 2'-O-methylguanosine-3'-phosphate
  modified_base 16: mod_base = OTHER; note = 2'-O-methylcytidine-3'-phosphate
  modified_base 17: mod_base = OTHER; note = 2'-O-methyluridine-3'-phosphate
  modified_base 18: mod_base = OTHER; note = 2'-O-methyluridine-3'-phosphate
  modified_base 19: mod_base = OTHER; note = 2'-O-methylguanosine-3'-phosphate
  modified_base 20: mod_base = OTHER; note = 2'-O-methyluridine-3'-phosphate
  modified_base 21: mod_base = OTHER; note = 2'-O-methyluridine-3'-phosphate N-[tris(GalNAc-alkyl)-amidodecanoyl)]-4-hydroxyprolinol (Hyp-(GalNAc-alkyl)3)
attccaaccgaccagcttgtt

SEQ ID NO: 2236 - RNA, 21 nt, synthetic construct
  source 1..21: mol_type = other RNA
  modified_base 1: mod_base = OTHER; note = 2'-O-methyluridine-3'-phosphorothioate
  modified_base 2: mod_base = OTHER; note = 2'-O-methyluridine-3'-phosphorothioate
  modified_base 3: mod_base = OTHER; note = 2'-O-methylcytidine-3'-phosphate
  modified_base 4: mod_base = OTHER; note = 2'-O-methylcytidine-3'-phosphate
  modified_base 5: mod_base = OTHER; note = 2'-O-methyladenosine-3'-phosphate
  modified_base 6: mod_base = OTHER; note = 2'-O-methyladenosine-3'-phosphate
  modified_base 7: mod_base = OTHER; note = 2'-O-methylcytidine-3'-phosphate
  modified_base 8: mod_base = OTHER; note = 2'-O-methylcytidine-3'-phosphate
  modified_base 9: mod_base = OTHER; note = 2'-fluoroguanosine-3'-phosphate
  modified_base 10: mod_base = OTHER; note = 2'-fluoroadenosine-3'-phosphate
  modified_base 11: mod_base = OTHER; note = 2'-fluorocytidine-3'-phosphate
  modified_base 12: mod_base = OTHER; note = 2'-O-methylcytidine-3'-phosphate
  modified_base 13: mod_base = OTHER; note = 2'-O-methyladenosine-3'-phosphate
  modified_base 14: mod_base = OTHER; note = 2'-O-methylguanosine-3'-phosphate
  modified_base 15: mod_base = OTHER; note = 2'-O-methylcytidine-3'-phosphate
  modified_base 16: mod_base = OTHER; note = 2'-O-methyluridine-3'-phosphate
  modified_base 17: mod_base = OTHER; note = 2'-O-methyluridine-3'-phosphate
  modified_base 18: mod_base = OTHER; note = 2'-O-methylguanosine-3'-phosphate
  modified_base 19: mod_base = OTHER; note = 2'-O-methyluridine-3'-phosphate
  modified_base 20: mod_base = OTHER; note = 2'-O-methyluridine-3'-phosphate
  modified_base 21: mod_base = OTHER; note = 2'-O-methyluridine-3'-phosphate N-[tris(GalNAc-alkyl)-amidodecanoyl)]-4-hydroxyprolinol (Hyp-(GalNAc-alkyl)3)
ttccaaccgaccagcttgttt

SEQ ID NO: 2237 - RNA, 21 nt, synthetic construct
  source 1..21: mol_type = other RNA
  modified_base 1: mod_base = OTHER; note = 2'-O-methyluridine-3'-phosphorothioate
  modified_base 2: mod_base = OTHER; note = 2'-O-methylcytidine-3'-phosphorothioate
  modified_base 3: mod_base = OTHER; note = 2'-O-methylcytidine-3'-phosphate
  modified_base 4: mod_base = OTHER; note = 2'-O-methyladenosine-3'-phosphate
  modified_base 5: mod_base = OTHER; note = 2'-O-methyladenosine-3'-phosphate
  modified_base 6: mod_base = OTHER; note = 2'-O-methylcytidine-3'-phosphate
  modified_base 7: mod_base = OTHER; note = 2'-O-methylcytidine-3'-phosphate
  modified_base 8: mod_base = OTHER; note = 2'-O-methylguanosine-3'-phosphate
  modified_base 9: mod_base = OTHER; note = 2'-fluoroadenosine-3'-phosphate
  modified_base 10: mod_base = OTHER; note = 2'-fluorocytidine-3'-phosphate
  modified_base 11: mod_base = OTHER; note = 2'-fluorocytidine-3'-phosphate
  modified_base 12: mod_base = OTHER; note = 2'-O-methyladenosine-3'-phosphate
  modified_base 13: mod_base = OTHER; note = 2'-O-methylguanosine-3'-phosphate
  modified_base 14: mod_base = OTHER; note = 2'-O-methylcytidine-3'-phosphate
  modified_base 15: mod_base = OTHER; note = 2'-O-methyluridine-3'-phosphate
  modified_base 16: mod_base = OTHER; note = 2'-O-methyluridine-3'-phosphate
  modified_base 17: mod_base = OTHER; note = 2'-O-methylguanosine-3'-phosphate
  modified_base 18: mod_base = OTHER; note = 2'-O-methyluridine-3'-phosphate
  modified_base 19: mod_base = OTHER; note = 2'-O-methyluridine-3'-phosphate
  modified_base 20: mod_base = OTHER; note = 2'-O-methyluridine-3'-phosphate
  modified_base 21: mod_base = OTHER; note = 2'-O-methyluridine-3'-phosphate N-[tris(GalNAc-alkyl)-amidodecanoyl)]-4-hydroxyprolinol (Hyp-(GalNAc-alkyl)3)
tccaaccgaccagcttgtttt

SEQ ID NO: 2238 - RNA, 21 nt, synthetic construct
  source 1..21: mol_type = other RNA
  modified_base 1: mod_base = OTHER; note = 2'-O-methylcytidine-3'-phosphorothioate
  modified_base 2: mod_base = OTHER; note = 2'-O-methylcytidine-3'-phosphorothioate
  modified_base 3: mod_base = OTHER; note = 2'-O-methyladenosine-3'-phosphate
  modified_base 4: mod_base = OTHER; note = 2'-O-methyladenosine-3'-phosphate
  modified_base 5: mod_base = OTHER; note = 2'-O-methylcytidine-3'-phosphate
  modified_base 6: mod_base = OTHER; note = 2'-O-methylcytidine-3'-phosphate
  modified_base 7: mod_base = OTHER; note = 2'-O-methylguanosine-3'-phosphate
  modified_base 8: mod_base = OTHER; note = 2'-O-methyladenosine-3'-phosphate
  modified_base 9: mod_base = OTHER; note = 2'-fluorocytidine-3'-phosphate
  modified_base 10: mod_base = OTHER; note = 2'-fluorocytidine-3'-phosphate
  modified_base 11: mod_base = OTHER; note = 2'-fluoroadenosine-3'-phosphate
  modified_base 12: mod_base = OTHER; note = 2'-O-methylguanosine-3'-phosphate
  modified_base 13: mod_base = OTHER; note = 2'-O-methylcytidine-3'-phosphate
  modified_base 14: mod_base = OTHER; note = 2'-O-methyluridine-3'-phosphate
  modified_base 15: mod_base = OTHER; note = 2'-O-methyluridine-3'-phosphate
  modified_base 16: mod_base = OTHER; note = 2'-O-methylguanosine-3'-phosphate
  modified_base 17: mod_base = OTHER; note = 2'-O-methyluridine-3'-phosphate
  modified_base 18: mod_base = OTHER; note = 2'-O-methyluridine-3'-phosphate
  modified_base 19: mod_base = OTHER; note = 2'-O-methyluridine-3'-phosphate
  modified_base 20: mod_base = OTHER; note = 2'-O-methylguanosine-3'-phosphate
  modified_base 21: mod_base = OTHER; note = 2'-O-methyluridine-3'-phosphate N-[tris(GalNAc-alkyl)-amidodecanoyl)]-4-hydroxyprolinol (Hyp-(GalNAc-alkyl)3)
ccaaccgaccagcttgtttgt

SEQ ID NO: 2239 - RNA, 21 nt, synthetic construct
  source 1..21: mol_type = other RNA
  modified_base 1: mod_base = OTHER; note = 2'-O-methylcytidine-3'-phosphorothioate
  modified_base 2: mod_base = OTHER; note = 2'-O-methyladenosine-3'-phosphorothioate
  modified_base 3: mod_base = OTHER; note = 2'-O-methyladenosine-3'-phosphate
  modified_base 4: mod_base = OTHER; note = 2'-O-methylcytidine-3'-phosphate
  modified_base 5: mod_base = OTHER; note = 2'-O-methylcytidine-3'-phosphate
  modified_base 6: mod_base = OTHER; note = 2'-O-methylguanosine-3'-phosphate
  modified_base 7: mod_base = OTHER; note = 2'-O-methyladenosine-3'-phosphate
  modified_base 8: mod_base = OTHER; note = 2'-O-methylcytidine-3'-phosphate
  modified_base 9: mod_base = OTHER; note = 2'-fluorocytidine-3'-phosphate
  modified_base 10: mod_base = OTHER; note = 2'-fluoroadenosine-3'-phosphate
  modified_base 11: mod_base = OTHER; note = 2'-fluoroguanosine-3'-phosphate
  modified_base 12: mod_base = OTHER; note = 2'-O-methylcytidine-3'-phosphate
  modified_base 13: mod_base = OTHER; note = 2'-O-methyluridine-3'-phosphate
  modified_base 14: mod_base = OTHER; note = 2'-O-methyluridine-3'-phosphate
  modified_base 15: mod_base = OTHER; note = 2'-O-methylguanosine-3'-phosphate
  modified_base 16: mod_base = OTHER; note = 2'-O-methyluridine-3'-phosphate
  modified_base 17: mod_base = OTHER; note = 2'-O-methyluridine-3'-phosphate
  modified_base 18: mod_base = OTHER; note = 2'-O-methyluridine-3'-phosphate
  modified_base 19: mod_base = OTHER; note = 2'-O-methylguanosine-3'-phosphate
  modified_base 20: mod_base = OTHER; note = 2'-O-methyluridine-3'-phosphate
  modified_base 21: mod_base = OTHER; note = 2'-O-methyluridine-3'-phosphate N-[tris(GalNAc-alkyl)-amidodecanoyl)]-4-hydroxyprolinol (Hyp-(GalNAc-alkyl)3)
caaccgaccagcttgtttgtt

SEQ ID NO: 2240 - RNA, 21 nt, synthetic construct
  source 1..21: mol_type = other RNA
  modified_base 1: mod_base = OTHER; note = 2'-O-methyladenosine-3'-phosphorothioate
  modified_base 2: mod_base = OTHER; note = 2'-O-methyladenosine-3'-phosphorothioate
  modified_base 3: mod_base = OTHER; note = 2'-O-methylcytidine-3'-phosphate
  modified_base 4: mod_base = OTHER; note = 2'-O-methylcytidine-3'-phosphate
  modified_base 5: mod_base = OTHER; note = 2'-O-methylguanosine-3'-phosphate
  modified_base 6: mod_base = OTHER; note = 2'-O-methyladenosine-3'-phosphate
  modified_base 7: mod_base = OTHER; note = 2'-O-methylcytidine-3'-phosphate
  modified_base 8: mod_base = OTHER; note = 2'-O-methylcytidine-3'-phosphate
  modified_base 9: mod_base = OTHER; note = 2'-fluoroadenosine-3'-phosphate
  modified_base 10: mod_base = OTHER; note = 2'-fluoroguanosine-3'-phosphate
  modified_base 11: mod_base = OTHER; note = 2'-fluorocytidine-3'-phosphate
  modified_base 12: mod_base = OTHER; note = 2'-O-methyluridine-3'-phosphate
  modified_base 13: mod_base = OTHER; note = 2'-O-methyluridine-3'-phosphate
  modified_base 14: mod_base = OTHER; note = 2'-O-methylguanosine-3'-phosphate
  modified_base 15: mod_base = OTHER; note = 2'-O-methyluridine-3'-phosphate
  modified_base 16: mod_base = OTHER; note = 2'-O-methyluridine-3'-phosphate
  modified_base 17: mod_base = OTHER; note = 2'-O-methyluridine-3'-phosphate
  modified_base 18: mod_base = OTHER; note = 2'-O-methylguanosine-3'-phosphate
  modified_base 19: mod_base = OTHER; note = 2'-O-methyluridine-3'-phosphate
  modified_base 20: mod_base = OTHER; note = 2'-O-methylguanosine-3'-phosphate
  modified_base 21: mod_base = OTHER; note = 2'-O-methyluridine-3'-phosphate N-[tris(GalNAc-alkyl)-amidodecanoyl)]-4-hydroxyprolinol (Hyp-(GalNAc-alkyl)3)
aaccgaccagcttgtttgtgt

SEQ ID NO: 2241 - RNA, 21 nt, synthetic construct
  source 1..21: mol_type = other RNA
  modified_base 1: mod_base = OTHER; note = 2'-O-methyladenosine-3'-phosphorothioate
  modified_base 2: mod_base = OTHER; note = 2'-O-methylcytidine-3'-phosphorothioate
  modified_base 3: mod_base = OTHER; note = 2'-O-methylcytidine-3'-phosphate
  modified_base 4: mod_base = OTHER; note = 2'-O-methylguanosine-3'-phosphate
  modified_base 5: mod_base = OTHER; note = 2'-O-methyladenosine-3'-phosphate
  modified_base 6: mod_base = OTHER; note = 2'-O-methylcytidine-3'-phosphate
  modified_base 7: mod_base = OTHER; note = 2'-O-methylcytidine-3'-phosphate
  modified_base 8: mod_base = OTHER; note = 2'-O-methyladenosine-3'-phosphate
  modified_base 9: mod_base = OTHER; note = 2'-fluoroguanosine-3'-phosphate
  modified_base 10: mod_base = OTHER; note = 2'-fluorocytidine-3'-phosphate
  modified_base 11: mod_base = OTHER; note = 2'-fluorouridine-3'-phosphate
  modified_base 12: mod_base = OTHER; note = 2'-O-methyluridine-3'-phosphate
  modified_base 13: mod_base = OTHER; note = 2'-O-methylguanosine-3'-phosphate
  modified_base 14: mod_base = OTHER; note = 2'-O-methyluridine-3'-phosphate
  modified_base 15: mod_base = OTHER; note = 2'-O-methyluridine-3'-phosphate
  modified_base 16: mod_base = OTHER; note = 2'-O-methyluridine-3'-phosphate
  modified_base 17: mod_base = OTHER; note = 2'-O-methylguanosine-3'-phosphate
  modified_base 18: mod_base = OTHER; note = 2'-O-methyluridine-3'-phosphate
  modified_base 19: mod_base = OTHER; note = 2'-O-methylguanosine-3'-phosphate
  modified_base 20: mod_base = OTHER; note = 2'-O-methyladenosine-3'-phosphate
  modified_base 21: mod_base = OTHER; note = 2'-O-methyluridine-3'-phosphate N-[tris(GalNAc-alkyl)-amidodecanoyl)]-4-hydroxyprolinol (Hyp-(GalNAc-alkyl)3)
accgaccagcttgtttgtgat

SEQ ID NO: 2242 - RNA, 21 nt, synthetic construct
  source 1..21: mol_type = other RNA
  modified_base 1: mod_base = OTHER; note = 2'-O-methylcytidine-3'-phosphorothioate
  modified_base 2: mod_base = OTHER; note = 2'-O-methylcytidine-3'-phosphorothioate
  modified_base 3: mod_base = OTHER; note = 2'-O-methylguanosine-3'-phosphate
  modified_base 4: mod_base = OTHER; note = 2'-O-methyladenosine-3'-phosphate
  modified_base 5: mod_base = OTHER; note = 2'-O-methylcytidine-3'-phosphate
  modified_base 6: mod_base = OTHER; note = 2'-O-methylcytidine-3'-phosphate
  modified_base 7: mod_base = OTHER; note = 2'-O-methyladenosine-3'-phosphate
  modified_base 8: mod_base = OTHER; note = 2'-O-methylguanosine-3'-phosphate
  modified_base 9: mod_base = OTHER; note = 2'-fluorocytidine-3'-phosphate
  modified_base 10: mod_base = OTHER; note = 2'-fluorouridine-3'-phosphate
  modified_base 11: mod_base = OTHER; note = 2'-fluorouridine-3'-phosphate
  modified_base 12: mod_base = OTHER; note = 2'-O-methylguanosine-3'-phosphate
  modified_base 13: mod_base = OTHER; note = 2'-O-methyluridine-3'-phosphate
  modified_base 14: mod_base = OTHER; note = 2'-O-methyluridine-3'-phosphate
  modified_base 15: mod_base = OTHER; note = 2'-O-methyluridine-3'-phosphate
  modified_base 16: mod_base = OTHER; note = 2'-O-methylguanosine-3'-phosphate
  modified_base 17: mod_base = OTHER; note = 2'-O-methyluridine-3'-phosphate
  modified_base 18: mod_base = OTHER; note = 2'-O-methylguanosine-3'-phosphate
  modified_base 19: mod_base = OTHER; note = 2'-O-methyladenosine-3'-phosphate
  modified_base 20: mod_base = OTHER; note = 2'-O-methyladenosine-3'-phosphate
  modified_base 21: mod_base = OTHER; note = 2'-O-methyluridine-3'-phosphate N-[tris(GalNAc-alkyl)-amidodecanoyl)]-4-hydroxyprolinol (Hyp-(GalNAc-alkyl)3)
ccgaccagcttgtttgtgaat

SEQ ID NO: 2243 - RNA, 21 nt, synthetic construct
  source 1..21: mol_type = other RNA
  modified_base 1: mod_base = OTHER; note = 2'-O-methylcytidine-3'-phosphorothioate
  modified_base 2: mod_base = OTHER; note = 2'-O-methylguanosine-3'-phosphorothioate
  modified_base 3: mod_base = OTHER; note = 2'-O-methyladenosine-3'-phosphate
  modified_base 4: mod_base = OTHER; note = 2'-O-methylcytidine-3'-phosphate
  modified_base 5: mod_base = OTHER; note = 2'-O-methylcytidine-3'-phosphate
  modified_base 6: mod_base = OTHER; note = 2'-O-methyladenosine-3'-phosphate
  modified_base 7: mod_base = OTHER; note = 2'-O-methylguanosine-3'-phosphate
  modified_base 8: mod_base = OTHER; note = 2'-O-methylcytidine-3'-phosphate
  modified_base 9: mod_base = OTHER; note = 2'-fluorouridine-3'-phosphate
  modified_base 10: mod_base = OTHER; note = 2'-fluorouridine-3'-phosphate
  modified_base 11: mod_base = OTHER; note = 2'-fluoroguanosine-3'-phosphate
  modified_base 12: mod_base = OTHER; note = 2'-O-methyluridine-3'-phosphate
  modified_base 13: mod_base = OTHER; note = 2'-O-methyluridine-3'-phosphate
  modified_base 14: mod_base = OTHER; note = 2'-O-methyluridine-3'-phosphate
  modified_base 15: mod_base = OTHER; note = 2'-O-methylguanosine-3'-phosphate
  modified_base 16: mod_base = OTHER; note = 2'-O-methyluridine-3'-phosphate
  modified_base 17: mod_base = OTHER; note = 2'-O-methylguanosine-3'-phosphate
  modified_base 18: mod_base = OTHER; note = 2'-O-methyladenosine-3'-phosphate
  modified_base 19: mod_base = OTHER; note = 2'-O-methyladenosine-3'-phosphate
  modified_base 20: mod_base = OTHER; note = 2'-O-methyladenosine-3'-phosphate
  modified_base 21: mod_base = OTHER; note = 2'-O-methyluridine-3'-phosphate N-[tris(GalNAc-alkyl)-amidodecanoyl)]-4-hydroxyprolinol (Hyp-(GalNAc-alkyl)3)
cgaccagcttgtttgtgaaat

SEQ ID NO: 2244 - RNA, 21 nt, synthetic construct
  source 1..21: mol_type = other RNA
  modified_base 1: mod_base = OTHER; note = 2'-O-methylguanosine-3'-phosphorothioate
  modified_base 2: mod_base = OTHER; note = 2'-O-methyladenosine-3'-phosphorothioate
  modified_base 3: mod_base = OTHER; note = 2'-O-methylcytidine-3'-phosphate
  modified_base 4: mod_base = OTHER; note = 2'-O-methylcytidine-3'-phosphate
  modified_base 5: mod_base = OTHER; note = 2'-O-methyladenosine-3'-phosphate
  modified_base 6: mod_base = OTHER; note = 2'-O-methylguanosine-3'-phosphate
  modified_base 7: mod_base = OTHER; note = 2'-O-methylcytidine-3'-phosphate
  modified_base 8: mod_base = OTHER; note = 2'-O-methyluridine-3'-phosphate
  modified_base 9: mod_base = OTHER; note = 2'-fluorouridine-3'-phosphate
  modified_base 10: mod_base = OTHER; note = 2'-fluoroguanosine-3'-phosphate
  modified_base 11: mod_base = OTHER; note = 2'-fluorouridine-3'-phosphate
  modified_base 12: mod_base = OTHER; note = 2'-O-methyluridine-3'-phosphate
  modified_base 13: mod_base = OTHER; note = 2'-O-methyluridine-3'-phosphate
  modified_base 14: mod_base = OTHER; note = 2'-O-methylguanosine-3'-phosphate
  modified_base 15: mod_base = OTHER; note = 2'-O-methyluridine-3'-phosphate
  modified_base 16: mod_base = OTHER; note = 2'-O-methylguanosine-3'-phosphate
  modified_base 17: mod_base = OTHER; note = 2'-O-methyladenosine-3'-phosphate
  modified_base 18: mod_base = OTHER; note = 2'-O-methyladenosine-3'-phosphate
  modified_base 19: mod_base = OTHER; note = 2'-O-methyladenosine-3'-phosphate
  modified_base 20: mod_base = OTHER; note = 2'-O-methylcytidine-3'-phosphate
  modified_base 21: mod_base = OTHER; note = 2'-O-methyluridine-3'-phosphate N-[tris(GalNAc-alkyl)-amidodecanoyl)]-4-hydroxyprolinol (Hyp-(GalNAc-alkyl)3)
gaccagcttgtttgtgaaact

SEQ ID NO: 2245 - RNA, 21 nt, synthetic construct
  source 1..21: mol_type = other RNA
  modified_base 1: mod_base = OTHER; note = 2'-O-methyladenosine-3'-phosphorothioate
  modified_base 2: mod_base = OTHER; note = 2'-O-methylcytidine-3'-phosphorothioate
  modified_base 3: mod_base = OTHER; note = 2'-O-methylcytidine-3'-phosphate
  modified_base 4: mod_base = OTHER; note = 2'-O-methyladenosine-3'-phosphate
  modified_base 5: mod_base = OTHER; note = 2'-O-methylguanosine-3'-phosphate
  modified_base 6: mod_base = OTHER; note = 2'-O-methylcytidine-3'-phosphate
  modified_base 7: mod_base = OTHER; note = 2'-O-methyluridine-3'-phosphate
  modified_base 8: mod_base = OTHER; note = 2'-O-methyluridine-3'-phosphate
  modified_base 9: mod_base = OTHER; note = 2'-fluoroguanosine-3'-phosphate
  modified_base 10: mod_base = OTHER; note = 2'-fluorouridine-3'-phosphate
  modified_base 11: mod_base = OTHER; note = 2'-fluorouridine-3'-phosphate
  modified_base 12: mod_base = OTHER; note = 2'-O-methyluridine-3'-phosphate
  modified_base 13: mod_base = OTHER; note = 2'-O-methylguanosine-3'-phosphate
  modified_base 14: mod_base = OTHER; note = 2'-O-methyluridine-3'-phosphate
  modified_base 15: mod_base = OTHER; note = 2'-O-methylguanosine-3'-phosphate
  modified_base 16: mod_base = OTHER; note = 2'-O-methyladenosine-3'-phosphate
  modified_base 17: mod_base = OTHER; note = 2'-O-methyladenosine-3'-phosphate
  modified_base 18: mod_base = OTHER; note = 2'-O-methyladenosine-3'-phosphate
  modified_base 19: mod_base = OTHER; note = 2'-O-methylcytidine-3'-phosphate
  modified_base 20: mod_base = OTHER; note = 2'-O-methyladenosine-3'-phosphate
  modified_base 21: mod_base = OTHER; note = 2'-O-methyluridine-3'-phosphate N-[tris(GalNAc-alkyl)-amidodecanoyl)]-4-hydroxyprolinol (Hyp-(GalNAc-alkyl)3)
accagcttgtttgtgaaacat

SEQ ID NO: 2246 - RNA, 21 nt, synthetic construct
  source 1..21: mol_type = other RNA
  modified_base 1: mod_base = OTHER; note = 2'-O-methylcytidine-3'-phosphorothioate
  modified_base 2: mod_base = OTHER; note = 2'-O-methylcytidine-3'-phosphorothioate
  modified_base 3: mod_base = OTHER; note = 2'-O-methyladenosine-3'-phosphate
  modified_base 4: mod_base = OTHER; note = 2'-O-methylguanosine-3'-phosphate
  modified_base 5: mod_base = OTHER; note = 2'-O-methylcytidine-3'-phosphate
  modified_base 6: mod_base = OTHER; note = 2'-O-methyluridine-3'-phosphate
  modified_base 7: mod_base = OTHER; note = 2'-O-methyluridine-3'-phosphate
  modified_base 8: mod_base = OTHER; note = 2'-O-methylguanosine-3'-phosphate
  modified_base 9: mod_base = OTHER; note = 2'-fluorouridine-3'-phosphate
  modified_base 10: mod_base = OTHER; note = 2'-fluorouridine-3'-phosphate
  modified_base 11: mod_base = OTHER; note = 2'-fluorouridine-3'-phosphate
  modified_base 12: mod_base = OTHER; note = 2'-O-methylguanosine-3'-phosphate
  modified_base 13: mod_base = OTHER; note = 2'-O-methyluridine-3'-phosphate
  modified_base 14: mod_base = OTHER; note = 2'-O-methylguanosine-3'-phosphate
  modified_base 15: mod_base = OTHER; note = 2'-O-methyladenosine-3'-phosphate
  modified_base 16: mod_base = OTHER; note = 2'-O-methyladenosine-3'-phosphate
  modified_base 17: mod_base = OTHER; note = 2'-O-methyladenosine-3'-phosphate
  modified_base 18: mod_base = OTHER; note = 2'-O-methylcytidine-3'-phosphate
  modified_base 19: mod_base = OTHER; note = 2'-O-methyladenosine-3'-phosphate
  modified_base 20: mod_base = OTHER; note = 2'-O-methyladenosine-3'-phosphate
  modified_base 21: mod_base = OTHER; note = 2'-O-methyluridine-3'-phosphate N-[tris(GalNAc-alkyl)-amidodecanoyl)]-4-hydroxyprolinol (Hyp-(GalNAc-alkyl)3)
ccagcttgtttgtgaaacaat

SEQ ID NO: 2247 - RNA, 21 nt, synthetic construct
  source 1..21: mol_type = other RNA
  modified_base 1: mod_base = OTHER; note = 2'-O-methylcytidine-3'-phosphorothioate
  modified_base 2: mod_base = OTHER; note = 2'-O-methyladenosine-3'-phosphorothioate
  modified_base 3: mod_base = OTHER; note = 2'-O-methylguanosine-3'-phosphate
  modified_base 4: mod_base = OTHER; note = 2'-O-methylcytidine-3'-phosphate
  modified_base 5: mod_base = OTHER; note = 2'-O-methyluridine-3'-phosphate
  modified_base 6: mod_base = OTHER; note = 2'-O-methyluridine-3'-phosphate
  modified_base 7: mod_base = OTHER; note = 2'-O-methylguanosine-3'-phosphate
  modified_base 8: mod_base = OTHER; note = 2'-O-methyluridine-3'-phosphate
  modified_base 9: mod_base = OTHER; note = 2'-fluorouridine-3'-phosphate
  modified_base 10: mod_base = OTHER; note = 2'-fluorouridine-3'-phosphate
  modified_base 11: mod_base = OTHER; note = 2'-fluoroguanosine-3'-phosphate
  modified_base 12: mod_base = OTHER; note = 2'-O-methyluridine-3'-phosphate
  modified_base 13: mod_base = OTHER; note = 2'-O-methylguanosine-3'-phosphate
  modified_base 14: mod_base = OTHER; note = 2'-O-methyladenosine-3'-phosphate
  modified_base 15: mod_base = OTHER; note = 2'-O-methyladenosine-3'-phosphate
  modified_base 16: mod_base = OTHER; note = 2'-O-methyladenosine-3'-phosphate
  modified_base 17: mod_base = OTHER; note = 2'-O-methylcytidine-3'-phosphate
  modified_base 18: mod_base = OTHER; note = 2'-O-methyladenosine-3'-phosphate
  modified_base 19: mod_base = OTHER; note = 2'-O-methyladenosine-3'-phosphate
  modified_base 20: mod_base = OTHER; note = 2'-O-methyladenosine-3'-phosphate
  modified_base 21: mod_base = OTHER; note = 2'-O-methyluridine-3'-phosphate N-[tris(GalNAc-alkyl)-amidodecanoyl)]-4-hydroxyprolinol (Hyp-(GalNAc-alkyl)3)
cagcttgtttgtgaaacaaat

SEQ ID NO: 2248 - RNA, 21 nt, synthetic construct
  source 1..21: mol_type = other RNA
  modified_base 1: mod_base = OTHER; note = 2'-O-methyladenosine-3'-phosphorothioate
  modified_base 2: mod_base = OTHER; note = 2'-O-methylguanosine-3'-phosphorothioate
  modified_base 3: mod_base = OTHER; note = 2'-O-methylcytidine-3'-phosphate
  modified_base 4: mod_base = OTHER; note = 2'-O-methyluridine-3'-phosphate
  modified_base 5: mod_base = OTHER; note = 2'-O-methyluridine-3'-phosphate
  modified_base 6: mod_base = OTHER; note = 2'-O-methylguanosine-3'-phosphate
  modified_base 7: mod_base = OTHER; note = 2'-O-methyluridine-3'-phosphate
  modified_base 8: mod_base = OTHER; note = 2'-O-methyluridine-3'-phosphate
  modified_base 9: mod_base = OTHER; note = 2'-fluorouridine-3'-phosphate
  modified_base 10: mod_base = OTHER; note = 2'-fluoroguanosine-3'-phosphate
  modified_base 11: mod_base = OTHER; note = 2'-fluorouridine-3'-phosphate
  modified_base 12: mod_base = OTHER; note = 2'-O-methylguanosine-3'-phosphate
  modified_base 13: mod_base = OTHER; note = 2'-O-methyladenosine-3'-phosphate
  modified_base 14: mod_base = OTHER; note = 2'-O-methyladenosine-3'-phosphate
  modified_base 15: mod_base = OTHER; note = 2'-O-methyladenosine-3'-phosphate
  modified_base 16: mod_base = OTHER; note = 2'-O-methylcytidine-3'-phosphate
  modified_base 17: mod_base = OTHER; note = 2'-O-methyladenosine-3'-phosphate
  modified_base 18: mod_base = OTHER; note = 2'-O-methyladenosine-3'-phosphate
  modified_base 19: mod_base = OTHER; note = 2'-O-methyladenosine-3'-phosphate
  modified_base 20: mod_base = OTHER; note = 2'-O-methyladenosine-3'-phosphate
  modified_base 21: mod_base = OTHER; note = 2'-O-methyluridine-3'-phosphate N-[tris(GalNAc-alkyl)-amidodecanoyl)]-4-hydroxyprolinol (Hyp-(GalNAc-alkyl)3)
agcttgtttgtgaaacaaaat

SEQ ID NO: 2249 - RNA, 21 nt, synthetic construct
  source 1..21: mol_type = other RNA
  modified_base 1: mod_base = OTHER; note = 2'-O-methylcytidine-3'-phosphorothioate
  modified_base 2: mod_base = OTHER; note = 2'-O-methyluridine-3'-phosphorothioate
  modified_base 3: mod_base = OTHER; note = 2'-O-methyluridine-3'-phosphate
  modified_base 4: mod_base = OTHER; note = 2'-O-methylguanosine-3'-phosphate
  modified_base 5: mod_base = OTHER; note = 2'-O-methyluridine-3'-phosphate
  modified_base 6: mod_base = OTHER; note = 2'-O-methyluridine-3'-phosphate
  modified_base 7: mod_base = OTHER; note = 2'-O-methyluridine-3'-phosphate
  modified_base 8: mod_base = OTHER; note = 2'-O-methylguanosine-3'-phosphate
  modified_base 9: mod_base = OTHER; note = 2'-fluorouridine-3'-phosphate
  modified_base 10: mod_base = OTHER; note = 2'-fluoroguanosine-3'-phosphate
  modified_base 11: mod_base = OTHER; note = 2'-fluoroadenosine-3'-phosphate
  modified_base 12: mod_base = OTHER; note = 2'-O-methyladenosine-3'-phosphate
  modified_base 13: mod_base = OTHER; note = 2'-O-methyladenosine-3'-phosphate
  modified_base 14: mod_base = OTHER; note = 2'-O-methylcytidine-3'-phosphate
  modified_base 15: mod_base = OTHER; note = 2'-O-methyladenosine-3'-phosphate
  modified_base 16: mod_base = OTHER; note = 2'-O-methyladenosine-3'-phosphate
  modified_base 17: mod_base = OTHER; note = 2'-O-methyladenosine-3'-phosphate
  modified_base 18: mod_base = OTHER; note = 2'-O-methyladenosine-3'-phosphate
  modified_base 19: mod_base = OTHER; note = 2'-O-methyladenosine-3'-phosphate
  modified_base 20: mod_base = OTHER; note = 2'-O-methyladenosine-3'-phosphate
  modified_base 21: mod_base = OTHER; note = 2'-O-methyluridine-3'-phosphate N-[tris(GalNAc-alkyl)-amidodecanoyl)]-4-hydroxyprolinol (Hyp-(GalNAc-alkyl)3)
cttgtttgtgaaacaaaaaat

SEQ ID NO: 2250 - RNA, 21 nt, synthetic construct
  source 1..21: mol_type = other RNA
  modified_base 1: mod_base = OTHER; note = 2'-O-methyluridine-3'-phosphorothioate
  modified_base 2: mod_base = OTHER; note = 2'-O-methyluridine-3'-phosphorothioate
  modified_base 3: mod_base = OTHER; note = 2'-O-methylguanosine-3'-phosphate
  modified_base 4: mod_base = OTHER; note = 2'-O-methyluridine-3'-phosphate
  modified_base 5: mod_base = OTHER; note = 2'-O-methyluridine-3'-phosphate
  modified_base 6: mod_base = OTHER; note = 2'-O-methyluridine-3'-phosphate
  modified_base 7: mod_base = OTHER; note = 2'-O-methylguanosine-3'-phosphate
  modified_base 8: mod_base = OTHER; note = 2'-O-methyluridine-3'-phosphate
  modified_base 9: mod_base = OTHER; note = 2'-fluoroguanosine-3'-phosphate
  modified_base 10: mod_base = OTHER; note = 2'-fluoroadenosine-3'-phosphate
  modified_base 11: mod_base = OTHER; note = 2'-fluoroadenosine-3'-phosphate
  modified_base 12: mod_base = OTHER; note = 2'-O-methyladenosine-3'-phosphate
  modified_base 13: mod_base = OTHER; note = 2'-O-methylcytidine-3'-phosphate
  modified_base 14: mod_base = OTHER; note = 2'-O-methyladenosine-3'-phosphate
  modified_base 15: mod_base = OTHER; note = 2'-O-methyladenosine-3'-phosphate
  modified_base 16: mod_base = OTHER; note = 2'-O-methyladenosine-3'-phosphate
  modified_base 17: mod_base = OTHER; note = 2'-O-methyladenosine-3'-phosphate
  modified_base 18: mod_base = OTHER; note = 2'-O-methyladenosine-3'-phosphate
  modified_base 19: mod_base = OTHER; note = 2'-O-methyladenosine-3'-phosphate
  modified_base 20: mod_base = OTHER; note = 2'-O-methylguanosine-3'-phosphate
  modified_base 21: mod_base = OTHER; note = 2'-O-methyluridine-3'-phosphate N-[tris(GalNAc-alkyl)-amidodecanoyl)]-4-hydroxyprolinol (Hyp-(GalNAc-alkyl)3)
ttgtttgtgaaacaaaaaagt

SEQ ID NO: 2251 - RNA, 21 nt, synthetic construct
  source 1..21: mol_type = other RNA
  modified_base 1: mod_base = OTHER; note = 2'-O-methyluridine-3'-phosphorothioate
  modified_base 2: mod_base = OTHER; note = 2'-O-methylguanosine-3'-phosphorothioate
  modified_base 3: mod_base = OTHER; note = 2'-O-methyluridine-3'-phosphate
  modified_base 4: mod_base = OTHER; note = 2'-O-methyluridine-3'-phosphate
  modified_base 5: mod_base = OTHER; note = 2'-O-methylcytidine-3'-phosphate
  modified_base 6: mod_base = OTHER; note = 2'-O-methylcytidine-3'-phosphate
  modified_base 7: mod_base = OTHER; note = 2'-O-methylcytidine-3'-phosphate
  modified_base 8: mod_base = OTHER; note = 2'-O-methyluridine-3'-phosphate
  modified_base 9: mod_base = OTHER; note = 2'-fluorouridine-3'-phosphate
  modified_base 10: mod_base = OTHER; note = 2'-fluorouridine-3'-phosphate
  modified_base 11: mod_base = OTHER; note = 2'-fluorouridine-3'-phosphate
  modified_base 12: mod_base = OTHER; note = 2'-O-methylcytidine-3'-phosphate
  modified_base 13: mod_base = OTHER; note = 2'-O-methyladenosine-3'-phosphate
  modified_base 14: mod_base = OTHER; note = 2'-O-methyladenosine-3'-phosphate
  modified_base 15: mod_base = OTHER; note = 2'-O-methylguanosine-3'-phosphate
  modified_base 16: mod_base = OTHER; note = 2'-O-methyluridine-3'-phosphate
  modified_base 17: mod_base = OTHER; note = 2'-O-methyluridine-3'-phosphate
  modified_base 18: mod_base = OTHER; note = 2'-O-methylguanosine-3'-phosphate
  modified_base 19: mod_base = OTHER; note = 2'-O-methyladenosine-3'-phosphate
  modified_base 20: mod_base = OTHER; note = 2'-O-methylguanosine-3'-phosphate
  modified_base 21: mod_base = OTHER; note = 2'-O-methyluridine-3'-phosphate N-[tris(GalNAc-alkyl)-amidodecanoyl)]-4-hydroxyprolinol (Hyp-(GalNAc-alkyl)3)
tgttcccttttcaagttgagt

SEQ ID NO: 2252 - RNA, 21 nt, synthetic construct
  source 1..21: mol_type = other RNA
  modified_base 1: mod_base = OTHER; note = 2'-O-methylguanosine-3'-phosphorothioate
  modified_base 2: mod_base = OTHER; note = 2'-O-methyluridine-3'-phosphorothioate
  modified_base 3: mod_base = OTHER; note = 2'-O-methyluridine-3'-phosphate
  modified_base 4: mod_base = OTHER; note = 2'-O-methylcytidine-3'-phosphate
  modified_base 5: mod_base = OTHER; note = 2'-O-methylcytidine-3'-phosphate
  modified_base 6: mod_base = OTHER; note = 2'-O-methylcytidine-3'-phosphate
  modified_base 7: mod_base = OTHER; note = 2'-O-methyluridine-3'-phosphate
  modified_base 8: mod_base = OTHER; note = 2'-O-methyluridine-3'-phosphate
  modified_base 9: mod_base = OTHER; note = 2'-fluorouridine-3'-phosphate
  modified_base 10: mod_base = OTHER; note = 2'-fluorouridine-3'-phosphate
  modified_base 11: mod_base = OTHER; note = 2'-fluorocytidine-3'-phosphate
  modified_base 12: mod_base = OTHER; note = 2'-O-methyladenosine-3'-phosphate
  modified_base 13: mod_base = OTHER; note = 2'-O-methyladenosine-3'-phosphate
  modified_base 14: mod_base = OTHER; note = 2'-O-methylguanosine-3'-phosphate
  modified_base 15: mod_base = OTHER; note = 2'-O-methyluridine-3'-phosphate
  modified_base 16: mod_base = OTHER; note = 2'-O-methyluridine-3'-phosphate
  modified_base 17: mod_base = OTHER; note = 2'-O-methylguanosine-3'-phosphate
  modified_base 18: mod_base = OTHER; note = 2'-O-methyladenosine-3'-phosphate
  modified_base 19: mod_base = OTHER; note = 2'-O-methylguanosine-3'-phosphate
  modified_base 20: mod_base = OTHER; note = 2'-O-methyladenosine-3'-phosphate
  modified_base 21: mod_base = OTHER; note = 2'-O-methyluridine-3'-phosphate N-[tris(GalNAc-alkyl)-amidodecanoyl)]-4-hydroxyprolinol (Hyp-(GalNAc-alkyl)3)
gttcccttttcaagttgagat

SEQ ID NO: 2253 - RNA, 21 nt, synthetic construct
  source 1..21: mol_type = other RNA
  modified_base 1: mod_base = OTHER; note = 2'-O-methyluridine-3'-phosphorothioate
  modified_base 2: mod_base = OTHER; note = 2'-O-methyluridine-3'-phosphorothioate
  modified_base 3: mod_base = OTHER; note = 2'-O-methylcytidine-3'-phosphate
  modified_base 4: mod_base = OTHER; note = 2'-O-methylcytidine-3'-phosphate
  modified_base 5: mod_base = OTHER; note = 2'-O-methylcytidine-3'-phosphate
  modified_base 6: mod_base = OTHER; note = 2'-O-methyluridine-3'-phosphate
  modified_base 7: mod_base = OTHER; note = 2'-O-methyluridine-3'-phosphate
  modified_base 8: mod_base = OTHER; note = 2'-O-methyluridine-3'-phosphate
  modified_base 9: mod_base = OTHER; note = 2'-fluorouridine-3'-phosphate
  modified_base 10: mod_base = OTHER; note = 2'-fluorocytidine-3'-phosphate
  modified_base 11: mod_base = OTHER; note = 2'-fluoroadenosine-3'-phosphate
  modified_base 12: mod_base = OTHER; note = 2'-O-methyladenosine-3'-phosphate
  modified_base 13: mod_base = OTHER; note = 2'-O-methylguanosine-3'-phosphate
  modified_base 14: mod_base = OTHER; note = 2'-O-methyluridine-3'-phosphate
  modified_base 15: mod_base = OTHER; note = 2'-O-methyluridine-3'-phosphate
  modified_base 16: mod_base = OTHER; note = 2'-O-methylguanosine-3'-phosphate
  modified_base 17: mod_base = OTHER; note = 2'-O-methyladenosine-3'-phosphate
  modified_base 18: mod_base = OTHER; note = 2'-O-methylguanosine-3'-phosphate
  modified_base 19: mod_base = OTHER; note = 2'-O-methyladenosine-3'-phosphate
  modified_base 20: mod_base = OTHER; note = 2'-O-methyladenosine-3'-phosphate
  modified_base 21: mod_base = OTHER; note = 2'-O-methyluridine-3'-phosphate N-[tris(GalNAc-alkyl)-amidodecanoyl)]-4-hydroxyprolinol (Hyp-(GalNAc-alkyl)3)
ttcccttttcaagttgagaat

SEQ ID NO: 2254 - RNA, 21 nt, synthetic construct
  source 1..21: mol_type = other RNA
  modified_base 1: mod_base = OTHER; note = 2'-O-methylcytidine-3'-phosphorothioate
  modified_base 2: mod_base = OTHER; note = 2'-O-methyladenosine-3'-phosphorothioate
  modified_base 3: mod_base = OTHER; note = 2'-O-methyladenosine-3'-phosphate
  modified_base 4: mod_base = OTHER; note = 2'-O-methylguanosine-3'-phosphate
  modified_base 5: mod_base = OTHER; note = 2'-O-methyluridine-3'-phosphate
  modified_base 6: mod_base = OTHER; note = 2'-O-methyluridine-3'-phosphate
  modified_base 7: mod_base = OTHER; note = 2'-O-methylguanosine-3'-phosphate
  modified_base 8: mod_base = OTHER; note = 2'-O-methyladenosine-3'-phosphate
  modified_base 9: mod_base = OTHER; note = 2'-fluoroguanosine-3'-phosphate
  modified_base 10: mod_base = OTHER; note = 2'-fluoroadenosine-3'-phosphate
  modified_base 11: mod_base = OTHER; note = 2'-fluoroadenosine-3'-phosphate
  modified_base 12: mod_base = OTHER; note = 2'-O-methylcytidine-3'-phosphate
  modified_base 13: mod_base = OTHER; note = 2'-O-methyladenosine-3'-phosphate
  modified_base 14: mod_base = OTHER; note = 2'-O-methyladenosine-3'-phosphate
  modified_base 15: mod_base = OTHER; note = 2'-O-methyladenosine-3'-phosphate
  modified_base 16: mod_base = OTHER; note = 2'-O-methyladenosine-3'-phosphate
  modified_base 17: mod_base = OTHER; note = 2'-O-methyladenosine-3'-phosphate
  modified_base 18: mod_base = OTHER; note = 2'-O-methyluridine-3'-phosphate
  modified_base 19: mod_base = OTHER; note = 2'-O-methyluridine-3'-phosphate
  modified_base 20: mod_base = OTHER; note = 2'-O-methylguanosine-3'-phosphate
  modified_base 21: mod_base = OTHER; note = 2'-O-methyluridine-3'-phosphate N-[tris(GalNAc-alkyl)-amidodecanoyl)]-4-hydroxyprolinol (Hyp-(GalNAc-alkyl)3)
caagttgagaacaaaaattgt

SEQ ID NO: 2255 - RNA, 21 nt, synthetic construct
  source 1..21: mol_type = other RNA
  modified_base 1: mod_base = OTHER; note = 2'-O-methyladenosine-3'-phosphorothioate
  modified_base 2: mod_base = OTHER; note = 2'-O-methyladenosine-3'-phosphorothioate
  modified_base 3: mod_base = OTHER; note = 2'-O-methylguanosine-3'-phosphate
  modified_base 4: mod_base = OTHER; note = 2'-O-methyluridine-3'-phosphate
  modified_base 5: mod_base = OTHER; note = 2'-O-methyluridine-3'-phosphate
  modified_base 6: mod_base = OTHER; note = 2'-O-methylguanosine-3'-phosphate
  modified_base 7: mod_base = OTHER; note = 2'-O-methyladenosine-3'-phosphate
  modified_base 8: mod_base = OTHER; note = 2'-O-methylguanosine-3'-phosphate
  modified_base 9: mod_base = OTHER; note = 2'-fluoroadenosine-3'-phosphate
  modified_base 10: mod_base = OTHER; note = 2'-fluoroadenosine-3'-phosphate
  modified_base 11: mod_base = OTHER; note = 2'-fluorocytidine-3'-phosphate
  modified_base 12: mod_base = OTHER; note = 2'-O-methyladenosine-3'-phosphate
  modified_base 13: mod_base = OTHER; note = 2'-O-methyladenosine-3'-phosphate
  modified_base 14: mod_base = OTHER; note = 2'-O-methyladenosine-3'-phosphate
  modified_base 15: mod_base = OTHER; note = 2'-O-methyladenosine-3'-phosphate
  modified_base 16: mod_base = OTHER; note = 2'-O-methyladenosine-3'-phosphate
  modified_base 17: mod_base = OTHER; note = 2'-O-methyluridine-3'-phosphate
  modified_base 18: mod_base = OTHER; note = 2'-O-methyluridine-3'-phosphate
  modified_base 19: mod_base = OTHER; note = 2'-O-methylguanosine-3'-phosphate
  modified_base 20: mod_base = OTHER; note = 2'-O-methylguanosine-3'-phosphate
  modified_base 21: mod_base = OTHER; note = 2'-O-methyluridine-3'-phosphate N-[tris(GalNAc-alkyl)-amidodecanoyl)]-4-hydroxyprolinol (Hyp-(GalNAc-alkyl)3)
aagttgagaacaaaaattggt

SEQ ID NO: 2256 - RNA, 21 nt, synthetic construct
  source 1..21: mol_type = other RNA
  modified_base 1: mod_base = OTHER; note = 2'-O-methyladenosine-3'-phosphorothioate
  modified_base 2: mod_base = OTHER; note = 2'-O-methylguanosine-3'-phosphorothioate
  modified_base 3: mod_base = OTHER; note = 2'-O-methyluridine-3'-phosphate
  modified_base 4: mod_base = OTHER; note = 2'-O-methyluridine-3'-phosphate
  modified_base 5: mod_base = OTHER; note = 2'-O-methylguanosine-3'-phosphate
  modified_base 6: mod_base = OTHER; note = 2'-O-methyladenosine-3'-phosphate
  modified_base 7: mod_base = OTHER; note = 2'-O-methylguanosine-3'-phosphate
  modified_base 8: mod_base = OTHER; note = 2'-O-methyladenosine-3'-phosphate
  modified_base 9: mod_base = OTHER; note = 2'-fluoroadenosine-3'-phosphate
  modified_base 10: mod_base = OTHER; note = 2'-fluorocytidine-3'-phosphate
  modified_base 11: mod_base = OTHER; note = 2'-fluoroadenosine-3'-phosphate
  modified_base 12: mod_base = OTHER; note = 2'-O-methyladenosine-3'-phosphate
  modified_base 13: mod_base = OTHER; note = 2'-O-methyladenosine-3'-phosphate
  modified_base 14: mod_base = OTHER; note = 2'-O-methyladenosine-3'-phosphate
  modified_base 15: mod_base = OTHER; note = 2'-O-methyladenosine-3'-phosphate
  modified_base 16: mod_base = OTHER; note = 2'-O-methyluridine-3'-phosphate
  modified_base 17: mod_base = OTHER; note = 2'-O-methyluridine-3'-phosphate
  modified_base 18: mod_base = OTHER; note = 2'-O-methylguanosine-3'-phosphate
  modified_base 19: mod_base = OTHER; note = 2'-O-methylguanosine-3'-phosphate
  modified_base 20: mod_base = OTHER; note = 2'-O-methylguanosine-3'-phosphate
  modified_base 21: mod_base = OTHER; note = 2'-O-methyluridine-3'-phosphate N-[tris(GalNAc-alkyl)-amidodecanoyl)]-4-hydroxyprolinol (Hyp-(GalNAc-alkyl)3)
agttgagaacaaaaattgggt

SEQ ID NO: 2257 - RNA, 21 nt, synthetic construct
  source 1..21: mol_type = other RNA
  modified_base 1: mod_base = OTHER; note = 2'-O-methylguanosine-3'-phosphorothioate
  modified_base 2: mod_base = OTHER; note = 2'-O-methyluridine-3'-phosphorothioate
  modified_base 3: mod_base = OTHER; note = 2'-O-methyluridine-3'-phosphate
  modified_base 4: mod_base = OTHER; note = 2'-O-methylguanosine-3'-phosphate
  modified_base 5: mod_base = OTHER; note = 2'-O-methyladenosine-3'-phosphate
  modified_base 6: mod_base = OTHER; note = 2'-O-methylguanosine-3'-phosphate
  modified_base 7: mod_base = OTHER; note = 2'-O-methyladenosine-3'-phosphate
  modified_base 8: mod_base = OTHER; note = 2'-O-methyladenosine-3'-phosphate
  modified_base 9: mod_base = OTHER; note = 2'-fluorocytidine-3'-phosphate
  modified_base 10: mod_base = OTHER; note = 2'-fluoroadenosine-3'-phosphate
  modified_base 11: mod_base = OTHER; note = 2'-fluoroadenosine-3'-phosphate
  modified_base 12: mod_base = OTHER; note = 2'-O-methyladenosine-3'-phosphate
  modified_base 13: mod_base = OTHER; note = 2'-O-methyladenosine-3'-phosphate
  modified_base 14: mod_base = OTHER; note = 2'-O-methyladenosine-3'-phosphate
  modified_base 15: mod_base = OTHER; note = 2'-O-methyluridine-3'-phosphate
  modified_base 16: mod_base = OTHER; note = 2'-O-methyluridine-3'-phosphate
  modified_base 17: mod_base = OTHER; note = 2'-O-methylguanosine-3'-phosphate
  modified_base 18: mod_base = OTHER; note = 2'-O-methylguanosine-3'-phosphate
  modified_base 19: mod_base = OTHER; note = 2'-O-methylguanosine-3'-phosphate
  modified_base 20: mod_base = OTHER; note = 2'-O-methyluridine-3'-phosphate
  modified_base 21: mod_base = OTHER; note = 2'-O-methyluridine-3'-phosphate N-[tris(GalNAc-alkyl)-amidodecanoyl)]-4-hydroxyprolinol (Hyp-(GalNAc-alkyl)3)
gttgagaacaaaaattgggtt

SEQ ID NO: 2258 - RNA, 21 nt, synthetic construct
  source 1..21: mol_type = other RNA
  modified_base 1: mod_base = OTHER; note = 2'-O-methyluridine-3'-phosphorothioate
  modified_base 2: mod_base = OTHER; note = 2'-O-methyluridine-3'-phosphorothioate
  modified_base 3: mod_base = OTHER; note = 2'-O-methylguanosine-3'-phosphate
  modified_base 4: mod_base = OTHER; note = 2'-O-methyladenosine-3'-phosphate
  modified_base 5: mod_base = OTHER; note = 2'-O-methylguanosine-3'-phosphate
  modified_base 6: mod_base = OTHER; note = 2'-O-methyladenosine-3'-phosphate
  modified_base 7: mod_base = OTHER; note = 2'-O-methyladenosine-3'-phosphate
  modified_base 8: mod_base = OTHER; note = 2'-O-methylcytidine-3'-phosphate
  modified_base 9: mod_base = OTHER; note = 2'-fluoroadenosine-3'-phosphate
  modified_base 10: mod_base = OTHER; note = 2'-fluoroadenosine-3'-phosphate
  modified_base 11: mod_base = OTHER; note = 2'-fluoroadenosine-3'-phosphate
  modified_base 12: mod_base = OTHER; note = 2'-O-methyladenosine-3'-phosphate
  modified_base 13: mod_base = OTHER; note = 2'-O-methyladenosine-3'-phosphate
  modified_base 14: mod_base = OTHER; note = 2'-O-methyluridine-3'-phosphate
  modified_base 15: mod_base = OTHER; note = 2'-O-methyluridine-3'-phosphate
  modified_base 16: mod_base = OTHER; note = 2'-O-methylguanosine-3'-phosphate
  modified_base 17: mod_base = OTHER; note = 2'-O-methylguanosine-3'-phosphate
  modified_base 18: mod_base = OTHER; note = 2'-O-methylguanosine-3'-phosphate
  modified_base 19: mod_base = OTHER; note = 2'-O-methyluridine-3'-phosphate
  modified_base 20: mod_base = OTHER; note = 2'-O-methyluridine-3'-phosphate
  modified_base 21: mod_base = OTHER; note = 2'-O-methyluridine-3'-phosphate N-[tris(GalNAc-alkyl)-amidodecanoyl)]-4-hydroxyprolinol (Hyp-(GalNAc-alkyl)3)
ttgagaacaaaaattgggttt

SEQ ID NO: 2259 - RNA, 21 nt, synthetic construct
  source 1..21: mol_type = other RNA
  modified_base 1: mod_base = OTHER; note = 2'-O-methyluridine-3'-phosphorothioate
  modified_base 2: mod_base = OTHER; note = 2'-O-methylguanosine-3'-phosphorothioate
  modified_base 3: mod_base = OTHER; note = 2'-O-methyladenosine-3'-phosphate
  modified_base 4: mod_base = OTHER; note = 2'-O-methylguanosine-3'-phosphate
  modified_base 5: mod_base = OTHER; note = 2'-O-methyladenosine-3'-phosphate
  modified_base 6: mod_base = OTHER; note = 2'-O-methyladenosine-3'-phosphate
  modified_base 7: mod_base = OTHER; note = 2'-O-methylcytidine-3'-phosphate
  modified_base 8: mod_base = OTHER; note = 2'-O-methyladenosine-3'-phosphate
  modified_base 9: mod_base = OTHER; note = 2'-fluoroadenosine-3'-phosphate
  modified_base 10: mod_base = OTHER; note = 2'-fluoroadenosine-3'-phosphate
  modified_base 11: mod_base = OTHER; note = 2'-fluoroadenosine-3'-phosphate
  modified_base 12: mod_base = OTHER; note = 2'-O-methyladenosine-3'-phosphate
  modified_base 13: mod_base = OTHER; note = 2'-O-methyluridine-3'-phosphate
  modified_base 14: mod_base = OTHER; note = 2'-O-methyluridine-3'-phosphate
  modified_base 15: mod_base = OTHER; note = 2'-O-methylguanosine-3'-phosphate
  modified_base 16: mod_base = OTHER; note = 2'-O-methylguanosine-3'-phosphate
  modified_base 17: mod_base = OTHER; note = 2'-O-methylguanosine-3'-phosphate
  modified_base 18: mod_base = OTHER; note = 2'-O-methyluridine-3'-phosphate
  modified_base 19: mod_base = OTHER; note = 2'-O-methyluridine-3'-phosphate
  modified_base 20: mod_base = OTHER; note = 2'-O-methyluridine-3'-phosphate
  modified_base 21: mod_base = OTHER; note = 2'-O-methyluridine-3'-phosphate N-[tris(GalNAc-alkyl)-amidodecanoyl)]-4-hydroxyprolinol (Hyp-(GalNAc-alkyl)3)
tgagaacaaaaattgggtttt

SEQ ID NO: 2260 - RNA, 21 nt, synthetic construct
  source 1..21: mol_type = other RNA
  modified_base 1: mod_base = OTHER; note = 2'-O-methylguanosine-3'-phosphorothioate
  modified_base 2: mod_base = OTHER; note = 2'-O-methyladenosine-3'-phosphorothioate
  modified_base 3: mod_base = OTHER; note = 2'-O-methylguanosine-3'-phosphate
  modified_base 4: mod_base = OTHER; note = 2'-O-methyladenosine-3'-phosphate
  modified_base 5: mod_base = OTHER; note = 2'-O-methyladenosine-3'-phosphate
  modified_base 6: mod_base = OTHER; note = 2'-O-methylcytidine-3'-phosphate
  modified_base 7: mod_base = OTHER; note = 2'-O-methyladenosine-3'-phosphate
  modified_base 8: mod_base = OTHER; note = 2'-O-methyladenosine-3'-phosphate
  modified_base 9: mod_base = OTHER; note = 2'-fluoroadenosine-3'-phosphate
  modified_base 10: mod_base = OTHER; note = 2'-fluoroadenosine-3'-phosphate
  modified_base 11: mod_base = OTHER; note = 2'-fluoroadenosine-3'-phosphate
  modified_base 12: mod_base = OTHER; note = 2'-O-methyluridine-3'-phosphate
  modified_base 13: mod_base = OTHER; note = 2'-O-methyluridine-3'-phosphate
  modified_base 14: mod_base = OTHER; note = 2'-O-methylguanosine-3'-phosphate
  modified_base 15: mod_base = OTHER; note = 2'-O-methylguanosine-3'-phosphate
  modified_base 16: mod_base = OTHER; note = 2'-O-methylguanosine-3'-phosphate
  modified_base 17: mod_base = OTHER; note = 2'-O-methyluridine-3'-phosphate
  modified_base 18: mod_base = OTHER; note = 2'-O-methyluridine-3'-phosphate
  modified_base 19: mod_base = OTHER; note = 2'-O-methyluridine-3'-phosphate
  modified_base 20: mod_base = OTHER; note = 2'-O-methyluridine-3'-phosphate
  modified_base 21: mod_base = OTHER; note = 2'-O-methyluridine-3'-phosphate N-[tris(GalNAc-alkyl)-amidodecanoyl)]-4-hydroxyprolinol (Hyp-(GalNAc-alkyl)3)
gagaacaaaaattgggttttt

SEQ ID NO: 2261 - RNA, 21 nt, synthetic construct
  source 1..21: mol_type = other RNA
  modified_base 1: mod_base = OTHER; note = 2'-O-methyladenosine-3'-phosphorothioate
  modified_base 2: mod_base = OTHER; note = 2'-O-methylguanosine-3'-phosphorothioate
  modified_base 3: mod_base = OTHER; note = 2'-O-methyladenosine-3'-phosphate
  modified_base 4: mod_base = OTHER; note = 2'-O-methyladenosine-3'-phosphate
  modified_base 5: mod_base = OTHER; note = 2'-O-methylcytidine-3'-phosphate
  modified_base 6: mod_base = OTHER; note = 2'-O-methyladenosine-3'-phosphate
  modified_base 7: mod_base = OTHER; note = 2'-O-methyladenosine-3'-phosphate
  modified_base 8: mod_base = OTHER; note = 2'-O-methyladenosine-3'-phosphate
  modified_base 9: mod_base = OTHER; note = 2'-fluoroadenosine-3'-phosphate
  modified_base 10: mod_base = OTHER; note = 2'-fluoroadenosine-3'-phosphate
  modified_base 11: mod_base = OTHER; note = 2'-fluorouridine-3'-phosphate
  modified_base 12: mod_base = OTHER; note = 2'-O-methyluridine-3'-phosphate
  modified_base 13: mod_base = OTHER; note = 2'-O-methylguanosine-3'-phosphate
  modified_base 14: mod_base = OTHER; note = 2'-O-methylguanosine-3'-phosphate
  modified_base 15: mod_base = OTHER; note = 2'-O-methylguanosine-3'-phosphate
  modified_base 16: mod_base = OTHER; note = 2'-O-methyluridine-3'-phosphate
  modified_base 17: mod_base = OTHER; note = 2'-O-methyluridine-3'-phosphate
  modified_base 18: mod_base = OTHER; note = 2'-O-methyluridine-3'-phosphate
  modified_base 19: mod_base = OTHER; note = 2'-O-methyluridine-3'-phosphate
  modified_base 20: mod_base = OTHER; note = 2'-O-methyladenosine-3'-phosphate
  modified_base 21: mod_base = OTHER; note = 2'-O-methyluridine-3'-phosphate N-[tris(GalNAc-alkyl)-amidodecanoyl)]-4-hydroxyprolinol (Hyp-(GalNAc-alkyl)3)
agaacaaaaattgggttttat

SEQ ID NO: 2262 - RNA, 21 nt, synthetic construct
  source 1..21: mol_type = other RNA
  modified_base 1: mod_base = OTHER; note = 2'-O-methylguanosine-3'-phosphorothioate
  modified_base 2: mod_base = OTHER; note = 2'-O-methyladenosine-3'-phosphorothioate
  modified_base 3: mod_base = OTHER; note = 2'-O-methyladenosine-3'-phosphate
  modified_base 4: mod_base = OTHER; note = 2'-O-methylcytidine-3'-phosphate
  modified_base 5: mod_base = OTHER; note = 2'-O-methyladenosine-3'-phosphate
  modified_base 6: mod_base = OTHER; note = 2'-O-methyladenosine-3'-phosphate
  modified_base 7: mod_base = OTHER; note = 2'-O-methyladenosine-3'-phosphate
  modified_base 8: mod_base = OTHER; note = 2'-O-methyladenosine-3'-phosphate
  modified_base 9: mod_base = OTHER; note = 2'-fluoroadenosine-3'-phosphate
  modified_base 10: mod_base = OTHER; note = 2'-fluorouridine-3'-phosphate
  modified_base 11: mod_base = OTHER; note = 2'-fluorouridine-3'-phosphate
  modified_base 12: mod_base = OTHER; note = 2'-O-methylguanosine-3'-phosphate
  modified_base 13: mod_base = OTHER; note = 2'-O-methylguanosine-3'-phosphate
  modified_base 14: mod_base = OTHER; note = 2'-O-methylguanosine-3'-phosphate
  modified_base 15: mod_base = OTHER; note = 2'-O-methyluridine-3'-phosphate
  modified_base 16: mod_base = OTHER; note = 2'-O-methyluridine-3'-phosphate
  modified_base 17: mod_base = OTHER; note = 2'-O-methyluridine-3'-phosphate
  modified_base 18: mod_base = OTHER; note = 2'-O-methyluridine-3'-phosphate
  modified_base 19: mod_base = OTHER; note = 2'-O-methyladenosine-3'-phosphate
  modified_base 20: mod_base = OTHER; note = 2'-O-methyladenosine-3'-phosphate
  modified_base 21: mod_base = OTHER; note = 2'-O-methyluridine-3'-phosphate N-[tris(GalNAc-alkyl)-amidodecanoyl)]-4-hydroxyprolinol (Hyp-(GalNAc-alkyl)3)
gaacaaaaattgggttttaat

SEQ ID NO: 2263 - RNA, 21 nt, synthetic construct
  source 1..21: mol_type = other RNA
  modified_base 1: mod_base = OTHER; note = 2'-O-methyladenosine-3'-phosphorothioate
  modified_base 2: mod_base = OTHER; note = 2'-O-methyladenosine-3'-phosphorothioate
  modified_base 3: mod_base = OTHER; note = 2'-O-methylcytidine-3'-phosphate
  modified_base 4: mod_base = OTHER; note = 2'-O-methyladenosine-3'-phosphate
  modified_base 5: mod_base = OTHER; note = 2'-O-methyladenosine-3'-phosphate
  modified_base 6: mod_base = OTHER; note = 2'-O-methyladenosine-3'-phosphate
  modified_base 7: mod_base = OTHER; note = 2'-O-methyladenosine-3'-phosphate
  modified_base 8: mod_base = OTHER; note = 2'-O-methyladenosine-3'-phosphate
  modified_base 9: mod_base = OTHER; note = 2'-fluorouridine-3'-phosphate
  modified_base 10: mod_base = OTHER; note = 2'-fluorouridine-3'-phosphate
  modified_base 11: mod_base = OTHER; note = 2'-fluoroguanosine-3'-phosphate
  modified_base 12: mod_base = OTHER; note = 2'-O-methylguanosine-3'-phosphate
  modified_base 13: mod_base = OTHER; note = 2'-O-methylguanosine-3'-phosphate
  modified_base 14: mod_base = OTHER; note = 2'-O-methyluridine-3'-phosphate
  modified_base 15: mod_base = OTHER; note = 2'-O-methyluridine-3'-phosphate
  modified_base 16: mod_base = OTHER; note = 2'-O-methyluridine-3'-phosphate
  modified_base 17: mod_base = OTHER; note = 2'-O-methyluridine-3'-phosphate
  modified_base 18: mod_base = OTHER; note = 2'-O-methyladenosine-3'-phosphate
  modified_base 19: mod_base = OTHER; note = 2'-O-methyladenosine-3'-phosphate
  modified_base 20: mod_base = OTHER; note = 2'-O-methyladenosine-3'-phosphate
  modified_base 21: mod_base = OTHER; note = 2'-O-methyluridine-3'-phosphate N-[tris(GalNAc-alkyl)-amidodecanoyl)]-4-hydroxyprolinol (Hyp-(GalNAc-alkyl)3)
aacaaaaattgggttttaaat

SEQ ID NO: 2264 - RNA, 21 nt, synthetic construct
  source 1..21: mol_type = other RNA
  modified_base 1: mod_base = OTHER; note = 2'-O-methyladenosine-3'-phosphorothioate
  modified_base 2: mod_base = OTHER; note = 2'-O-methylguanosine-3'-phosphorothioate
  modified_base 3: mod_base = OTHER; note = 2'-O-methyluridine-3'-phosphate
  modified_base 4: mod_base = OTHER; note = 2'-O-methyladenosine-3'-phosphate
  modified_base 5: mod_base = OTHER; note = 2'-O-methyluridine-3'-phosphate
  modified_base 6: mod_base = OTHER; note = 2'-O-methyladenosine-3'-phosphate
  modified_base 7: mod_base = OTHER; note = 2'-O-methylcytidine-3'-phosphate
  modified_base 8: mod_base = OTHER; note = 2'-O-methyladenosine-3'-phosphate
  modified_base 9: mod_base = OTHER; note = 2'-fluorouridine-3'-phosphate
  modified_base 10: mod_base = OTHER; note = 2'-fluorouridine-3'-phosphate
  modified_base 11: mod_base = OTHER; note = 2'-fluorouridine-3'-phosphate
  modified_base 12: mod_base = OTHER; note = 2'-O-methyluridine-3'-phosphate
  modified_base 13: mod_base = OTHER; note = 2'-O-methyluridine-3'-phosphate
  modified_base 14: mod_base = OTHER; note = 2'-O-methylguanosine-3'-phosphate
  modified_base 15: mod_base = OTHER; note = 2'-O-methylcytidine-3'-phosphate
  modified_base 16: mod_base = OTHER; note = 2'-O-methyladenosine-3'-phosphate
  modified_base 17: mod_base = OTHER; note = 2'-O-methyluridine-3'-phosphate
  modified_base 18: mod_base = OTHER; note = 2'-O-methyluridine-3'-phosphate
  modified_base 19: mod_base = OTHER; note = 2'-O-methylguanosine-3'-phosphate
  modified_base 20: mod_base = OTHER; note = 2'-O-methylcytidine-3'-phosphate
  modified_base 21: mod_base = OTHER; note = 2'-O-methyluridine-3'-phosphate N-[tris(GalNAc-alkyl)-amidodecanoyl)]-4-hydroxyprolinol (Hyp-(GalNAc-alkyl)3)
agtatacatttttgcattgct

SEQ ID NO: 2265 - RNA, 21 nt, synthetic construct
  source 1..21: mol_type = other RNA
  modified_base 1: mod_base = OTHER; note = 2'-O-methylguanosine-3'-phosphorothioate
  modified_base 2: mod_base = OTHER; note = 2'-O-methyluridine-3'-phosphorothioate
  modified_base 3: mod_base = OTHER; note = 2'-O-methyladenosine-3'-phosphate
  modified_base 4: mod_base = OTHER; note = 2'-O-methyluridine-3'-phosphate
  modified_base 5: mod_base = OTHER; note = 2'-O-methyladenosine-3'-phosphate
  modified_base 6: mod_base = OTHER; note = 2'-O-methylcytidine-3'-phosphate
  modified_base 7: mod_base = OTHER; note = 2'-O-methyladenosine-3'-phosphate
  modified_base 8: mod_base = OTHER; note = 2'-O-methyluridine-3'-phosphate
  modified_base 9: mod_base = OTHER; note = 2'-fluorouridine-3'-phosphate
  modified_base 10: mod_base = OTHER; note = 2'-fluorouridine-3'-phosphate
  modified_base 11: mod_base = OTHER; note = 2'-fluorouridine-3'-phosphate
  modified_base 12: mod_base = OTHER; note = 2'-O-methyluridine-3'-phosphate
  modified_base 13: mod_base = OTHER; note = 2'-O-methylguanosine-3'-phosphate
  modified_base 14: mod_base = OTHER; note = 2'-O-methylcytidine-3'-phosphate
  modified_base 15: mod_base = OTHER; note = 2'-O-methyladenosine-3'-phosphate
  modified_base 16: mod_base = OTHER; note = 2'-O-methyluridine-3'-phosphate
  modified_base 17: mod_base = OTHER; note = 2'-O-methyluridine-3'-phosphate
  modified_base 18: mod_base = OTHER; note = 2'-O-methylguanosine-3'-phosphate
  modified_base 19: mod_base = OTHER; note = 2'-O-methylcytidine-3'-phosphate
  modified_base 20: mod_base = OTHER; note = 2'-O-methylcytidine-3'-phosphate
  modified_base 21: mod_base = OTHER; note = 2'-O-methyluridine-3'-phosphate N-[tris(GalNAc-alkyl)-amidodecanoyl)]-4-hydroxyprolinol (Hyp-(GalNAc-alkyl)3)
gtatacatttttgcattgcct

SEQ ID NO: 2266 - RNA, 21 nt, synthetic construct
  source 1..21: mol_type = other RNA
  modified_base 1: mod_base = OTHER; note = 2'-O-methyluridine-3'-phosphorothioate
  modified_base 2: mod_base = OTHER; note = 2'-O-methyladenosine-3'-phosphorothioate
  modified_base 3: mod_base = OTHER; note = 2'-O-methyluridine-3'-phosphate
  modified_base 4: mod_base = OTHER; note = 2'-O-methyladenosine-3'-phosphate
  modified_base 5: mod_base = OTHER; note = 2'-O-methylcytidine-3'-phosphate
  modified_base 6: mod_base = OTHER; note = 2'-O-methyladenosine-3'-phosphate
  modified_base 7: mod_base = OTHER; note = 2'-O-methyluridine-3'-phosphate
  modified_base 8: mod_base = OTHER; note = 2'-O-methyluridine-3'-phosphate
  modified_base 9: mod_base = OTHER; note = 2'-fluorouridine-3'-phosphate
  modified_base 10: mod_base = OTHER; note = 2'-fluorouridine-3'-phosphate
  modified_base 11: mod_base = OTHER; note = 2'-fluorouridine-3'-phosphate
  modified_base 12: mod_base = OTHER; note = 2'-O-methylguanosine-3'-phosphate
  modified_base 13: mod_base = OTHER; note = 2'-O-methylcytidine-3'-phosphate
  modified_base 14: mod_base = OTHER; note = 2'-O-methyladenosine-3'-phosphate
  modified_base 15: mod_base = OTHER; note = 2'-O-methyluridine-3'-phosphate
  modified_base 16: mod_base = OTHER; note = 2'-O-methyluridine-3'-phosphate
  modified_base 17: mod_base = OTHER; note = 2'-O-methylguanosine-3'-phosphate
  modified_base 18: mod_base = OTHER; note = 2'-O-methylcytidine-3'-phosphate
  modified_base 19: mod_base = OTHER; note = 2'-O-methylcytidine-3'-phosphate
  modified_base 20: mod_base = OTHER; note = 2'-O-methyluridine-3'-phosphate
  modified_base 21: mod_base = OTHER; note = 2'-O-methyluridine-3'-phosphate N-[tris(GalNAc-alkyl)-amidodecanoyl)]-4-hydroxyprolinol (Hyp-(GalNAc-alkyl)3)
tatacatttttgcattgcctt

SEQ ID NO: 2267 - RNA, 21 nt, synthetic construct
  source 1..21: mol_type = other RNA
  modified_base 1: mod_base = OTHER; note = 2'-O-methyladenosine-3'-phosphorothioate
  modified_base 2: mod_base = OTHER; note = 2'-O-methyluridine-3'-phosphorothioate
  modified_base 3: mod_base = OTHER; note = 2'-O-methyladenosine-3'-phosphate
  modified_base 4: mod_base = OTHER; note = 2'-O-methylcytidine-3'-phosphate
  modified_base 5: mod_base = OTHER; note = 2'-O-methyladenosine-3'-phosphate
  modified_base 6: mod_base = OTHER; note = 2'-O-methyluridine-3'-phosphate
  modified_base 7: mod_base = OTHER; note = 2'-O-methyluridine-3'-phosphate
  modified_base 8: mod_base = OTHER; note = 2'-O-methyluridine-3'-phosphate
  modified_base 9: mod_base = OTHER; note = 2'-fluorouridine-3'-phosphate
  modified_base 10: mod_base = OTHER; note = 2'-fluorouridine-3'-phosphate
  modified_base 11: mod_base = OTHER; note = 2'-fluoroguanosine-3'-phosphate
  modified_base 12: mod_base = OTHER; note = 2'-O-methylcytidine-3'-phosphate
  modified_base 13: mod_base = OTHER; note = 2'-O-methyladenosine-3'-phosphate
  modified_base 14: mod_base = OTHER; note = 2'-O-methyluridine-3'-phosphate
  modified_base 15: mod_base = OTHER; note = 2'-O-methyluridine-3'-phosphate
  modified_base 16: mod_base = OTHER; note = 2'-O-methylguanosine-3'-phosphate
  modified_base 17: mod_base = OTHER; note = 2'-O-methylcytidine-3'-phosphate
  modified_base 18: mod_base = OTHER; note = 2'-O-methylcytidine-3'-phosphate
  modified_base 19: mod_base = OTHER; note = 2'-O-methyluridine-3'-phosphate
  modified_base 20: mod_base = OTHER; note = 2'-O-methyluridine-3'-phosphate
  modified_base 21: mod_base = OTHER; note = 2'-O-methyluridine-3'-phosphate N-[tris(GalNAc-alkyl)-amidodecanoyl)]-4-hydroxyprolinol (Hyp-(GalNAc-alkyl)3)
atacatttttgcattgccttt

SEQ ID NO: 2268 - RNA, 21 nt, synthetic construct
  source 1..21: mol_type = other RNA
  modified_base 1: mod_base = OTHER; note = 2'-O-methylcytidine-3'-phosphorothioate
  modified_base 2: mod_base = OTHER; note = 2'-O-methyladenosine-3'-phosphorothioate
  modified_base 3: mod_base = OTHER; note = 2'-O-methyluridine-3'-phosphate
  modified_base 4: mod_base = OTHER; note = 2'-O-methyluridine-3'-phosphate
  modified_base 5: mod_base = OTHER; note = 2'-O-methyluridine-3'-phosphate
  modified_base 6: mod_base = OTHER; note = 2'-O-methyluridine-3'-phosphate
  modified_base 7: mod_base = OTHER; note = 2'-O-methyluridine-3'-phosphate
  modified_base 8: mod_base = OTHER; note = 2'-O-methylguanosine-3'-phosphate
  modified_base 9: mod_base = OTHER; note = 2'-fluorocytidine-3'-phosphate
  modified_base 10: mod_base = OTHER; note = 2'-fluoroadenosine-3'-phosphate
  modified_base 11: mod_base = OTHER; note = 2'-fluorouridine-3'-phosphate
  modified_base 12: mod_base = OTHER; note = 2'-O-methyluridine-3'-phosphate
  modified_base 13: mod_base = OTHER; note = 2'-O-methylguanosine-3'-phosphate
  modified_base 14: mod_base = OTHER; note = 2'-O-methylcytidine-3'-phosphate
  modified_base 15: mod_base = OTHER; note = 2'-O-methylcytidine-3'-phosphate
  modified_base 16: mod_base = OTHER; note = 2'-O-methyluridine-3'-phosphate
  modified_base 17: mod_base = OTHER; note = 2'-O-methyluridine-3'-phosphate
  modified_base 18: mod_base = OTHER; note = 2'-O-methylcytidine-3'-phosphate
  modified_base 19: mod_base = OTHER; note = 2'-O-methylguanosine-3'-phosphate
  modified_base 20: mod_base = OTHER; note = 2'-O-methylguanosine-3'-phosphate
  modified_base 21: mod_base = OTHER; note = 2'-O-methyluridine-3'-phosphate N-[tris(GalNAc-alkyl)-amidodecanoyl)]-4-hydroxyprolinol (Hyp-(GalNAc-alkyl)3)
catttttgcattgccttcggt

SEQ ID NO: 2269 - RNA, 21 nt, synthetic construct
  source 1..21: mol_type = other RNA
  modified_base 1: mod_base = OTHER; note = 2'-O-methyladenosine-3'-phosphorothioate
  modified_base 2: mod_base = OTHER; note = 2'-O-methyluridine-3'-phosphorothioate
  modified_base 3: mod_base = OTHER; note = 2'-O-methyluridine-3'-phosphate
  modified_base 4: mod_base = OTHER; note = 2'-O-methyluridine-3'-phosphate
  modified_base 5: mod_base = OTHER; note = 2'-O-methyluridine-3'-phosphate
  modified_base 6: mod_base = OTHER; note = 2'-O-methyluridine-3'-phosphate
  modified_base 7: mod_base = OTHER; note = 2'-O-methylguanosine-3'-phosphate
  modified_base 8: mod_base = OTHER; note = 2'-O-methylcytidine-3'-phosphate
  modified_base 9: mod_base = OTHER; note = 2'-fluoroadenosine-3'-phosphate
  modified_base 10: mod_base = OTHER; note = 2'-fluorouridine-3'-phosphate
  modified_base 11: mod_base = OTHER; note = 2'-fluorouridine-3'-phosphate
  modified_base 12: mod_base = OTHER; note = 2'-O-methylguanosine-3'-phosphate
  modified_base 13: mod_base = OTHER; note = 2'-O-methylcytidine-3'-phosphate
  modified_base 14: mod_base = OTHER; note = 2'-O-methylcytidine-3'-phosphate
  modified_base 15: mod_base = OTHER; note = 2'-O-methyluridine-3'-phosphate
  modified_base 16: mod_base = OTHER; note = 2'-O-methyluridine-3'-phosphate
  modified_base 17: mod_base = OTHER; note = 2'-O-methylcytidine-3'-phosphate
  modified_base 18: mod_base = OTHER; note = 2'-O-methylguanosine-3'-phosphate
  modified_base 19: mod_base = OTHER; note = 2'-O-methylguanosine-3'-phosphate
  modified_base 20: mod_base = OTHER; note = 2'-O-methyluridine-3'-phosphate
  modified_base 21: mod_base = OTHER; note = 2'-O-methyluridine-3'-phosphate N-[tris(GalNAc-alkyl)-amidodecanoyl)]-4-hydroxyprolinol (Hyp-(GalNAc-alkyl)3)
atttttgcattgccttcggtt

SEQ ID NO: 2270 - RNA, 21 nt, synthetic construct
  source 1..21: mol_type = other RNA
  modified_base 1: mod_base = OTHER; note = 2'-O-methyluridine-3'-phosphorothioate
  modified_base 2: mod_base = OTHER; note = 2'-O-methyluridine-3'-phosphorothioate
  modified_base 3: mod_base = OTHER; note = 2'-O-methyluridine-3'-phosphate
  modified_base 4: mod_base = OTHER; note = 2'-O-methyluridine-3'-phosphate
  modified_base 5: mod_base = OTHER; note = 2'-O-methyluridine-3'-phosphate
  modified_base 6: mod_base = OTHER; note = 2'-O-methylguanosine-3'-phosphate
  modified_base 7: mod_base = OTHER; note = 2'-O-methylcytidine-3'-phosphate
  modified_base 8: mod_base = OTHER; note = 2'-O-methyladenosine-3'-phosphate
  modified_base 9: mod_base = OTHER; note = 2'-fluorouridine-3'-phosphate
  modified_base 10: mod_base = OTHER; note = 2'-fluorouridine-3'-phosphate
  modified_base 11: mod_base = OTHER; note = 2'-fluoroguanosine-3'-phosphate
  modified_base 12: mod_base = OTHER; note = 2'-O-methylcytidine-3'-phosphate
  modified_base 13: mod_base = OTHER; note = 2'-O-methylcytidine-3'-phosphate
  modified_base 14: mod_base = OTHER; note = 2'-O-methyluridine-3'-phosphate
  modified_base 15: mod_base = OTHER; note = 2'-O-methyluridine-3'-phosphate
  modified_base 16: mod_base = OTHER; note = 2'-O-methylcytidine-3'-phosphate
  modified_base 17: mod_base = OTHER; note = 2'-O-methylguanosine-3'-phosphate
  modified_base 18: mod_base = OTHER; note = 2'-O-methylguanosine-3'-phosphate
  modified_base 19: mod_base = OTHER; note = 2'-O-methyluridine-3'-phosphate
  modified_base 20: mod_base = OTHER; note = 2'-O-methyluridine-3'-phosphate
  modified_base 21: mod_base = OTHER; note = 2'-O-methyluridine-3'-phosphate N-[tris(GalNAc-alkyl)-amidodecanoyl)]-4-hydroxyprolinol (Hyp-(GalNAc-alkyl)3)
tttttgcattgccttcggttt

SEQ ID NO: 2271 - RNA, 21 nt, synthetic construct
  source 1..21: mol_type = other RNA
  modified_base 1: mod_base = OTHER; note = 2'-O-methyluridine-3'-phosphorothioate
  modified_base 2: mod_base = OTHER; note = 2'-O-methyluridine-3'-phosphorothioate
  modified_base 3: mod_base = OTHER; note = 2'-O-methyluridine-3'-phosphate
  modified_base 4: mod_base = OTHER; note = 2'-O-methyluridine-3'-phosphate
  modified_base 5: mod_base = OTHER; note = 2'-O-methylguanosine-3'-phosphate
  modified_base 6: mod_base = OTHER; note = 2'-O-methylcytidine-3'-phosphate
  modified_base 7: mod_base = OTHER; note = 2'-O-methyladenosine-3'-phosphate
  modified_base 8: mod_base = OTHER; note = 2'-O-methyluridine-3'-phosphate
  modified_base 9: mod_base = OTHER; note = 2'-fluorouridine-3'-phosphate
  modified_base 10: mod_base = OTHER; note = 2'-fluoroguanosine-3'-phosphate
  modified_base 11: mod_base = OTHER; note = 2'-fluorocytidine-3'-phosphate
  modified_base 12: mod_base = OTHER; note = 2'-O-methylcytidine-3'-phosphate
  modified_base 13: mod_base = OTHER; note = 2'-O-methyluridine-3'-phosphate
  modified_base 14: mod_base = OTHER; note = 2'-O-methyluridine-3'-phosphate
  modified_base 15: mod_base = OTHER; note = 2'-O-methylcytidine-3'-phosphate
  modified_base 16: mod_base = OTHER; note = 2'-O-methylguanosine-3'-phosphate
  modified_base 17: mod_base = OTHER; note = 2'-O-methylguanosine-3'-phosphate
  modified_base 18: mod_base = OTHER; note = 2'-O-methyluridine-3'-phosphate
  modified_base 19: mod_base = OTHER; note = 2'-O-methyluridine-3'-phosphate
  modified_base 20: mod_base = OTHER; note = 2'-O-methyluridine-3'-phosphate
  modified_base 21: mod_base = OTHER; note = 2'-O-methyluridine-3'-phosphate N-[tris(GalNAc-alkyl)-amidodecanoyl)]-4-hydroxyprolinol (Hyp-(GalNAc-alkyl)3)
ttttgcattgccttcggtttt

SEQ ID NO: 2272 - RNA, 21 nt, synthetic construct
  source 1..21: mol_type = other RNA
  modified_base 1: mod_base = OTHER; note = 2'-O-methyluridine-3'-phosphorothioate
  modified_base 2: mod_base = OTHER; note = 2'-O-methyluridine-3'-phosphorothioate
  modified_base 3: mod_base = OTHER; note = 2'-O-methyluridine-3'-phosphate
  modified_base 4: mod_base = OTHER; note = 2'-O-methylguanosine-3'-phosphate
  modified_base 5: mod_base = OTHER; note = 2'-O-methylcytidine-3'-phosphate
  modified_base 6: mod_base = OTHER; note = 2'-O-methyladenosine-3'-phosphate
  modified_base 7: mod_base = OTHER; note = 2'-O-methyluridine-3'-phosphate
  modified_base 8: mod_base = OTHER; note = 2'-O-methyluridine-3'-phosphate
  modified_base 9: mod_base = OTHER; note = 2'-fluoroguanosine-3'-phosphate
  modified_base 10: mod_base = OTHER; note = 2'-fluorocytidine-3'-phosphate
  modified_base 11: mod_base = OTHER; note = 2'-fluorocytidine-3'-phosphate
  modified_base 12: mod_base = OTHER; note = 2'-O-methyluridine-3'-phosphate
  modified_base 13: mod_base = OTHER; note = 2'-O-methyluridine-3'-phosphate
  modified_base 14: mod_base = OTHER; note = 2'-O-methylcytidine-3'-phosphate
  modified_base 15: mod_base = OTHER; note = 2'-O-methylguanosine-3'-phosphate
  modified_base 16: mod_base = OTHER; note = 2'-O-methylguanosine-3'-phosphate
  modified_base 17: mod_base = OTHER; note = 2'-O-methyluridine-3'-phosphate
  modified_base 18: mod_base = OTHER; note = 2'-O-methyluridine-3'-phosphate
  modified_base 19: mod_base = OTHER; note = 2'-O-methyluridine-3'-phosphate
  modified_base 20: mod_base = OTHER; note = 2'-O-methylguanosine-3'-phosphate
  modified_base 21: mod_base = OTHER; note = 2'-O-methyluridine-3'-phosphate N-[tris(GalNAc-alkyl)-amidodecanoyl)]-4-hydroxyprolinol (Hyp-(GalNAc-alkyl)3)
tttgcattgccttcggtttgt

SEQ ID NO: 2273 - RNA, 21 nt, synthetic construct
  source 1..21: mol_type = other RNA
  modified_base 1: mod_base = OTHER; note = 2'-O-methyluridine-3'-phosphorothioate
  modified_base 2: mod_base = OTHER; note = 2'-O-methyluridine-3'-phosphorothioate
  modified_base 3: mod_base = OTHER; note = 2'-O-methylguanosine-3'-phosphate
  modified_base 4: mod_base = OTHER; note = 2'-O-methylcytidine-3'-phosphate
  modified_base 5: mod_base = OTHER; note = 2'-O-methyladenosine-3'-phosphate
  modified_base 6: mod_base = OTHER; note = 2'-O-methyluridine-3'-phosphate
  modified_base 7: mod_base = OTHER; note = 2'-O-methyluridine-3'-phosphate
  modified_base 8: mod_base = OTHER; note = 2'-O-methylguanosine-3'-phosphate
  modified_base 9: mod_base = OTHER; note = 2'-fluorocytidine-3'-phosphate
  modified_base 10: mod_base = OTHER; note = 2'-fluorocytidine-3'-phosphate
  modified_base 11: mod_base = OTHER; note = 2'-fluorouridine-3'-phosphate
  modified_base 12: mod_base = OTHER; note = 2'-O-methyluridine-3'-phosphate
  modified_base 13: mod_base = OTHER; note = 2'-O-methylcytidine-3'-phosphate
  modified_base 14: mod_base = OTHER; note = 2'-O-methylguanosine-3'-phosphate
  modified_base 15: mod_base = OTHER; note = 2'-O-methylguanosine-3'-phosphate
  modified_base 16: mod_base = OTHER; note = 2'-O-methyluridine-3'-phosphate
  modified_base 17: mod_base = OTHER; note = 2'-O-methyluridine-3'-phosphate
  modified_base 18: mod_base = OTHER; note = 2'-O-methyluridine-3'-phosphate
  modified_base 19: mod_base = OTHER; note = 2'-O-methylguanosine-3'-phosphate
  modified_base 20: mod_base = OTHER; note = 2'-O-methyluridine-3'-phosphate
  modified_base 21: mod_base = OTHER; note = 2'-O-methyluridine-3'-phosphate N-[tris(GalNAc-alkyl)-amidodecanoyl)]-4-hydroxyprolinol (Hyp-(GalNAc-alkyl)3)
ttgcattgccttcggtttgtt

SEQ ID NO: 2274 - RNA, 21 nt, synthetic construct
  source 1..21: mol_type = other RNA
  modified_base 1: mod_base = OTHER; note = 2'-O-methyluridine-3'-phosphorothioate
  modified_base 2: mod_base = OTHER; note = 2'-O-methylguanosine-3'-phosphorothioate
  modified_base 3: mod_base = OTHER; note = 2'-O-methylcytidine-3'-phosphate
  modified_base 4: mod_base = OTHER; note = 2'-O-methyladenosine-3'-phosphate
  modified_base 5: mod_base = OTHER; note = 2'-O-methyluridine-3'-phosphate
  modified_base 6: mod_base = OTHER; note = 2'-O-methyluridine-3'-phosphate
  modified_base 7: mod_base = OTHER; note = 2'-O-methylguanosine-3'-phosphate
  modified_base 8: mod_base = OTHER; note = 2'-O-methylcytidine-3'-phosphate
  modified_base 9: mod_base = OTHER; note = 2'-fluorocytidine-3'-phosphate
  modified_base 10: mod_base = OTHER; note = 2'-fluorouridine-3'-phosphate
  modified_base 11: mod_base = OTHER; note = 2'-fluorouridine-3'-phosphate
  modified_base 12: mod_base = OTHER; note = 2'-O-methylcytidine-3'-phosphate
  modified_base 13: mod_base = OTHER; note = 2'-O-methylguanosine-3'-phosphate
  modified_base 14: mod_base = OTHER; note = 2'-O-methylguanosine-3'-phosphate
  modified_base 15: mod_base = OTHER; note = 2'-O-methyluridine-3'-phosphate
  modified_base 16: mod_base = OTHER; note = 2'-O-methyluridine-3'-phosphate
  modified_base 17: mod_base = OTHER; note = 2'-O-methyluridine-3'-phosphate
  modified_base 18: mod_base = OTHER; note = 2'-O-methylguanosine-3'-phosphate
  modified_base 19: mod_base = OTHER; note = 2'-O-methyluridine-3'-phosphate
  modified_base 20: mod_base = OTHER; note = 2'-O-methyladenosine-3'-phosphate
  modified_base 21: mod_base = OTHER; note = 2'-O-methyluridine-3'-phosphate N-[tris(GalNAc-alkyl)-amidodecanoyl)]-4-hydroxyprolinol (Hyp-(GalNAc-alkyl)3)
tgcattgccttcggtttgtat

SEQ ID NO: 2275 - RNA, 21 nt, synthetic construct
  source 1..21: mol_type = other RNA
  modified_base 1: mod_base = OTHER; note = 2'-O-methylguanosine-3'-phosphorothioate
  modified_base 2: mod_base = OTHER; note = 2'-O-methylcytidine-3'-phosphorothioate
  modified_base 3: mod_base = OTHER; note = 2'-O-methyladenosine-3'-phosphate
  modified_base 4: mod_base = OTHER; note = 2'-O-methyluridine-3'-phosphate
  modified_base 5: mod_base = OTHER; note = 2'-O-methyluridine-3'-phosphate
  modified_base 6: mod_base = OTHER; note = 2'-O-methylguanosine-3'-phosphate
  modified_base 7: mod_base = OTHER; note = 2'-O-methylcytidine-3'-phosphate
  modified_base 8: mod_base = OTHER; note = 2'-O-methylcytidine-3'-phosphate
  modified_base 9: mod_base = OTHER; note = 2'-fluorouridine-3'-phosphate
  modified_base 10: mod_base = OTHER; note = 2'-fluorouridine-3'-phosphate
  modified_base 11: mod_base = OTHER; note = 2'-fluorocytidine-3'-phosphate
  modified_base 12: mod_base = OTHER; note = 2'-O-methylguanosine-3'-phosphate
  modified_base 13: mod_base = OTHER; note = 2'-O-methylguanosine-3'-phosphate
  modified_base 14: mod_base = OTHER; note = 2'-O-methyluridine-3'-phosphate
  modified_base 15: mod_base = OTHER; note = 2'-O-methyluridine-3'-phosphate
  modified_base 16: mod_base = OTHER; note = 2'-O-methyluridine-3'-phosphate
  modified_base 17: mod_base = OTHER; note = 2'-O-methylguanosine-3'-phosphate
  modified_base 18: mod_base = OTHER; note = 2'-O-methyluridine-3'-phosphate
  modified_base 19: mod_base = OTHER; note = 2'-O-methyladenosine-3'-phosphate
  modified_base 20: mod_base = OTHER; note = 2'-O-methyluridine-3'-phosphate
  modified_base 21: mod_base = OTHER; note = 2'-O-methyluridine-3'-phosphate N-[tris(GalNAc-alkyl)-amidodecanoyl)]-4-hydroxyprolinol (Hyp-(GalNAc-alkyl)3)
gcattgccttcggtttgtatt

SEQ ID NO: 2276 - RNA, 21 nt, synthetic construct
  source 1..21: mol_type = other RNA
  modified_base 1: mod_base = OTHER; note = 2'-O-methylcytidine-3'-phosphorothioate
  modified_base 2: mod_base = OTHER; note = 2'-O-methyladenosine-3'-phosphorothioate
  modified_base 3: mod_base = OTHER; note = 2'-O-methyluridine-3'-phosphate
  modified_base 4: mod_base = OTHER; note = 2'-O-methyluridine-3'-phosphate
  modified_base 5: mod_base = OTHER; note = 2'-O-methylguanosine-3'-phosphate
  modified_base 6: mod_base = OTHER; note = 2'-O-methylcytidine-3'-phosphate
  modified_base 7: mod_base = OTHER; note = 2'-O-methylcytidine-3'-phosphate
  modified_base 8: mod_base = OTHER; note = 2'-O-methyluridine-3'-phosphate
  modified_base 9: mod_base = OTHER; note = 2'-fluorouridine-3'-phosphate
  modified_base 10: mod_base = OTHER; note = 2'-fluorocytidine-3'-phosphate
  modified_base 11: mod_base = OTHER; note = 2'-fluoroguanosine-3'-phosphate
  modified_base 12: mod_base = OTHER; note = 2'-O-methylguanosine-3'-phosphate
  modified_base 13: mod_base = OTHER; note = 2'-O-methyluridine-3'-phosphate
  modified_base 14: mod_base = OTHER; note = 2'-O-methyluridine-3'-phosphate
  modified_base 15: mod_base = OTHER; note = 2'-O-methyluridine-3'-phosphate
  modified_base 16: mod_base = OTHER; note = 2'-O-methylguanosine-3'-phosphate
  modified_base 17: mod_base = OTHER; note = 2'-O-methyluridine-3'-phosphate
  modified_base 18: mod_base = OTHER; note = 2'-O-methyladenosine-3'-phosphate
  modified_base 19: mod_base = OTHER; note = 2'-O-methyluridine-3'-phosphate
  modified_base 20: mod_base = OTHER; note = 2'-O-methyluridine-3'-phosphate
  modified_base 21: mod_base = OTHER; note = 2'-O-methyluridine-3'-phosphate N-[tris(GalNAc-alkyl)-amidodecanoyl)]-4-hydroxyprolinol (Hyp-(GalNAc-alkyl)3)
cattgccttcggtttgtattt

SEQ ID NO: 2277 - RNA, 21 nt, synthetic construct
  source 1..21: mol_type = other RNA
  modified_base 1: mod_base = OTHER; note = 2'-O-methyladenosine-3'-phosphorothioate
  modified_base 2: mod_base = OTHER; note = 2'-O-methyluridine-3'-phosphorothioate
  modified_base 3: mod_base = OTHER; note = 2'-O-methyluridine-3'-phosphate
  modified_base 4: mod_base = OTHER; note = 2'-O-methylguanosine-3'-phosphate
  modified_base 5: mod_base = OTHER; note = 2'-O-methylcytidine-3'-phosphate
  modified_base 6: mod_base = OTHER; note = 2'-O-methylcytidine-3'-phosphate
  modified_base 7: mod_base = OTHER; note = 2'-O-methyluridine-3'-phosphate
  modified_base 8: mod_base = OTHER; note = 2'-O-methyluridine-3'-phosphate
  modified_base 9: mod_base = OTHER; note = 2'-fluorocytidine-3'-phosphate
  modified_base 10: mod_base = OTHER; note = 2'-fluoroguanosine-3'-phosphate
  modified_base 11: mod_base = OTHER; note = 2'-fluoroguanosine-3'-phosphate
  modified_base 12: mod_base = OTHER; note = 2'-O-methyluridine-3'-phosphate
  modified_base 13: mod_base = OTHER; note = 2'-O-methyluridine-3'-phosphate
  modified_base 14: mod_base = OTHER; note = 2'-O-methyluridine-3'-phosphate
  modified_base 15: mod_base = OTHER; note = 2'-O-methylguanosine-3'-phosphate
  modified_base 16: mod_base = OTHER; note = 2'-O-methyluridine-3'-phosphate
  modified_base 17: mod_base = OTHER; note = 2'-O-methyladenosine-3'-phosphate
  modified_base 18: mod_base = OTHER; note = 2'-O-methyluridine-3'-phosphate
  modified_base 19: mod_base = OTHER; note = 2'-O-methyluridine-3'-phosphate
  modified_base 20: mod_base = OTHER; note = 2'-O-methyluridine-3'-phosphate
  modified_base 21: mod_base = OTHER; note = 2'-O-methyluridine-3'-phosphate N-[tris(GalNAc-alkyl)-amidodecanoyl)]-4-hydroxyprolinol (Hyp-(GalNAc-alkyl)3)
attgccttcggtttgtatttt

SEQ ID NO: 2278 - RNA, 21 nt, synthetic construct
  source 1..21: mol_type = other RNA
  modified_base 1: mod_base = OTHER; note = 2'-O-methyluridine-3'-phosphorothioate
  modified_base 2: mod_base = OTHER; note = 2'-O-methyluridine-3'-phosphorothioate
  modified_base 3: mod_base = OTHER; note = 2'-O-methylguanosine-3'-phosphate
  modified_base 4: mod_base = OTHER; note = 2'-O-methylcytidine-3'-phosphate
  modified_base 5: mod_base = OTHER; note = 2'-O-methylcytidine-3'-phosphate
  modified_base 6: mod_base = OTHER; note = 2'-O-methyluridine-3'-phosphate
  modified_base 7: mod_base = OTHER; note = 2'-O-methyluridine-3'-phosphate
  modified_base 8: mod_base = OTHER; note = 2'-O-methylcytidine-3'-phosphate
  modified_base 9: mod_base = OTHER; note = 2'-fluoroguanosine-3'-phosphate
  modified_base 10: mod_base = OTHER; note = 2'-fluoroguanosine-3'-phosphate
  modified_base 11: mod_base = OTHER; note = 2'-fluorouridine-3'-phosphate
  modified_base 12: mod_base = OTHER; note = 2'-O-methyluridine-3'-phosphate
  modified_base 13: mod_base = OTHER; note = 2'-O-methyluridine-3'-phosphate
  modified_base 14: mod_base = OTHER; note = 2'-O-methylguanosine-3'-phosphate
  modified_base 15: mod_base = OTHER; note = 2'-O-methyluridine-3'-phosphate
  modified_base 16: mod_base = OTHER; note = 2'-O-methyladenosine-3'-phosphate
  modified_base 17: mod_base = OTHER; note = 2'-O-methyluridine-3'-phosphate
  modified_base 18: mod_base = OTHER; note = 2'-O-methyluridine-3'-phosphate
  modified_base 19: mod_base = OTHER; note = 2'-O-methyluridine-3'-phosphate
  modified_base 20: mod_base = OTHER; note = 2'-O-methyladenosine-3'-phosphate
  modified_base 21: mod_base = OTHER; note = 2'-O-methyluridine-3'-phosphate N-[tris(GalNAc-alkyl)-amidodecanoyl)]-4-hydroxyprolinol (Hyp-(GalNAc-alkyl)3)
ttgccttcggtttgtatttat

SEQ ID NO: 2279 - RNA, 21 nt, synthetic construct
  source 1..21: mol_type = other RNA
  modified_base 1: mod_base = OTHER; note = 2'-O-methyluridine-3'-phosphorothioate
  modified_base 2: mod_base = OTHER; note = 2'-O-methylguanosine-3'-phosphorothioate
  modified_base 3: mod_base = OTHER; note = 2'-O-methylcytidine-3'-phosphate
  modified_base 4: mod_base = OTHER; note = 2'-O-methylcytidine-3'-phosphate
  modified_base 5: mod_base = OTHER; note = 2'-O-methyluridine-3'-phosphate
  modified_base 6: mod_base = OTHER; note = 2'-O-methyluridine-3'-phosphate
  modified_base 7: mod_base = OTHER; note = 2'-O-methylcytidine-3'-phosphate
  modified_base 8: mod_base = OTHER; note = 2'-O-methylguanosine-3'-phosphate
  modified_base 9: mod_base = OTHER; note = 2'-fluoroguanosine-3'-phosphate
  modified_base 10: mod_base = OTHER; note = 2'-fluorouridine-3'-phosphate
  modified_base 11: mod_base = OTHER; note = 2'-fluorouridine-3'-phosphate
  modified_base 12: mod_base = OTHER; note = 2'-O-methyluridine-3'-phosphate
  modified_base 13: mod_base = OTHER; note = 2'-O-methylguanosine-3'-phosphate
  modified_base 14: mod_base = OTHER; note = 2'-O-methyluridine-3'-phosphate
  modified_base 15: mod_base = OTHER; note = 2'-O-methyladenosine-3'-phosphate
  modified_base 16: mod_base = OTHER; note = 2'-O-methyluridine-3'-phosphate
  modified_base 17: mod_base = OTHER; note = 2'-O-methyluridine-3'-phosphate
  modified_base 18: mod_base = OTHER; note = 2'-O-methyluridine-3'-phosphate
  modified_base 19: mod_base = OTHER; note = 2'-O-methyladenosine-3'-phosphate
  modified_base 20: mod_base = OTHER; note = 2'-O-methylguanosine-3'-phosphate
  modified_base 21: mod_base = OTHER; note = 2'-O-methyluridine-3'-phosphate N-[tris(GalNAc-alkyl)-amidodecanoyl)]-4-hydroxyprolinol (Hyp-(GalNAc-alkyl)3)
tgccttcggtttgtatttagt

SEQ ID NO: 2280 - RNA, 21 nt, synthetic construct
  source 1..21: mol_type = other RNA
  modified_base 1: mod_base = OTHER; note = 2'-O-methylguanosine-3'-phosphorothioate
  modified_base 2: mod_base = OTHER; note = 2'-O-methylcytidine-3'-phosphorothioate
  modified_base 3: mod_base = OTHER; note = 2'-O-methylcytidine-3'-phosphate
  modified_base 4: mod_base = OTHER; note = 2'-O-methyluridine-3'-phosphate
  modified_base 5: mod_base = OTHER; note = 2'-O-methyluridine-3'-phosphate
  modified_base 6: mod_base = OTHER; note = 2'-O-methylcytidine-3'-phosphate
  modified_base 7: mod_base = OTHER; note = 2'-O-methylguanosine-3'-phosphate
  modified_base 8: mod_base = OTHER; note = 2'-O-methylguanosine-3'-phosphate
  modified_base 9: mod_base = OTHER; note = 2'-fluorouridine-3'-phosphate
  modified_base 10: mod_base = OTHER; note = 2'-fluorouridine-3'-phosphate
  modified_base 11: mod_base = OTHER; note = 2'-fluorouridine-3'-phosphate
  modified_base 12: mod_base = OTHER; note = 2'-O-methylguanosine-3'-phosphate
  modified_base 13: mod_base = OTHER; note = 2'-O-methyluridine-3'-phosphate
  modified_base 14: mod_base = OTHER; note = 2'-O-methyladenosine-3'-phosphate
  modified_base 15: mod_base = OTHER; note = 2'-O-methyluridine-3'-phosphate
  modified_base 16: mod_base = OTHER; note = 2'-O-methyluridine-3'-phosphate
  modified_base 17: mod_base = OTHER; note = 2'-O-methyluridine-3'-phosphate
  modified_base 18: mod_base = OTHER; note = 2'-O-methyladenosine-3'-phosphate
  modified_base 19: mod_base = OTHER; note = 2'-O-methylguanosine-3'-phosphate
  modified_base 20: mod_base = OTHER; note = 2'-O-methyluridine-3'-phosphate
  modified_base 21: mod_base = OTHER; note = 2'-O-methyluridine-3'-phosphate N-[tris(GalNAc-alkyl)-amidodecanoyl)]-4-hydroxyprolinol (Hyp-(GalNAc-alkyl)3)
gccttcggtttgtatttagtt

SEQ ID NO: 2281 - RNA, 21 nt, synthetic construct
  source 1..21: mol_type = other RNA
  modified_base 1: mod_base = OTHER; note = 2'-O-methylcytidine-3'-phosphorothioate
  modified_base 2: mod_base = OTHER; note = 2'-O-methylcytidine-3'-phosphorothioate
  modified_base 3: mod_base = OTHER; note = 2'-O-methyluridine-3'-phosphate
  modified_base 4: mod_base = OTHER; note = 2'-O-methyluridine-3'-phosphate
  modified_base 5: mod_base = OTHER; note = 2'-O-methylcytidine-3'-phosphate
  modified_base 6: mod_base = OTHER; note = 2'-O-methylguanosine-3'-phosphate
  modified_base 7: mod_base = OTHER; note = 2'-O-methylguanosine-3'-phosphate
  modified_base 8: mod_base = OTHER; note = 2'-O-methyluridine-3'-phosphate
  modified_base 9: mod_base = OTHER; note = 2'-fluorouridine-3'-phosphate
  modified_base 10: mod_base = OTHER; note = 2'-fluorouridine-3'-phosphate
  modified_base 11: mod_base = OTHER; note = 2'-fluoroguanosine-3'-phosphate
  modified_base 12: mod_base = OTHER; note = 2'-O-methyluridine-3'-phosphate
  modified_base 13: mod_base = OTHER; note = 2'-O-methyladenosine-3'-phosphate
  modified_base 14: mod_base = OTHER; note = 2'-O-methyluridine-3'-phosphate
  modified_base 15: mod_base = OTHER; note = 2'-O-methyluridine-3'-phosphate
  modified_base 16: mod_base = OTHER; note = 2'-O-methyluridine-3'-phosphate
  modified_base 17: mod_base = OTHER; note = 2'-O-methyladenosine-3'-phosphate
  modified_base 18: mod_base = OTHER; note = 2'-O-methylguanosine-3'-phosphate
  modified_base 19: mod_base = OTHER; note = 2'-O-methyluridine-3'-phosphate
  modified_base 20: mod_base = OTHER; note = 2'-O-methylguanosine-3'-phosphate
  modified_base 21: mod_base = OTHER; note = 2'-O-methyluridine-3'-phosphate N-[tris(GalNAc-alkyl)-amidodecanoyl)]-4-hydroxyprolinol (Hyp-(GalNAc-alkyl)3)
ccttcggtttgtatttagtgt

SEQ ID NO: 2282 - RNA, 21 nt, synthetic construct
  source 1..21: mol_type = other RNA
  modified_base 1: mod_base = OTHER; note = 2'-O-methylcytidine-3'-phosphorothioate
  modified_base 2: mod_base = OTHER; note = 2'-O-methyluridine-3'-phosphorothioate
  modified_base 3: mod_base = OTHER; note = 2'-O-methyluridine-3'-phosphate
  modified_base 4: mod_base = OTHER; note = 2'-O-methylcytidine-3'-phosphate
  modified_base 5: mod_base = OTHER; note = 2'-O-methylguanosine-3'-phosphate
  modified_base 6: mod_base = OTHER; note = 2'-O-methylguanosine-3'-phosphate
  modified_base 7: mod_base = OTHER; note = 2'-O-methyluridine-3'-phosphate
  modified_base 8: mod_base = OTHER; note = 2'-O-methyluridine-3'-phosphate
  modified_base 9: mod_base = OTHER; note = 2'-fluorouridine-3'-phosphate
  modified_base 10: mod_base = OTHER; note = 2'-fluoroguanosine-3'-phosphate
  modified_base 11: mod_base = OTHER; note = 2'-fluorouridine-3'-phosphate
  modified_base 12: mod_base = OTHER; note = 2'-O-methyladenosine-3'-phosphate
  modified_base 13: mod_base = OTHER; note = 2'-O-methyluridine-3'-phosphate
  modified_base 14: mod_base = OTHER; note = 2'-O-methyluridine-3'-phosphate
  modified_base 15: mod_base = OTHER; note = 2'-O-methyluridine-3'-phosphate
  modified_base 16: mod_base = OTHER; note = 2'-O-methyladenosine-3'-phosphate
  modified_base 17: mod_base = OTHER; note = 2'-O-methylguanosine-3'-phosphate
  modified_base 18: mod_base = OTHER; note = 2'-O-methyluridine-3'-phosphate
  modified_base 19: mod_base = OTHER; note = 2'-O-methylguanosine-3'-phosphate
  modified_base 20: mod_base = OTHER; note = 2'-O-methyluridine-3'-phosphate
  modified_base 21: mod_base = OTHER; note = 2'-O-methyluridine-3'-phosphate N-[tris(GalNAc-alkyl)-amidodecanoyl)]-4-hydroxyprolinol (Hyp-(GalNAc-alkyl)3)
cttcggtttgtatttagtgtt

SEQ ID NO: 2283 - RNA, 21 nt, synthetic construct
  source 1..21: mol_type = other RNA
  modified_base 1: mod_base = OTHER; note = 2'-O-methyluridine-3'-phosphorothioate
  modified_base 2: mod_base = OTHER; note = 2'-O-methyluridine-3'-phosphorothioate
  modified_base 3: mod_base = OTHER; note = 2'-O-methylcytidine-3'-phosphate
  modified_base 4: mod_base = OTHER; note = 2'-O-methylguanosine-3'-phosphate
  modified_base 5: mod_base = OTHER; note = 2'-O-methylguanosine-3'-phosphate
  modified_base 6: mod_base = OTHER; note = 2'-O-methyluridine-3'-phosphate
  modified_base 7: mod_base = OTHER; note = 2'-O-methyluridine-3'-phosphate
  modified_base 8: mod_base = OTHER; note = 2'-O-methyluridine-3'-phosphate
  modified_base 9: mod_base = OTHER; note = 2'-fluoroguanosine-3'-phosphate
  modified_base 10: mod_base = OTHER; note = 2'-fluorouridine-3'-phosphate
  modified_base 11: mod_base = OTHER; note = 2'-fluoroadenosine-3'-phosphate
  modified_base 12: mod_base = OTHER; note = 2'-O-methyluridine-3'-phosphate
  modified_base 13: mod_base = OTHER; note = 2'-O-methyluridine-3'-phosphate
  modified_base 14: mod_base = OTHER; note = 2'-O-methyluridine-3'-phosphate
  modified_base 15: mod_base = OTHER; note = 2'-O-methyladenosine-3'-phosphate
  modified_base 16: mod_base = OTHER; note = 2'-O-methylguanosine-3'-phosphate
  modified_base 17: mod_base = OTHER; note = 2'-O-methyluridine-3'-phosphate
  modified_base 18: mod_base = OTHER; note = 2'-O-methylguanosine-3'-phosphate
  modified_base 19: mod_base = OTHER; note = 2'-O-methyluridine-3'-phosphate
  modified_base 20: mod_base = OTHER; note = 2'-O-methylcytidine-3'-phosphate
  modified_base 21: mod_base = OTHER; note = 2'-O-methyluridine-3'-phosphate N-[tris(GalNAc-alkyl)-amidodecanoyl)]-4-hydroxyprolinol (Hyp-(GalNAc-alkyl)3)
ttcggtttgtatttagtgtct

SEQ ID NO: 2284 - RNA, 21 nt, synthetic construct
  source 1..21: mol_type = other RNA
  modified_base 1: mod_base = OTHER; note = 2'-O-methyluridine-3'-phosphorothioate
  modified_base 2: mod_base = OTHER; note = 2'-O-methylcytidine-3'-phosphorothioate
  modified_base 3: mod_base = OTHER; note = 2'-O-methylguanosine-3'-phosphate
  modified_base 4: mod_base = OTHER; note = 2'-O-methylguanosine-3'-phosphate
  modified_base 5: mod_base = OTHER; note = 2'-O-methyluridine-3'-phosphate
  modified_base 6: mod_base = OTHER; note = 2'-O-methyluridine-3'-phosphate
  modified_base 7: mod_base = OTHER; note = 2'-O-methyluridine-3'-phosphate
  modified_base 8: mod_base = OTHER; note = 2'-O-methylguanosine-3'-phosphate
  modified_base 9: mod_base = OTHER; note = 2'-fluorouridine-3'-phosphate
  modified_base 10: mod_base = OTHER; note = 2'-fluoroadenosine-3'-phosphate
  modified_base 11: mod_base = OTHER; note = 2'-fluorouridine-3'-phosphate
  modified_base 12: mod_base = OTHER; note = 2'-O-methyluridine-3'-phosphate
  modified_base 13: mod_base = OTHER; note = 2'-O-methyluridine-3'-phosphate
  modified_base 14: mod_base = OTHER; note = 2'-O-methyladenosine-3'-phosphate
  modified_base 15: mod_base = OTHER; note = 2'-O-methylguanosine-3'-phosphate
  modified_base 16: mod_base = OTHER; note = 2'-O-methyluridine-3'-phosphate
  modified_base 17: mod_base = OTHER; note = 2'-O-methylguanosine-3'-phosphate
  modified_base 18: mod_base = OTHER; note = 2'-O-methyluridine-3'-phosphate
  modified_base 19: mod_base = OTHER; note = 2'-O-methylcytidine-3'-phosphate
  modified_base 20: mod_base = OTHER; note = 2'-O-methyluridine-3'-phosphate
  modified_base 21: mod_base = OTHER; note = 2'-O-methyluridine-3'-phosphate N-[tris(GalNAc-alkyl)-amidodecanoyl)]-4-hydroxyprolinol (Hyp-(GalNAc-alkyl)3)
tcggtttgtatttagtgtctt

SEQ ID NO: 2285 - RNA, 21 nt, synthetic construct
  source 1..21: mol_type = other RNA
  modified_base 1: mod_base = OTHER; note = 2'-O-methylcytidine-3'-phosphorothioate
  modified_base 2: mod_base = OTHER; note = 2'-O-methylguanosine-3'-phosphorothioate
  modified_base 3: mod_base = OTHER; note = 2'-O-methylguanosine-3'-phosphate
  modified_base 4: mod_base = OTHER; note = 2'-O-methyluridine-3'-phosphate
  modified_base 5: mod_base = OTHER; note = 2'-O-methyluridine-3'-phosphate
  modified_base 6: mod_base = OTHER; note = 2'-O-methyluridine-3'-phosphate
  modified_base 7: mod_base = OTHER; note = 2'-O-methylguanosine-3'-phosphate
  modified_base 8: mod_base = OTHER; note = 2'-O-methyluridine-3'-phosphate
  modified_base 9: mod_base = OTHER; note = 2'-fluoroadenosine-3'-phosphate
  modified_base 10: mod_base = OTHER; note = 2'-fluorouridine-3'-phosphate
  modified_base 11: mod_base = OTHER; note = 2'-fluorouridine-3'-phosphate
  modified_base 12: mod_base = OTHER; note = 2'-O-methyluridine-3'-phosphate
  modified_base 13: mod_base = OTHER; note = 2'-O-methyladenosine-3'-phosphate
  modified_base 14: mod_base = OTHER; note = 2'-O-methylguanosine-3'-phosphate
  modified_base 15: mod_base = OTHER; note = 2'-O-methyluridine-3'-phosphate
  modified_base 16: mod_base = OTHER; note = 2'-O-methylguanosine-3'-phosphate
  modified_base 17: mod_base = OTHER; note = 2'-O-methyluridine-3'-phosphate
  modified_base 18: mod_base = OTHER; note = 2'-O-methylcytidine-3'-phosphate
  modified_base 19: mod_base = OTHER; note = 2'-O-methyluridine-3'-phosphate
  modified_base 20: mod_base = OTHER; note = 2'-O-methyluridine-3'-phosphate
  modified_base 21: mod_base = OTHER; note = 2'-O-methyluridine-3'-phosphate N-[tris(GalNAc-alkyl)-amidodecanoyl)]-4-hydroxyprolinol (Hyp-(GalNAc-alkyl)3)
cggtttgtatttagtgtcttt

SEQ ID NO: 2286 - RNA, 21 nt, synthetic construct
  source 1..21: mol_type = other RNA
  modified_base 1: mod_base = OTHER; note = 2'-O-methylguanosine-3'-phosphorothioate
  modified_base 2: mod_base = OTHER; note = 2'-O-methylguanosine-3'-phosphorothioate
  modified_base 3: mod_base = OTHER; note = 2'-O-methyluridine-3'-phosphate
  modified_base 4: mod_base = OTHER; note = 2'-O-methyluridine-3'-phosphate
  modified_base 5: mod_base = OTHER; note = 2'-O-methyluridine-3'-phosphate
  modified_base 6: mod_base = OTHER; note = 2'-O-methylguanosine-3'-phosphate
  modified_base 7: mod_base = OTHER; note = 2'-O-methyluridine-3'-phosphate
  modified_base 8: mod_base = OTHER; note = 2'-O-methyladenosine-3'-phosphate
  modified_base 9: mod_base = OTHER; note = 2'-fluorouridine-3'-phosphate
  modified_base 10: mod_base = OTHER; note = 2'-fluorouridine-3'-phosphate
  modified_base 11: mod_base = OTHER; note = 2'-fluorouridine-3'-phosphate
  modified_base 12: mod_base = OTHER; note = 2'-O-methyladenosine-3'-phosphate
  modified_base 13: mod_base = OTHER; note = 2'-O-methylguanosine-3'-phosphate
  modified_base 14: mod_base = OTHER; note = 2'-O-methyluridine-3'-phosphate
  modified_base 15: mod_base = OTHER; note = 2'-O-methylguanosine-3'-phosphate
  modified_base 16: mod_base = OTHER; note = 2'-O-methyluridine-3'-phosphate
  modified_base 17: mod_base = OTHER; note = 2'-O-methylcytidine-3'-phosphate
  modified_base 18: mod_base = OTHER; note = 2'-O-methyluridine-3'-phosphate
  modified_base 19: mod_base = OTHER; note = 2'-O-methyluridine-3'-phosphate
  modified_base 20: mod_base = OTHER; note = 2'-O-methylguanosine-3'-phosphate
  modified_base 21: mod_base = OTHER; note = 2'-O-methyluridine-3'-phosphate N-[tris(GalNAc-alkyl)-amidodecanoyl)]-4-hydroxyprolinol (Hyp-(GalNAc-alkyl)3)
ggtttgtatttagtgtcttgt

SEQ ID NO: 2287 - RNA, 21 nt, synthetic construct
  source 1..21: mol_type = other RNA
  modified_base 1: mod_base = OTHER; note = 2'-O-methylguanosine-3'-phosphorothioate
  modified_base 2: mod_base = OTHER; note = 2'-O-methyluridine-3'-phosphorothioate
  modified_base 3: mod_base = OTHER; note = 2'-O-methyluridine-3'-phosphate
  modified_base 4: mod_base = OTHER; note = 2'-O-methyluridine-3'-phosphate
  modified_base 5: mod_base = OTHER; note = 2'-O-methylguanosine-3'-phosphate
  modified_base 6: mod_base = OTHER; note = 2'-O-methyluridine-3'-phosphate
  modified_base 7: mod_base = OTHER; note = 2'-O-methyladenosine-3'-phosphate
  modified_base 8: mod_base = OTHER; note = 2'-O-methyluridine-3'-phosphate
  modified_base 9: mod_base = OTHER; note = 2'-fluorouridine-3'-phosphate
  modified_base 10: mod_base = OTHER; note = 2'-fluorouridine-3'-phosphate
  modified_base 11: mod_base = OTHER; note = 2'-fluoroadenosine-3'-phosphate
  modified_base 12: mod_base = OTHER; note = 2'-O-methylguanosine-3'-phosphate
  modified_base 13: mod_base = OTHER; note = 2'-O-methyluridine-3'-phosphate
  modified_base 14: mod_base = OTHER; note = 2'-O-methylguanosine-3'-phosphate
  modified_base 15: mod_base = OTHER; note = 2'-O-methyluridine-3'-phosphate
  modified_base 16: mod_base = OTHER; note = 2'-O-methylcytidine-3'-phosphate
  modified_base 17: mod_base = OTHER; note = 2'-O-methyluridine-3'-phosphate
  modified_base 18: mod_base = OTHER; note = 2'-O-methyluridine-3'-phosphate
  modified_base 19: mod_base = OTHER; note = 2'-O-methylguanosine-3'-phosphate
  modified_base 20: mod_base = OTHER; note = 2'-O-methyladenosine-3'-phosphate
  modified_base 21: mod_base = OTHER; note = 2'-O-methyluridine-3'-phosphate N-[tris(GalNAc-alkyl)-amidodecanoyl)]-4-hydroxyprolinol (Hyp-(GalNAc-alkyl)3)
gtttgtatttagtgtcttgat

SEQ ID NO: 2288 - RNA, 21 nt, synthetic construct
  source 1..21: mol_type = other RNA
  modified_base 1: mod_base = OTHER; note = 2'-O-methyluridine-3'-phosphorothioate
  modified_base 2: mod_base = OTHER; note = 2'-O-methyluridine-3'-phosphorothioate
  modified_base 3: mod_base = OTHER; note = 2'-O-methyluridine-3'-phosphate
  modified_base 4: mod_base = OTHER; note = 2'-O-methylguanosine-3'-phosphate
  modified_base 5: mod_base = OTHER; note = 2'-O-methyluridine-3'-phosphate
  modified_base 6: mod_base = OTHER; note = 2'-O-methyladenosine-3'-phosphate
  modified_base 7: mod_base = OTHER; note = 2'-O-methyluridine-3'-phosphate
  modified_base 8: mod_base = OTHER; note = 2'-O-methyluridine-3'-phosphate
  modified_base 9: mod_base = OTHER; note = 2'-fluorouridine-3'-phosphate
  modified_base 10: mod_base = OTHER; note = 2'-fluoroadenosine-3'-phosphate
  modified_base 11: mod_base = OTHER; note = 2'-fluoroguanosine-3'-phosphate
  modified_base 12: mod_base = OTHER; note = 2'-O-methyluridine-3'-phosphate
  modified_base 13: mod_base = OTHER; note = 2'-O-methylguanosine-3'-phosphate
  modified_base 14: mod_base = OTHER; note = 2'-O-methyluridine-3'-phosphate
  modified_base 15: mod_base = OTHER; note = 2'-O-methylcytidine-3'-phosphate
  modified_base 16: mod_base = OTHER; note = 2'-O-methyluridine-3'-phosphate
  modified_base 17: mod_base = OTHER; note = 2'-O-methyluridine-3'-phosphate
  modified_base 18: mod_base = OTHER; note = 2'-O-methylguanosine-3'-phosphate
  modified_base 19: mod_base = OTHER; note = 2'-O-methyladenosine-3'-phosphate
  modified_base 20: mod_base = OTHER; note = 2'-O-methyladenosine-3'-phosphate
  modified_base 21: mod_base = OTHER; note = 2'-O-methyluridine-3'-phosphate N-[tris(GalNAc-alkyl)-amidodecanoyl)]-4-hydroxyprolinol (Hyp-(GalNAc-alkyl)3)
tttgtatttagtgtcttgaat

SEQ ID NO: 2289 - RNA, 21 nt, synthetic construct
  source 1..21: mol_type = other RNA
  modified_base 1: mod_base = OTHER; note = 2'-O-methyluridine-3'-phosphorothioate
  modified_base 2: mod_base = OTHER; note = 2'-O-methyluridine-3'-phosphorothioate
  modified_base 3: mod_base = OTHER; note = 2'-O-methylguanosine-3'-phosphate
  modified_base 4: mod_base = OTHER; note = 2'-O-methyluridine-3'-phosphate
  modified_base 5: mod_base = OTHER; note = 2'-O-methyladenosine-3'-phosphate
  modified_base 6: mod_base = OTHER; note = 2'-O-methyluridine-3'-phosphate
  modified_base 7: mod_base = OTHER; note = 2'-O-methyluridine-3'-phosphate
  modified_base 8: mod_base = OTHER; note = 2'-O-methyluridine-3'-phosphate
  modified_base 9: mod_base = OTHER; note = 2'-fluoroadenosine-3'-phosphate
  modified_base 10: mod_base = OTHER; note = 2'-fluoroguanosine-3'-phosphate
  modified_base 11: mod_base = OTHER; note = 2'-fluorouridine-3'-phosphate
  modified_base 12: mod_base = OTHER; note = 2'-O-methylguanosine-3'-phosphate
  modified_base 13: mod_base = OTHER; note = 2'-O-methyluridine-3'-phosphate
  modified_base 14: mod_base = OTHER; note = 2'-O-methylcytidine-3'-phosphate
  modified_base 15: mod_base = OTHER; note = 2'-O-methyluridine-3'-phosphate
  modified_base 16: mod_base = OTHER; note = 2'-O-methyluridine-3'-phosphate
  modified_base 17: mod_base = OTHER; note = 2'-O-methylguanosine-3'-phosphate
  modified_base 18: mod_base = OTHER; note = 2'-O-methyladenosine-3'-phosphate
  modified_base 19: mod_base = OTHER; note = 2'-O-methyladenosine-3'-phosphate
  modified_base 20: mod_base = OTHER; note = 2'-O-methyluridine-3'-phosphate
  modified_base 21: mod_base = OTHER; note = 2'-O-methyluridine-3'-phosphate N-[tris(GalNAc-alkyl)-amidodecanoyl)]-4-hydroxyprolinol (Hyp-(GalNAc-alkyl)3)
ttgtatttagtgtcttgaatt

SEQ ID NO: 2290 - RNA, 21 nt, synthetic construct
  source 1..21: mol_type = other RNA
  modified_base 1: mod_base = OTHER; note = 2'-O-methyluridine-3'-phosphorothioate
  modified_base 2: mod_base = OTHER; note = 2'-O-methylguanosine-3'-phosphorothioate
  modified_base 3: mod_base = OTHER; note = 2'-O-methyluridine-3'-phosphate
  modified_base 4: mod_base = OTHER; note = 2'-O-methyladenosine-3'-phosphate
  modified_base 5: mod_base = OTHER; note = 2'-O-methyluridine-3'-phosphate
  modified_base 6: mod_base = OTHER; note = 2'-O-methyluridine-3'-phosphate
  modified_base 7: mod_base = OTHER; note = 2'-O-methyluridine-3'-phosphate
  modified_base 8: mod_base = OTHER; note = 2'-O-methyladenosine-3'-phosphate
  modified_base 9: mod_base = OTHER; note = 2'-fluoroguanosine-3'-phosphate
  modified_base 10: mod_base = OTHER; note = 2'-fluorouridine-3'-phosphate
  modified_base 11: mod_base = OTHER; note = 2'-fluoroguanosine-3'-phosphate
  modified_base 12: mod_base = OTHER; note = 2'-O-methyluridine-3'-phosphate
  modified_base 13: mod_base = OTHER; note = 2'-O-methylcytidine-3'-phosphate
  modified_base 14: mod_base = OTHER; note = 2'-O-methyluridine-3'-phosphate
  modified_base 15: mod_base = OTHER; note = 2'-O-methyluridine-3'-phosphate
  modified_base 16: mod_base = OTHER; note = 2'-O-methylguanosine-3'-phosphate
  modified_base 17: mod_base = OTHER; note = 2'-O-methyladenosine-3'-phosphate
  modified_base 18: mod_base = OTHER; note = 2'-O-methyladenosine-3'-phosphate
  modified_base 19: mod_base = OTHER; note = 2'-O-methyluridine-3'-phosphate
  modified_base 20: mod_base = OTHER; note = 2'-O-methylguanosine-3'-phosphate
  modified_base 21: mod_base = OTHER; note = 2'-O-methyluridine-3'-phosphate N-[tris(GalNAc-alkyl)-amidodecanoyl)]-4-hydroxyprolinol (Hyp-(GalNAc-alkyl)3)
tgtatttagtgtcttgaatgt

SEQ ID NO: 2291 - RNA, 21 nt, synthetic construct
  source 1..21: mol_type = other RNA
  modified_base 1: mod_base = OTHER; note = 2'-O-methylguanosine-3'-phosphorothioate
  modified_base 2: mod_base = OTHER; note = 2'-O-methyluridine-3'-phosphorothioate
  modified_base 3: mod_base = OTHER; note = 2'-O-methyladenosine-3'-phosphate
  modified_base 4: mod_base = OTHER; note = 2'-O-methyluridine-3'-phosphate
  modified_base 5: mod_base = OTHER; note = 2'-O-methyluridine-3'-phosphate
  modified_base 6: mod_base = OTHER; note = 2'-O-methyluridine-3'-phosphate
  modified_base 7: mod_base = OTHER; note = 2'-O-methyladenosine-3'-phosphate
  modified_base 8: mod_base = OTHER; note = 2'-O-methylguanosine-3'-phosphate
  modified_base 9: mod_base = OTHER; note = 2'-fluorouridine-3'-phosphate
  modified_base 10: mod_base = OTHER; note = 2'-fluoroguanosine-3'-phosphate
  modified_base 11: mod_base = OTHER; note = 2'-fluorouridine-3'-phosphate
  modified_base 12: mod_base = OTHER; note = 2'-O-methylcytidine-3'-phosphate
  modified_base 13: mod_base = OTHER; note = 2'-O-methyluridine-3'-phosphate
  modified_base 14: mod_base = OTHER; note = 2'-O-methyluridine-3'-phosphate
  modified_base 15: mod_base = OTHER; note = 2'-O-methylguanosine-3'-phosphate
  modified_base 16: mod_base = OTHER; note = 2'-O-methyladenosine-3'-phosphate
  modified_base 17: mod_base = OTHER; note = 2'-O-methyladenosine-3'-phosphate
  modified_base 18: mod_base = OTHER; note = 2'-O-methyluridine-3'-phosphate
  modified_base 19: mod_base = OTHER; note = 2'-O-methylguanosine-3'-phosphate
  modified_base 20: mod_base = OTHER; note = 2'-O-methyluridine-3'-phosphate
  modified_base 21: mod_base = OTHER; note = 2'-O-methyluridine-3'-phosphate N-[tris(GalNAc-alkyl)-amidodecanoyl)]-4-hydroxyprolinol (Hyp-(GalNAc-alkyl)3)
gtatttagtgtcttgaatgtt

SEQ ID NO: 2292 - RNA, 21 nt, synthetic construct
  source 1..21: mol_type = other RNA
  modified_base 1: mod_base = OTHER; note = 2'-O-methyluridine-3'-phosphorothioate
  modified_base 2: mod_base = OTHER; note = 2'-O-methyladenosine-3'-phosphorothioate
  modified_base 3: mod_base = OTHER; note = 2'-O-methyluridine-3'-phosphate
  modified_base 4: mod_base = OTHER; note = 2'-O-methyluridine-3'-phosphate
  modified_base 5: mod_base = OTHER; note = 2'-O-methyluridine-3'-phosphate
  modified_base 6: mod_base = OTHER; note = 2'-O-methyladenosine-3'-phosphate
  modified_base 7: mod_base = OTHER; note = 2'-O-methylguanosine-3'-phosphate
  modified_base 8: mod_base = OTHER; note = 2'-O-methyluridine-3'-phosphate
  modified_base 9: mod_base = OTHER; note = 2'-fluoroguanosine-3'-phosphate
  modified_base 10: mod_base = OTHER; note = 2'-fluorouridine-3'-phosphate
  modified_base 11: mod_base = OTHER; note = 2'-fluorocytidine-3'-phosphate
  modified_base 12: mod_base = OTHER; note = 2'-O-methyluridine-3'-phosphate
  modified_base 13: mod_base = OTHER; note = 2'-O-methyluridine-3'-phosphate
  modified_base 14: mod_base = OTHER; note = 2'-O-methylguanosine-3'-phosphate
  modified_base 15: mod_base = OTHER; note = 2'-O-methyladenosine-3'-phosphate
  modified_base 16: mod_base = OTHER; note = 2'-O-methyladenosine-3'-phosphate
  modified_base 17: mod_base = OTHER; note = 2'-O-methyluridine-3'-phosphate
  modified_base 18: mod_base = OTHER; note = 2'-O-methylguanosine-3'-phosphate
  modified_base 19: mod_base = OTHER; note = 2'-O-methyluridine-3'-phosphate
  modified_base 20: mod_base = OTHER; note = 2'-O-methyladenosine-3'-phosphate
  modified_base 21: mod_base = OTHER; note = 2'-O-methyluridine-3'-phosphate N-[tris(GalNAc-alkyl)-amidodecanoyl)]-4-hydroxyprolinol (Hyp-(GalNAc-alkyl)3)
tatttagtgtcttgaatgtat

SEQ ID NO: 2293 - RNA, 21 nt, synthetic construct
  source 1..21: mol_type = other RNA
  modified_base 1: mod_base = OTHER; note = 2'-O-methyladenosine-3'-phosphorothioate
  modified_base 2: mod_base = OTHER; note = 2'-O-methyluridine-3'-phosphorothioate
  modified_base 3: mod_base = OTHER; note = 2'-O-methyluridine-3'-phosphate
  modified_base 4: mod_base = OTHER; note = 2'-O-methyluridine-3'-phosphate
  modified_base 5: mod_base = OTHER; note = 2'-O-methyladenosine-3'-phosphate
  modified_base 6: mod_base = OTHER; note = 2'-O-methylguanosine-3'-phosphate
  modified_base 7: mod_base = OTHER; note = 2'-O-methyluridine-3'-phosphate
  modified_base 8: mod_base = OTHER; note = 2'-O-methylguanosine-3'-phosphate
  modified_base 9: mod_base = OTHER; note = 2'-fluorouridine-3'-phosphate
  modified_base 10: mod_base = OTHER; note = 2'-fluorocytidine-3'-phosphate
  modified_base 11: mod_base = OTHER; note = 2'-fluorouridine-3'-phosphate
  modified_base 12: mod_base = OTHER; note = 2'-O-methyluridine-3'-phosphate
  modified_base 13: mod_base = OTHER; note = 2'-O-methylguanosine-3'-phosphate
  modified_base 14: mod_base = OTHER; note = 2'-O-methyladenosine-3'-phosphate
  modified_base 15: mod_base = OTHER; note = 2'-O-methyladenosine-3'-phosphate
  modified_base 16: mod_base = OTHER; note = 2'-O-methyluridine-3'-phosphate
  modified_base 17: mod_base = OTHER; note = 2'-O-methylguanosine-3'-phosphate
  modified_base 18: mod_base = OTHER; note = 2'-O-methyluridine-3'-phosphate
  modified_base 19: mod_base = OTHER; note = 2'-O-methyladenosine-3'-phosphate
  modified_base 20: mod_base = OTHER; note = 2'-O-methyladenosine-3'-phosphate
  modified_base 21: mod_base = OTHER; note = 2'-O-methyluridine-3'-phosphate N-[tris(GalNAc-alkyl)-amidodecanoyl)]-4-hydroxyprolinol (Hyp-(GalNAc-alkyl)3)
atttagtgtcttgaatgtaat

SEQ ID NO: 2294 - RNA, 21 nt, synthetic construct
  source 1..21: mol_type = other RNA
  modified_base 1: mod_base = OTHER; note = 2'-O-methyluridine-3'-phosphorothioate
  modified_base 2: mod_base = OTHER; note = 2'-O-methyluridine-3'-phosphorothioate
  modified_base 3: mod_base = OTHER; note = 2'-O-methyluridine-3'-phosphate
  modified_base 4: mod_base = OTHER; note = 2'-O-methyladenosine-3'-phosphate
  modified_base 5: mod_base = OTHER; note = 2'-O-methylguanosine-3'-phosphate
  modified_base 6: mod_base = OTHER; note = 2'-O-methyluridine-3'-phosphate
  modified_base 7: mod_base = OTHER; note = 2'-O-methylguanosine-3'-phosphate
  modified_base 8: mod_base = OTHER; note = 2'-O-methyluridine-3'-phosphate
  modified_base 9: mod_base = OTHER; note = 2'-fluorocytidine-3'-phosphate
  modified_base 10: mod_base = OTHER; note = 2'-fluorouridine-3'-phosphate
  modified_base 11: mod_base = OTHER; note = 2'-fluorouridine-3'-phosphate
  modified_base 12: mod_base = OTHER; note = 2'-O-methylguanosine-3'-phosphate
  modified_base 13: mod_base = OTHER; note = 2'-O-methyladenosine-3'-phosphate
  modified_base 14: mod_base = OTHER; note = 2'-O-methyladenosine-3'-phosphate
  modified_base 15: mod_base = OTHER; note = 2'-O-methyluridine-3'-phosphate
  modified_base 16: mod_base = OTHER; note = 2'-O-methylguanosine-3'-phosphate
  modified_base 17: mod_base = OTHER; note = 2'-O-methyluridine-3'-phosphate
  modified_base 18: mod_base = OTHER; note = 2'-O-methyladenosine-3'-phosphate
  modified_base 19: mod_base = OTHER; note = 2'-O-methyladenosine-3'-phosphate
  modified_base 20: mod_base = OTHER; note = 2'-O-methylguanosine-3'-phosphate
  modified_base 21: mod_base = OTHER; note = 2'-O-methyluridine-3'-phosphate N-[tris(GalNAc-alkyl)-amidodecanoyl)]-4-hydroxyprolinol (Hyp-(GalNAc-alkyl)3)
tttagtgtcttgaatgtaagt

SEQ ID NO: 2295 - RNA, 21 nt, synthetic construct
  source 1..21: mol_type = other RNA
  modified_base 1: mod_base = OTHER; note = 2'-O-methyluridine-3'-phosphorothioate
  modified_base 2: mod_base = OTHER; note = 2'-O-methyluridine-3'-phosphorothioate
  modified_base 3: mod_base = OTHER; note = 2'-O-methyladenosine-3'-phosphate
  modified_base 4: mod_base = OTHER; note = 2'-O-methylguanosine-3'-phosphate
  modified_base 5: mod_base = OTHER; note = 2'-O-methyluridine-3'-phosphate
  modified_base 6: mod_base = OTHER; note = 2'-O-methylguanosine-3'-phosphate
  modified_base 7: mod_base = OTHER; note = 2'-O-methyluridine-3'-phosphate
  modified_base 8: mod_base = OTHER; note = 2'-O-methylcytidine-3'-phosphate
  modified_base 9: mod_base = OTHER; note = 2'-fluorouridine-3'-phosphate
  modified_base 10: mod_base = OTHER; note = 2'-fluorouridine-3'-phosphate
  modified_base 11: mod_base = OTHER; note = 2'-fluoroguanosine-3'-phosphate
  modified_base 12: mod_base = OTHER; note = 2'-O-methyladenosine-3'-phosphate
  modified_base 13: mod_base = OTHER; note = 2'-O-methyladenosine-3'-phosphate
  modified_base 14: mod_base = OTHER; note = 2'-O-methyluridine-3'-phosphate
  modified_base 15: mod_base = OTHER; note = 2'-O-methylguanosine-3'-phosphate
  modified_base 16: mod_base = OTHER; note = 2'-O-methyluridine-3'-phosphate
  modified_base 17: mod_base = OTHER; note = 2'-O-methyladenosine-3'-phosphate
  modified_base 18: mod_base = OTHER; note = 2'-O-methyladenosine-3'-phosphate
  modified_base 19: mod_base = OTHER; note = 2'-O-methylguanosine-3'-phosphate
  modified_base 20: mod_base = OTHER; note = 2'-O-methyladenosine-3'-phosphate
  modified_base 21: mod_base = OTHER; note = 2'-O-methyluridine-3'-phosphate N-[tris(GalNAc-alkyl)-amidodecanoyl)]-4-hydroxyprolinol (Hyp-(GalNAc-alkyl)3)
ttagtgtcttgaatgtaagat

SEQ ID NO: 2296 - RNA, 21 nt, synthetic construct
  source 1..21: mol_type = other RNA
  modified_base 1: mod_base = OTHER; note = 2'-O-methyluridine-3'-phosphorothioate
  modified_base 2: mod_base = OTHER; note = 2'-O-methyladenosine-3'-phosphorothioate
  modified_base 3: mod_base = OTHER; note = 2'-O-methylguanosine-3'-phosphate
  modified_base 4: mod_base = OTHER; note = 2'-O-methyluridine-3'-phosphate
  modified_base 5: mod_base = OTHER; note = 2'-O-methylguanosine-3'-phosphate
  modified_base 6: mod_base = OTHER; note = 2'-O-methyluridine-3'-phosphate
  modified_base 7: mod_base = OTHER; note = 2'-O-methylcytidine-3'-phosphate
  modified_base 8: mod_base = OTHER; note = 2'-O-methyluridine-3'-phosphate
  modified_base 9: mod_base = OTHER; note = 2'-fluorouridine-3'-phosphate
  modified_base 10: mod_base = OTHER; note = 2'-fluoroguanosine-3'-phosphate
  modified_base 11: mod_base = OTHER; note = 2'-fluoroadenosine-3'-phosphate
  modified_base 12: mod_base = OTHER; note = 2'-O-methyladenosine-3'-phosphate
  modified_base 13: mod_base = OTHER; note = 2'-O-methyluridine-3'-phosphate
  modified_base 14: mod_base = OTHER; note = 2'-O-methylguanosine-3'-phosphate
  modified_base 15: mod_base = OTHER; note = 2'-O-methyluridine-3'-phosphate
  modified_base 16: mod_base = OTHER; note = 2'-O-methyladenosine-3'-phosphate
  modified_base 17: mod_base = OTHER; note = 2'-O-methyladenosine-3'-phosphate
  modified_base 18: mod_base = OTHER; note = 2'-O-methylguanosine-3'-phosphate
  modified_base 19: mod_base = OTHER; note = 2'-O-methyladenosine-3'-phosphate
  modified_base 20: mod_base = OTHER; note = 2'-O-methyladenosine-3'-phosphate
  modified_base 21: mod_base = OTHER; note = 2'-O-methyluridine-3'-phosphate N-[tris(GalNAc-alkyl)-amidodecanoyl)]-4-hydroxyprolinol (Hyp-(GalNAc-alkyl)3)
tagtgtcttgaatgtaagaat

SEQ ID NO: 2297 - RNA, 21 nt, synthetic construct
  source 1..21: mol_type = other RNA
  modified_base 1: mod_base = OTHER; note = 2'-O-methyladenosine-3'-phosphorothioate
  modified_base 2: mod_base = OTHER; note = 2'-O-methylguanosine-3'-phosphorothioate
  modified_base 3: mod_base = OTHER; note = 2'-O-methyluridine-3'-phosphate
  modified_base 4: mod_base = OTHER; note = 2'-O-methylguanosine-3'-phosphate
  modified_base 5: mod_base = OTHER; note = 2'-O-methyluridine-3'-phosphate
  modified_base 6: mod_base = OTHER; note = 2'-O-methylcytidine-3'-phosphate
  modified_base 7: mod_base = OTHER; note = 2'-O-methyluridine-3'-phosphate
  modified_base 8: mod_base = OTHER; note = 2'-O-methyluridine-3'-phosphate
  modified_base 9: mod_base = OTHER; note = 2'-fluoroguanosine-3'-phosphate
  modified_base 10: mod_base = OTHER; note = 2'-fluoroadenosine-3'-phosphate
  modified_base 11: mod_base = OTHER; note = 2'-fluoroadenosine-3'-phosphate
  modified_base 12: mod_base = OTHER; note = 2'-O-methyluridine-3'-phosphate
  modified_base 13: mod_base = OTHER; note = 2'-O-methylguanosine-3'-phosphate
  modified_base 14: mod_base = OTHER; note = 2'-O-methyluridine-3'-phosphate
  modified_base 15: mod_base = OTHER; note = 2'-O-methyladenosine-3'-phosphate
  modified_base 16: mod_base = OTHER; note = 2'-O-methyladenosine-3'-phosphate
  modified_base 17: mod_base = OTHER; note = 2'-O-methylguanosine-3'-phosphate
  modified_base 18: mod_base = OTHER; note = 2'-O-methyladenosine-3'-phosphate
  modified_base 19: mod_base = OTHER; note = 2'-O-methyladenosine-3'-phosphate
  modified_base 20: mod_base = OTHER; note = 2'-O-methylcytidine-3'-phosphate
  modified_base 21: mod_base = OTHER; note = 2'-O-methyluridine-3'-phosphate N-[tris(GalNAc-alkyl)-amidodecanoyl)]-4-hydroxyprolinol (Hyp-(GalNAc-alkyl)3)
agtgtcttgaatgtaagaact

SEQ ID NO: 2298 - RNA, 21 nt, synthetic construct
  source 1..21: mol_type = other RNA
  modified_base 1: mod_base = OTHER; note = 2'-O-methyluridine-3'-phosphorothioate
  modified_base 2: mod_base = OTHER; note = 2'-O-methylguanosine-3'-phosphorothioate
  modified_base 3: mod_base = OTHER; note = 2'-O-methyluridine-3'-phosphate
  modified_base 4: mod_base = OTHER; note = 2'-O-methylcytidine-3'-phosphate
  modified_base 5: mod_base = OTHER; note = 2'-O-methyluridine-3'-phosphate
  modified_base 6: mod_base = OTHER; note = 2'-O-methyluridine-3'-phosphate
  modified_base 7: mod_base = OTHER; note = 2'-O-methylguanosine-3'-phosphate
  modified_base 8: mod_base = OTHER; note = 2'-O-methyladenosine-3'-phosphate
  modified_base 9: mod_base = OTHER; note = 2'-fluoroadenosine-3'-phosphate
  modified_base 10: mod_base = OTHER; note = 2'-fluorouridine-3'-phosphate
  modified_base 11: mod_base = OTHER; note = 2'-fluoroguanosine-3'-phosphate
  modified_base 12: mod_base = OTHER; note = 2'-O-methyluridine-3'-phosphate
  modified_base 13: mod_base = OTHER; note = 2'-O-methyladenosine-3'-phosphate
  modified_base 14: mod_base = OTHER; note = 2'-O-methyladenosine-3'-phosphate
  modified_base 15: mod_base = OTHER; note = 2'-O-methylguanosine-3'-phosphate
  modified_base 16: mod_base = OTHER; note = 2'-O-methyladenosine-3'-phosphate
  modified_base 17: mod_base = OTHER; note = 2'-O-methyladenosine-3'-phosphate
  modified_base 18: mod_base = OTHER; note = 2'-O-methylcytidine-3'-phosphate
  modified_base 19: mod_base = OTHER; note = 2'-O-methyladenosine-3'-phosphate
  modified_base 20: mod_base = OTHER; note = 2'-O-methyluridine-3'-phosphate
  modified_base 21: mod_base = OTHER; note = 2'-O-methyluridine-3'-phosphate N-[tris(GalNAc-alkyl)-amidodecanoyl)]-4-hydroxyprolinol (Hyp-(GalNAc-alkyl)3)
tgtcttgaatgtaagaacatt

SEQ ID NO: 2299 - RNA, 21 nt, synthetic construct
  source 1..21: mol_type = other RNA
  modified_base 1: mod_base = OTHER; note = 2'-O-methylguanosine-3'-phosphorothioate
  modified_base 2: mod_base = OTHER; note = 2'-O-methyluridine-3'-phosphorothioate
  modified_base 3: mod_base = OTHER; note = 2'-O-methylcytidine-3'-phosphate
  modified_base 4: mod_base = OTHER; note = 2'-O-methyluridine-3'-phosphate
  modified_base 5: mod_base = OTHER; note = 2'-O-methyluridine-3'-phosphate
  modified_base 6: mod_base = OTHER; note = 2'-O-methylguanosine-3'-phosphate
  modified_base 7: mod_base = OTHER; note = 2'-O-methyladenosine-3'-phosphate
  modified_base 8: mod_base = OTHER; note = 2'-O-methyladenosine-3'-phosphate
  modified_base 9: mod_base = OTHER; note = 2'-fluorouridine-3'-phosphate
  modified_base 10: mod_base = OTHER; note = 2'-fluoroguanosine-3'-phosphate
  modified_base 11: mod_base = OTHER; note = 2'-fluorouridine-3'-phosphate
  modified_base 12: mod_base = OTHER; note = 2'-O-methyladenosine-3'-phosphate
  modified_base 13: mod_base = OTHER; note = 2'-O-methyladenosine-3'-phosphate
  modified_base 14: mod_base = OTHER; note = 2'-O-methylguanosine-3'-phosphate
  modified_base 15: mod_base = OTHER; note = 2'-O-methyladenosine-3'-phosphate
  modified_base 16: mod_base = OTHER; note = 2'-O-methyladenosine-3'-phosphate
  modified_base 17: mod_base = OTHER; note = 2'-O-methylcytidine-3'-phosphate
  modified_base 18: mod_base = OTHER; note = 2'-O-methyladenosine-3'-phosphate
  modified_base 19: mod_base = OTHER; note = 2'-O-methyluridine-3'-phosphate
  modified_base 20: mod_base = OTHER; note = 2'-O-methylguanosine-3'-phosphate
  modified_base 21: mod_base = OTHER; note = 2'-O-methyluridine-3'-phosphate N-[tris(GalNAc-alkyl)-amidodecanoyl)]-4-hydroxyprolinol (Hyp-(GalNAc-alkyl)3)
gtcttgaatgtaagaacatgt

SEQ ID NO: 2300 - RNA, 21 nt, synthetic construct
  source 1..21: mol_type = other RNA
  modified_base 1: mod_base = OTHER; note = 2'-O-methyluridine-3'-phosphorothioate
  modified_base 2: mod_base = OTHER; note = 2'-O-methyluridine-3'-phosphorothioate
  modified_base 3: mod_base = OTHER; note = 2'-O-methylguanosine-3'-phosphate
  modified_base 4: mod_base = OTHER; note = 2'-O-methyladenosine-3'-phosphate
  modified_base 5: mod_base = OTHER; note = 2'-O-methyladenosine-3'-phosphate
  modified_base 6: mod_base = OTHER; note = 2'-O-methyluridine-3'-phosphate
  modified_base 7: mod_base = OTHER; note = 2'-O-methylguanosine-3'-phosphate
  modified_base 8: mod_base = OTHER; note = 2'-O-methyluridine-3'-phosphate
  modified_base 9: mod_base = OTHER; note = 2'-fluoroadenosine-3'-phosphate
  modified_base 10: mod_base = OTHER; note = 2'-fluoroadenosine-3'-phosphate
  modified_base 11: mod_base = OTHER; note = 2'-fluoroguanosine-3'-phosphate
  modified_base 12: mod_base = OTHER; note = 2'-O-methyladenosine-3'-phosphate
  modified_base 13: mod_base = OTHER; note = 2'-O-methyladenosine-3'-phosphate
  modified_base 14: mod_base = OTHER; note = 2'-O-methylcytidine-3'-phosphate
  modified_base 15: mod_base = OTHER; note = 2'-O-methyladenosine-3'-phosphate
  modified_base 16: mod_base = OTHER; note = 2'-O-methyluridine-3'-phosphate
  modified_base 17: mod_base = OTHER; note = 2'-O-methylguanosine-3'-phosphate
  modified_base 18: mod_base = OTHER; note = 2'-O-methyladenosine-3'-phosphate
  modified_base 19: mod_base = OTHER; note = 2'-O-methylcytidine-3'-phosphate
  modified_base 20: mod_base = OTHER; note = 2'-O-methylcytidine-3'-phosphate
  modified_base 21: mod_base = OTHER; note = 2'-O-methyluridine-3'-phosphate N-[tris(GalNAc-alkyl)-amidodecanoyl)]-4-hydroxyprolinol (Hyp-(GalNAc-alkyl)3)
ttgaatgtaagaacatgacct

SEQ ID NO: 2301 - RNA, 21 nt, synthetic construct
  source 1..21: mol_type = other RNA
  modified_base 1: mod_base = OTHER; note = 2'-O-methylguanosine-3'-phosphorothioate
  modified_base 2: mod_base = OTHER; note = 2'-O-methyluridine-3'-phosphorothioate
  modified_base 3: mod_base = OTHER; note = 2'-O-methyladenosine-3'-phosphate
  modified_base 4: mod_base = OTHER; note = 2'-O-methyladenosine-3'-phosphate
  modified_base 5: mod_base = OTHER; note = 2'-O-methylguanosine-3'-phosphate
  modified_base 6: mod_base = OTHER; note = 2'-O-methyladenosine-3'-phosphate
  modified_base 7: mod_base = OTHER; note = 2'-O-methyladenosine-3'-phosphate
  modified_base 8: mod_base = OTHER; note = 2'-O-methylcytidine-3'-phosphate
  modified_base 9: mod_base = OTHER; note = 2'-fluoroadenosine-3'-phosphate
  modified_base 10: mod_base = OTHER; note = 2'-fluorouridine-3'-phosphate
  modified_base 11: mod_base = OTHER; note = 2'-fluoroguanosine-3'-phosphate
  modified_base 12: mod_base = OTHER; note = 2'-O-methyladenosine-3'-phosphate
  modified_base 13: mod_base = OTHER; note = 2'-O-methylcytidine-3'-phosphate
  modified_base 14: mod_base = OTHER; note = 2'-O-methylcytidine-3'-phosphate
  modified_base 15: mod_base = OTHER; note = 2'-O-methyluridine-3'-phosphate
  modified_base 16: mod_base = OTHER; note = 2'-O-methylcytidine-3'-phosphate
  modified_base 17: mod_base = OTHER; note = 2'-O-methylcytidine-3'-phosphate
  modified_base 18: mod_base = OTHER; note = 2'-O-methylguanosine-3'-phosphate
  modified_base 19: mod_base = OTHER; note = 2'-O-methyluridine-3'-phosphate
  modified_base 20: mod_base = OTHER; note = 2'-O-methylguanosine-3'-phosphate
  modified_base 21: mod_base = OTHER; note = 2'-O-methyluridine-3'-phosphate N-[tris(GalNAc-alkyl)-amidodecanoyl)]-4-hydroxyprolinol (Hyp-(GalNAc-alkyl)3)
gtaagaacatgacctccgtgt

SEQ ID NO: 2302 - RNA, 21 nt, synthetic construct
  source 1..21: mol_type = other RNA
  modified_base 1: mod_base = OTHER; note = 2'-O-methyluridine-3'-phosphorothioate
  modified_base 2: mod_base = OTHER; note = 2'-O-methyladenosine-3'-phosphorothioate
  modified_base 3: mod_base = OTHER; note = 2'-O-methyladenosine-3'-phosphate
  modified_base 4: mod_base = OTHER; note = 2'-O-methylguanosine-3'-phosphate
  modified_base 5: mod_base = OTHER; note = 2'-O-methyladenosine-3'-phosphate
  modified_base 6: mod_base = OTHER; note = 2'-O-methyladenosine-3'-phosphate
  modified_base 7: mod_base = OTHER; note = 2'-O-methylcytidine-3'-phosphate
  modified_base 8: mod_base = OTHER; note = 2'-O-methyladenosine-3'-phosphate
  modified_base 9: mod_base = OTHER; note = 2'-fluorouridine-3'-phosphate
  modified_base 10: mod_base = OTHER; note = 2'-fluoroguanosine-3'-phosphate
  modified_base 11: mod_base = OTHER; note = 2'-fluoroadenosine-3'-phosphate
  modified_base 12: mod_base = OTHER; note = 2'-O-methylcytidine-3'-phosphate
  modified_base 13: mod_base = OTHER; note = 2'-O-methylcytidine-3'-phosphate
  modified_base 14: mod_base = OTHER; note = 2'-O-methyluridine-3'-phosphate
  modified_base 15: mod_base = OTHER; note = 2'-O-methylcytidine-3'-phosphate
  modified_base 16: mod_base = OTHER; note = 2'-O-methylcytidine-3'-phosphate
  modified_base 17: mod_base = OTHER; note = 2'-O-methylguanosine-3'-phosphate
  modified_base 18: mod_base = OTHER; note = 2'-O-methyluridine-3'-phosphate
  modified_base 19: mod_base = OTHER; note = 2'-O-methylguanosine-3'-phosphate
  modified_base 20: mod_base = OTHER; note = 2'-O-methyluridine-3'-phosphate
  modified_base 21: mod_base = OTHER; note = 2'-O-methyluridine-3'-phosphate N-[tris(GalNAc-alkyl)-amidodecanoyl)]-4-hydroxyprolinol (Hyp-(GalNAc-alkyl)3)
taagaacatgacctccgtgtt

SEQ ID NO: 2303 - RNA, 21 nt, synthetic construct
  source 1..21: mol_type = other RNA
  modified_base 1: mod_base = OTHER; note = 2'-O-methyladenosine-3'-phosphorothioate
  modified_base 2: mod_base = OTHER; note = 2'-O-methyladenosine-3'-phosphorothioate
  modified_base 3: mod_base = OTHER; note = 2'-O-methylguanosine-3'-phosphate
  modified_base 4: mod_base = OTHER; note = 2'-O-methyladenosine-3'-phosphate
  modified_base 5: mod_base = OTHER; note = 2'-O-methyladenosine-3'-phosphate
  modified_base 6: mod_base = OTHER; note = 2'-O-methylcytidine-3'-phosphate
  modified_base 7: mod_base = OTHER; note = 2'-O-methyladenosine-3'-phosphate
  modified_base 8: mod_base = OTHER; note = 2'-O-methyluridine-3'-phosphate
  modified_base 9: mod_base = OTHER; note = 2'-fluoroguanosine-3'-phosphate
  modified_base 10: mod_base = OTHER; note = 2'-fluoroadenosine-3'-phosphate
  modified_base 11: mod_base = OTHER; note = 2'-fluorocytidine-3'-phosphate
  modified_base 12: mod_base = OTHER; note = 2'-O-methylcytidine-3'-phosphate
  modified_base 13: mod_base = OTHER; note = 2'-O-methyluridine-3'-phosphate
  modified_base 14: mod_base = OTHER; note = 2'-O-methylcytidine-3'-phosphate
  modified_base 15: mod_base = OTHER; note = 2'-O-methylcytidine-3'-phosphate
  modified_base 16: mod_base = OTHER; note = 2'-O-methylguanosine-3'-phosphate
  modified_base 17: mod_base = OTHER; note = 2'-O-methyluridine-3'-phosphate
  modified_base 18: mod_base = OTHER; note = 2'-O-methylguanosine-3'-phosphate
  modified_base 19: mod_base = OTHER; note = 2'-O-methyluridine-3'-phosphate
  modified_base 20: mod_base = OTHER; note = 2'-O-methyladenosine-3'-phosphate
  modified_base 21: mod_base = OTHER; note = 2'-O-methyluridine-3'-phosphate N-[tris(GalNAc-alkyl)-amidodecanoyl)]-4-hydroxyprolinol (Hyp-(GalNAc-alkyl)3)
aagaacatgacctccgtgtat

SEQ ID NO: 2304 - RNA, 21 nt, synthetic construct
  source 1..21: mol_type = other RNA
  modified_base 1: mod_base = OTHER; note = 2'-O-methyladenosine-3'-phosphorothioate
  modified_base 2: mod_base = OTHER; note = 2'-O-methylguanosine-3'-phosphorothioate
  modified_base 3: mod_base = OTHER; note = 2'-O-methyladenosine-3'-phosphate
  modified_base 4: mod_base = OTHER; note = 2'-O-methyladenosine-3'-phosphate
  modified_base 5: mod_base = OTHER; note = 2'-O-methylcytidine-3'-phosphate
  modified_base 6: mod_base = OTHER; note = 2'-O-methyladenosine-3'-phosphate
  modified_base 7: mod_base = OTHER; note = 2'-O-methyluridine-3'-phosphate
  modified_base 8: mod_base = OTHER; note = 2'-O-methylguanosine-3'-phosphate
  modified_base 9: mod_base = OTHER; note = 2'-fluoroadenosine-3'-phosphate
  modified_base 10: mod_base = OTHER; note = 2'-fluorocytidine-3'-phosphate
  modified_base 11: mod_base = OTHER; note = 2'-fluorocytidine-3'-phosphate
  modified_base 12: mod_base = OTHER; note = 2'-O-methyluridine-3'-phosphate
  modified_base 13: mod_base = OTHER; note = 2'-O-methylcytidine-3'-phosphate
  modified_base 14: mod_base = OTHER; note = 2'-O-methylcytidine-3'-phosphate
  modified_base 15: mod_base = OTHER; note = 2'-O-methylguanosine-3'-phosphate
  modified_base 16: mod_base = OTHER; note = 2'-O-methyluridine-3'-phosphate
  modified_base 17: mod_base = OTHER; note = 2'-O-methylguanosine-3'-phosphate
  modified_base 18: mod_base = OTHER; note = 2'-O-methyluridine-3'-phosphate
  modified_base 19: mod_base = OTHER; note = 2'-O-methyladenosine-3'-phosphate
  modified_base 20: mod_base = OTHER; note = 2'-O-methylguanosine-3'-phosphate
  modified_base 21: mod_base = OTHER; note = 2'-O-methyluridine-3'-phosphate N-[tris(GalNAc-alkyl)-amidodecanoyl)]-4-hydroxyprolinol (Hyp-(GalNAc-alkyl)3)
agaacatgacctccgtgtagt

SEQ ID NO: 2305 - RNA, 21 nt, synthetic construct
  source 1..21: mol_type = other RNA
  modified_base 1: mod_base = OTHER; note = 2'-O-methylguanosine-3'-phosphorothioate
  modified_base 2: mod_base = OTHER; note = 2'-O-methyladenosine-3'-phosphorothioate
  modified_base 3: mod_base = OTHER; note = 2'-O-methyladenosine-3'-phosphate
  modified_base 4: mod_base = OTHER; note = 2'-O-methylcytidine-3'-phosphate
  modified_base 5: mod_base = OTHER; note = 2'-O-methyladenosine-3'-phosphate
  modified_base 6: mod_base = OTHER; note = 2'-O-methyluridine-3'-phosphate
  modified_base 7: mod_base = OTHER; note = 2'-O-methylguanosine-3'-phosphate
  modified_base 8: mod_base = OTHER; note = 2'-O-methyladenosine-3'-phosphate
  modified_base 9: mod_base = OTHER; note = 2'-fluorocytidine-3'-phosphate
  modified_base 10: mod_base = OTHER; note = 2'-fluorocytidine-3'-phosphate
  modified_base 11: mod_base = OTHER; note = 2'-fluorouridine-3'-phosphate
  modified_base 12: mod_base = OTHER; note = 2'-O-methylcytidine-3'-phosphate
  modified_base 13: mod_base = OTHER; note = 2'-O-methylcytidine-3'-phosphate
  modified_base 14: mod_base = OTHER; note = 2'-O-methylguanosine-3'-phosphate
  modified_base 15: mod_base = OTHER; note = 2'-O-methyluridine-3'-phosphate
  modified_base 16: mod_base = OTHER; note = 2'-O-methylguanosine-3'-phosphate
  modified_base 17: mod_base = OTHER; note = 2'-O-methyluridine-3'-phosphate
  modified_base 18: mod_base = OTHER; note = 2'-O-methyladenosine-3'-phosphate
  modified_base 19: mod_base = OTHER; note = 2'-O-methylguanosine-3'-phosphate
  modified_base 20: mod_base = OTHER; note = 2'-O-methyluridine-3'-phosphate
  modified_base 21: mod_base = OTHER; note = 2'-O-methyluridine-3'-phosphate N-[tris(GalNAc-alkyl)-amidodecanoyl)]-4-hydroxyprolinol (Hyp-(GalNAc-alkyl)3)
gaacatgacctccgtgtagtt

SEQ ID NO: 2306 - RNA, 21 nt, synthetic construct
  source 1..21: mol_type = other RNA
  modified_base 1: mod_base = OTHER; note = 2'-O-methyladenosine-3'-phosphorothioate
  modified_base 2: mod_base = OTHER; note = 2'-O-methyladenosine-3'-phosphorothioate
  modified_base 3: mod_base = OTHER; note = 2'-O-methylcytidine-3'-phosphate
  modified_base 4: mod_base = OTHER; note = 2'-O-methyladenosine-3'-phosphate
  modified_base 5: mod_base = OTHER; note = 2'-O-methyluridine-3'-phosphate
  modified_base 6: mod_base = OTHER; note = 2'-O-methylguanosine-3'-phosphate
  modified_base 7: mod_base = OTHER; note = 2'-O-methyladenosine-3'-phosphate
  modified_base 8: mod_base = OTHER; note = 2'-O-methylcytidine-3'-phosphate
  modified_base 9: mod_base = OTHER; note = 2'-fluorocytidine-3'-phosphate
  modified_base 10: mod_base = OTHER; note = 2'-fluorouridine-3'-phosphate
  modified_base 11: mod_base = OTHER; note = 2'-fluorocytidine-3'-phosphate
  modified_base 12: mod_base = OTHER; note = 2'-O-methylcytidine-3'-phosphate
  modified_base 13: mod_base = OTHER; note = 2'-O-methylguanosine-3'-phosphate
  modified_base 14: mod_base = OTHER; note = 2'-O-methyluridine-3'-phosphate
  modified_base 15: mod_base = OTHER; note = 2'-O-methylguanosine-3'-phosphate
  modified_base 16: mod_base = OTHER; note = 2'-O-methyluridine-3'-phosphate
  modified_base 17: mod_base = OTHER; note = 2'-O-methyladenosine-3'-phosphate
  modified_base 18: mod_base = OTHER; note = 2'-O-methylguanosine-3'-phosphate
  modified_base 19: mod_base = OTHER; note = 2'-O-methyluridine-3'-phosphate
  modified_base 20: mod_base = OTHER; note = 2'-O-methylguanosine-3'-phosphate
  modified_base 21: mod_base = OTHER; note = 2'-O-methyluridine-3'-phosphate N-[tris(GalNAc-alkyl)-amidodecanoyl)]-4-hydroxyprolinol (Hyp-(GalNAc-alkyl)3)
aacatgacctccgtgtagtgt

SEQ ID NO: 2307 - RNA, 21 nt, synthetic construct
  source 1..21: mol_type = other RNA
  modified_base 1: mod_base = OTHER; note = 2'-O-methyladenosine-3'-phosphorothioate
  modified_base 2: mod_base = OTHER; note = 2'-O-methylcytidine-3'-phosphorothioate
  modified_base 3: mod_base = OTHER; note = 2'-O-methyladenosine-3'-phosphate
  modified_base 4: mod_base = OTHER; note = 2'-O-methyluridine-3'-phosphate
  modified_base 5: mod_base = OTHER; note = 2'-O-methylguanosine-3'-phosphate
  modified_base 6: mod_base = OTHER; note = 2'-O-methyladenosine-3'-phosphate
  modified_base 7: mod_base = OTHER; note = 2'-O-methylcytidine-3'-phosphate
  modified_base 8: mod_base = OTHER; note = 2'-O-methylcytidine-3'-phosphate
  modified_base 9: mod_base = OTHER; note = 2'-fluorouridine-3'-phosphate
  modified_base 10: mod_base = OTHER; note = 2'-fluorocytidine-3'-phosphate
  modified_base 11: mod_base = OTHER; note = 2'-fluorocytidine-3'-phosphate
  modified_base 12: mod_base = OTHER; note = 2'-O-methylguanosine-3'-phosphate
  modified_base 13: mod_base = OTHER; note = 2'-O-methyluridine-3'-phosphate
  modified_base 14: mod_base = OTHER; note = 2'-O-methylguanosine-3'-phosphate
  modified_base 15: mod_base = OTHER; note = 2'-O-methyluridine-3'-phosphate
  modified_base 16: mod_base = OTHER; note = 2'-O-methyladenosine-3'-phosphate
  modified_base 17: mod_base = OTHER; note = 2'-O-methylguanosine-3'-phosphate
  modified_base 18: mod_base = OTHER; note = 2'-O-methyluridine-3'-phosphate
  modified_base 19: mod_base = OTHER; note = 2'-O-methylguanosine-3'-phosphate
  modified_base 20: mod_base = OTHER; note = 2'-O-methyluridine-3'-phosphate
  modified_base 21: mod_base = OTHER; note = 2'-O-methyluridine-3'-phosphate N-[tris(GalNAc-alkyl)-amidodecanoyl)]-4-hydroxyprolinol (Hyp-(GalNAc-alkyl)3)
acatgacctccgtgtagtgtt

SEQ ID NO: 2308 - RNA, 21 nt, synthetic construct
  source 1..21: mol_type = other RNA
  modified_base 1: mod_base = OTHER; note = 2'-O-methylcytidine-3'-phosphorothioate
  modified_base 2: mod_base = OTHER; note = 2'-O-methyladenosine-3'-phosphorothioate
  modified_base 3: mod_base = OTHER; note = 2'-O-methyluridine-3'-phosphate
  modified_base 4: mod_base = OTHER; note = 2'-O-methylguanosine-3'-phosphate
  modified_base 5: mod_base = OTHER; note = 2'-O-methyladenosine-3'-phosphate
  modified_base 6: mod_base = OTHER; note = 2'-O-methylcytidine-3'-phosphate
  modified_base 7: mod_base = OTHER; note = 2'-O-methylcytidine-3'-phosphate
  modified_base 8: mod_base = OTHER; note = 2'-O-methyluridine-3'-phosphate
  modified_base 9: mod_base = OTHER; note = 2'-fluorocytidine-3'-phosphate
  modified_base 10: mod_base = OTHER; note = 2'-fluorocytidine-3'-phosphate
  modified_base 11: mod_base = OTHER; note = 2'-fluoroguanosine-3'-phosphate
  modified_base 12: mod_base = OTHER; note = 2'-O-methyluridine-3'-phosphate
  modified_base 13: mod_base = OTHER; note = 2'-O-methylguanosine-3'-phosphate
  modified_base 14: mod_base = OTHER; note = 2'-O-methyluridine-3'-phosphate
  modified_base 15: mod_base = OTHER; note = 2'-O-methyladenosine-3'-phosphate
  modified_base 16: mod_base = OTHER; note = 2'-O-methylguanosine-3'-phosphate
  modified_base 17: mod_base = OTHER; note = 2'-O-methyluridine-3'-phosphate
  modified_base 18: mod_base = OTHER; note = 2'-O-methylguanosine-3'-phosphate
  modified_base 19: mod_base = OTHER; note = 2'-O-methyluridine-3'-phosphate
  modified_base 20: mod_base = OTHER; note = 2'-O-methylcytidine-3'-phosphate
  modified_base 21: mod_base = OTHER; note = 2'-O-methyluridine-3'-phosphate N-[tris(GalNAc-alkyl)-amidodecanoyl)]-4-hydroxyprolinol (Hyp-(GalNAc-alkyl)3)
catgacctccgtgtagtgtct

SEQ ID NO: 2309 - RNA, 21 nt, synthetic construct
  source 1..21: mol_type = other RNA
  modified_base 1: mod_base = OTHER; note = 2'-O-methyladenosine-3'-phosphorothioate
  modified_base 2: mod_base = OTHER; note = 2'-O-methyluridine-3'-phosphorothioate
  modified_base 3: mod_base = OTHER; note = 2'-O-methylguanosine-3'-phosphate
  modified_base 4: mod_base = OTHER; note = 2'-O-methyladenosine-3'-phosphate
  modified_base 5: mod_base = OTHER; note = 2'-O-methylcytidine-3'-phosphate
  modified_base 6: mod_base = OTHER; note = 2'-O-methylcytidine-3'-phosphate
  modified_base 7: mod_base = OTHER; note = 2'-O-methyluridine-3'-phosphate
  modified_base 8: mod_base = OTHER; note = 2'-O-methylcytidine-3'-phosphate
  modified_base 9: mod_base = OTHER; note = 2'-fluorocytidine-3'-phosphate
  modified_base 10: mod_base = OTHER; note = 2'-fluoroguanosine-3'-phosphate
  modified_base 11: mod_base = OTHER; note = 2'-fluorouridine-3'-phosphate
  modified_base 12: mod_base = OTHER; note = 2'-O-methylguanosine-3'-phosphate
  modified_base 13: mod_base = OTHER; note = 2'-O-methyluridine-3'-phosphate
  modified_base 14: mod_base = OTHER; note = 2'-O-methyladenosine-3'-phosphate
  modified_base 15: mod_base = OTHER; note = 2'-O-methylguanosine-3'-phosphate
  modified_base 16: mod_base = OTHER; note = 2'-O-methyluridine-3'-phosphate
  modified_base 17: mod_base = OTHER; note = 2'-O-methylguanosine-3'-phosphate
  modified_base 18: mod_base = OTHER; note = 2'-O-methyluridine-3'-phosphate
  modified_base 19: mod_base = OTHER; note = 2'-O-methylcytidine-3'-phosphate
  modified_base 20: mod_base = OTHER; note = 2'-O-methyluridine-3'-phosphate
  modified_base 21: mod_base = OTHER; note = 2'-O-methyluridine-3'-phosphate N-[tris(GalNAc-alkyl)-amidodecanoyl)]-4-hydroxyprolinol (Hyp-(GalNAc-alkyl)3)
atgacctccgtgtagtgtctt

SEQ ID NO: 2310 - RNA, 21 nt, synthetic construct
  source 1..21: mol_type = other RNA
  modified_base 1: mod_base = OTHER; note = 2'-O-methylcytidine-3'-phosphorothioate
  modified_base 2: mod_base = OTHER; note = 2'-O-methyluridine-3'-phosphorothioate
  modified_base 3: mod_base = OTHER; note = 2'-O-methyluridine-3'-phosphate
  modified_base 4: mod_base = OTHER; note = 2'-O-methyladenosine-3'-phosphate
  modified_base 5: mod_base = OTHER; note = 2'-O-methylguanosine-3'-phosphate
  modified_base 6: mod_base = OTHER; note = 2'-O-methyluridine-3'-phosphate
  modified_base 7: mod_base = OTHER; note = 2'-O-methyluridine-3'-phosphate
  modified_base 8: mod_base = OTHER; note = 2'-O-methyluridine-3'-phosphate
  modified_base 9: mod_base = OTHER; note = 2'-fluorouridine-3'-phosphate
  modified_base 10: mod_base = OTHER; note = 2'-fluorouridine-3'-phosphate
  modified_base 11: mod_base = OTHER; note = 2'-fluorouridine-3'-phosphate
  modified_base 12: mod_base = OTHER; note = 2'-O-methylcytidine-3'-phosphate
  modified_base 13: mod_base = OTHER; note = 2'-O-methylcytidine-3'-phosphate
  modified_base 14: mod_base = OTHER; note = 2'-O-methyladenosine-3'-phosphate
  modified_base 15: mod_base = OTHER; note = 2'-O-methylcytidine-3'-phosphate
  modified_base 16: mod_base = OTHER; note = 2'-O-methyladenosine-3'-phosphate
  modified_base 17: mod_base = OTHER; note = 2'-O-methylguanosine-3'-phosphate
  modified_base 18: mod_base = OTHER; note = 2'-O-methyladenosine-3'-phosphate
  modified_base 19: mod_base = OTHER; note = 2'-O-methyluridine-3'-phosphate
  modified_base 20: mod_base = OTHER; note = 2'-O-methylguanosine-3'-phosphate
  modified_base 21: mod_base = OTHER; note = 2'-O-methyluridine-3'-phosphate N-[tris(GalNAc-alkyl)-amidodecanoyl)]-4-hydroxyprolinol (Hyp-(GalNAc-alkyl)3)
cttagttttttccacagatgt

SEQ ID NO: 2311 - RNA, 21 nt, synthetic construct
  source 1..21: mol_type = other RNA
  modified_base 1: mod_base = OTHER; note = 2'-O-methyluridine-3'-phosphorothioate
  modified_base 2: mod_base = OTHER; note = 2'-O-methyluridine-3'-phosphorothioate
  modified_base 3: mod_base = OTHER; note = 2'-O-methyladenosine-3'-phosphate
  modified_base 4: mod_base = OTHER; note = 2'-O-methylguanosine-3'-phosphate
  modified_base 5: mod_base = OTHER; note = 2'-O-methyluridine-3'-phosphate
  modified_base 6: mod_base = OTHER; note = 2'-O-methyluridine-3'-phosphate
  modified_base 7: mod_base = OTHER; note = 2'-O-methyluridine-3'-phosphate
  modified_base 8: mod_base = OTHER; note = 2'-O-methyluridine-3'-phosphate
  modified_base 9: mod_base = OTHER; note = 2'-fluorouridine-3'-phosphate
  modified_base 10: mod_base = OTHER; note = 2'-fluorouridine-3'-phosphate
  modified_base 11: mod_base = OTHER; note = 2'-fluorocytidine-3'-phosphate
  modified_base 12: mod_base = OTHER; note = 2'-O-methylcytidine-3'-phosphate
  modified_base 13: mod_base = OTHER; note = 2'-O-methyladenosine-3'-phosphate
  modified_base 14: mod_base = OTHER; note = 2'-O-methylcytidine-3'-phosphate
  modified_base 15: mod_base = OTHER; note = 2'-O-methyladenosine-3'-phosphate
  modified_base 16: mod_base = OTHER; note = 2'-O-methylguanosine-3'-phosphate
  modified_base 17: mod_base = OTHER; note = 2'-O-methyladenosine-3'-phosphate
  modified_base 18: mod_base = OTHER; note = 2'-O-methyluridine-3'-phosphate
  modified_base 19: mod_base = OTHER; note = 2'-O-methylguanosine-3'-phosphate
  modified_base 20: mod_base = OTHER; note = 2'-O-methylcytidine-3'-phosphate
  modified_base 21: mod_base = OTHER; note = 2'-O-methyluridine-3'-phosphate N-[tris(GalNAc-alkyl)-amidodecanoyl)]-4-hydroxyprolinol (Hyp-(GalNAc-alkyl)3)
ttagttttttccacagatgct

SEQ ID NO: 2312 - RNA, 21 nt, synthetic construct
  source 1..21: mol_type = other RNA
  modified_base 1: mod_base = OTHER; note = 2'-O-methyluridine-3'-phosphorothioate
  modified_base 2: mod_base = OTHER; note = 2'-O-methyladenosine-3'-phosphorothioate
  modified_base 3: mod_base = OTHER; note = 2'-O-methylguanosine-3'-phosphate
  modified_base 4: mod_base = OTHER; note = 2'-O-methyluridine-3'-phosphate
  modified_base 5: mod_base = OTHER; note = 2'-O-methyluridine-3'-phosphate
  modified_base 6: mod_base = OTHER; note = 2'-O-methyluridine-3'-phosphate
  modified_base 7: mod_base = OTHER; note = 2'-O-methyluridine-3'-phosphate
  modified_base 8: mod_base = OTHER; note = 2'-O-methyluridine-3'-phosphate
  modified_base 9: mod_base = OTHER; note = 2'-fluorouridine-3'-phosphate
  modified_base 10: mod_base = OTHER; note = 2'-fluorocytidine-3'-phosphate
  modified_base 11: mod_base = OTHER; note = 2'-fluorocytidine-3'-phosphate
  modified_base 12: mod_base = OTHER; note = 2'-O-methyladenosine-3'-phosphate
  modified_base 13: mod_base = OTHER; note = 2'-O-methylcytidine-3'-phosphate
  modified_base 14: mod_base = OTHER; note = 2'-O-methyladenosine-3'-phosphate
  modified_base 15: mod_base = OTHER; note = 2'-O-methylguanosine-3'-phosphate
  modified_base 16: mod_base = OTHER; note = 2'-O-methyladenosine-3'-phosphate
  modified_base 17: mod_base = OTHER; note = 2'-O-methyluridine-3'-phosphate
  modified_base 18: mod_base = OTHER; note = 2'-O-methylguanosine-3'-phosphate
  modified_base 19: mod_base = OTHER; note = 2'-O-methylcytidine-3'-phosphate
  modified_base 20: mod_base = OTHER; note = 2'-O-methyluridine-3'-phosphate
  modified_base 21: mod_base = OTHER; note = 2'-O-methyluridine-3'-phosphate N-[tris(GalNAc-alkyl)-amidodecanoyl)]-4-hydroxyprolinol (Hyp-(GalNAc-alkyl)3)
tagttttttccacagatgctt

SEQ ID NO: 2313 - RNA, 21 nt, synthetic construct
  source 1..21: mol_type = other RNA
  modified_base 1: mod_base = OTHER; note = 2'-O-methyladenosine-3'-phosphorothioate
  modified_base 2: mod_base = OTHER; note = 2'-O-methylguanosine-3'-phosphorothioate
  modified_base 3: mod_base = OTHER; note = 2'-O-methyluridine-3'-phosphate
  modified_base 4: mod_base = OTHER; note = 2'-O-methyluridine-3'-phosphate
  modified_base 5: mod_base = OTHER; note = 2'-O-methyluridine-3'-phosphate
  modified_base 6: mod_base = OTHER; note = 2'-O-methyluridine-3'-phosphate
  modified_base 7: mod_base = OTHER; note = 2'-O-methyluridine-3'-phosphate
  modified_base 8: mod_base = OTHER; note = 2'-O-methyluridine-3'-phosphate
  modified_base 9: mod_base = OTHER; note = 2'-fluorocytidine-3'-phosphate
  modified_base 10: mod_base = OTHER; note = 2'-fluorocytidine-3'-phosphate
  modified_base 11: mod_base = OTHER; note = 2'-fluoroadenosine-3'-phosphate
  modified_base 12: mod_base = OTHER; note = 2'-O-methylcytidine-3'-phosphate
  modified_base 13: mod_base = OTHER; note = 2'-O-methyladenosine-3'-phosphate
  modified_base 14: mod_base = OTHER; note = 2'-O-methylguanosine-3'-phosphate
  modified_base 15: mod_base = OTHER; note = 2'-O-methyladenosine-3'-phosphate
  modified_base 16: mod_base = OTHER; note = 2'-O-methyluridine-3'-phosphate
  modified_base 17: mod_base = OTHER; note = 2'-O-methylguanosine-3'-phosphate
  modified_base 18: mod_base = OTHER; note = 2'-O-methylcytidine-3'-phosphate
  modified_base 19: mod_base = OTHER; note = 2'-O-methyluridine-3'-phosphate
  modified_base 20: mod_base = OTHER; note = 2'-O-methyluridine-3'-phosphate
  modified_base 21: mod_base = OTHER; note = 2'-O-methyluridine-3'-phosphate N-[tris(GalNAc-alkyl)-amidodecanoyl)]-4-hydroxyprolinol (Hyp-(GalNAc-alkyl)3)
agttttttccacagatgcttt

SEQ ID NO: 2314 - RNA, 21 nt, synthetic construct
  source 1..21: mol_type = other RNA
  modified_base 1: mod_base = OTHER; note = 2'-O-methylguanosine-3'-phosphorothioate
  modified_base 2: mod_base = OTHER; note = 2'-O-methyluridine-3'-phosphorothioate
  modified_base 3: mod_base = OTHER; note = 2'-O-methyluridine-3'-phosphate
  modified_base 4: mod_base = OTHER; note = 2'-O-methyluridine-3'-phosphate
  modified_base 5: mod_base = OTHER; note = 2'-O-methyluridine-3'-phosphate
  modified_base 6: mod_base = OTHER; note = 2'-O-methyluridine-3'-phosphate
  modified_base 7: mod_base = OTHER; note = 2'-O-methyluridine-3'-phosphate
  modified_base 8: mod_base = OTHER; note = 2'-O-methylcytidine-3'-phosphate
  modified_base 9: mod_base = OTHER; note = 2'-fluorocytidine-3'-phosphate
  modified_base 10: mod_base = OTHER; note = 2'-fluoroadenosine-3'-phosphate
  modified_base 11: mod_base = OTHER; note = 2'-fluorocytidine-3'-phosphate
  modified_base 12: mod_base = OTHER; note = 2'-O-methyladenosine-3'-phosphate
  modified_base 13: mod_base = OTHER; note = 2'-O-methylguanosine-3'-phosphate
  modified_base 14: mod_base = OTHER; note = 2'-O-methyladenosine-3'-phosphate
  modified_base 15: mod_base = OTHER; note = 2'-O-methyluridine-3'-phosphate
  modified_base 16: mod_base = OTHER; note = 2'-O-methylguanosine-3'-phosphate
  modified_base 17: mod_base = OTHER; note = 2'-O-methylcytidine-3'-phosphate
  modified_base 18: mod_base = OTHER; note = 2'-O-methyluridine-3'-phosphate
  modified_base 19: mod_base = OTHER; note = 2'-O-methyluridine-3'-phosphate
  modified_base 20: mod_base = OTHER; note = 2'-O-methylguanosine-3'-phosphate
  modified_base 21: mod_base = OTHER; note = 2'-O-methyluridine-3'-phosphate N-[tris(GalNAc-alkyl)-amidodecanoyl)]-4-hydroxyprolinol (Hyp-(GalNAc-alkyl)3)
gttttttccacagatgcttgt

SEQ ID NO: 2315 - RNA, 21 nt, synthetic construct
  source 1..21: mol_type = other RNA
  modified_base 1: mod_base = OTHER; note = 2'-O-methyluridine-3'-phosphorothioate
  modified_base 2: mod_base = OTHER; note = 2'-O-methyluridine-3'-phosphorothioate
  modified_base 3: mod_base = OTHER; note = 2'-O-methyluridine-3'-phosphate
  modified_base 4: mod_base = OTHER; note = 2'-O-methyluridine-3'-phosphate
  modified_base 5: mod_base = OTHER; note = 2'-O-methyluridine-3'-phosphate
  modified_base 6: mod_base = OTHER; note = 2'-O-methylcytidine-3'-phosphate
  modified_base 7: mod_base = OTHER; note = 2'-O-methylcytidine-3'-phosphate
  modified_base 8: mod_base = OTHER; note = 2'-O-methyladenosine-3'-phosphate
  modified_base 9: mod_base = OTHER; note = 2'-fluorocytidine-3'-phosphate
  modified_base 10: mod_base = OTHER; note = 2'-fluoroadenosine-3'-phosphate
  modified_base 11: mod_base = OTHER; note = 2'-fluoroguanosine-3'-phosphate
  modified_base 12: mod_base = OTHER; note = 2'-O-methyladenosine-3'-phosphate
  modified_base 13: mod_base = OTHER; note = 2'-O-methyluridine-3'-phosphate
  modified_base 14: mod_base = OTHER; note = 2'-O-methylguanosine-3'-phosphate
  modified_base 15: mod_base = OTHER; note = 2'-O-methylcytidine-3'-phosphate
  modified_base 16: mod_base = OTHER; note = 2'-O-methyluridine-3'-phosphate
  modified_base 17: mod_base = OTHER; note = 2'-O-methyluridine-3'-phosphate
  modified_base 18: mod_base = OTHER; note = 2'-O-methylguanosine-3'-phosphate
  modified_base 19: mod_base = OTHER; note = 2'-O-methyluridine-3'-phosphate
  modified_base 20: mod_base = OTHER; note = 2'-O-methylguanosine-3'-phosphate
  modified_base 21: mod_base = OTHER; note = 2'-O-methyluridine-3'-phosphate N-[tris(GalNAc-alkyl)-amidodecanoyl)]-4-hydroxyprolinol (Hyp-(GalNAc-alkyl)3)
tttttccacagatgcttgtgt

SEQ ID NO: 2316 - RNA, 21 nt, synthetic construct
  source 1..21: mol_type = other RNA
  modified_base 1: mod_base = OTHER; note = 2'-O-methyluridine-3'-phosphorothioate
  modified_base 2: mod_base = OTHER; note = 2'-O-methyluridine-3'-phosphorothioate
  modified_base 3: mod_base = OTHER; note = 2'-O-methyluridine-3'-phosphate
  modified_base 4: mod_base = OTHER; note = 2'-O-methyluridine-3'-phosphate
  modified_base 5: mod_base = OTHER; note = 2'-O-methylcytidine-3'-phosphate
  modified_base 6: mod_base = OTHER; note = 2'-O-methylcytidine-3'-phosphate
  modified_base 7: mod_base = OTHER; note = 2'-O-methyladenosine-3'-phosphate
  modified_base 8: mod_base = OTHER; note = 2'-O-methylcytidine-3'-phosphate
  modified_base 9: mod_base = OTHER; note = 2'-fluoroadenosine-3'-phosphate
  modified_base 10: mod_base = OTHER; note = 2'-fluoroguanosine-3'-phosphate
  modified_base 11: mod_base = OTHER; note = 2'-fluoroadenosine-3'-phosphate
  modified_base 12: mod_base = OTHER; note = 2'-O-methyluridine-3'-phosphate
  modified_base 13: mod_base = OTHER; note = 2'-O-methylguanosine-3'-phosphate
  modified_base 14: mod_base = OTHER; note = 2'-O-methylcytidine-3'-phosphate
  modified_base 15: mod_base = OTHER; note = 2'-O-methyluridine-3'-phosphate
  modified_base 16: mod_base = OTHER; note = 2'-O-methyluridine-3'-phosphate
  modified_base 17: mod_base = OTHER; note = 2'-O-methylguanosine-3'-phosphate
  modified_base 18: mod_base = OTHER; note = 2'-O-methyluridine-3'-phosphate
  modified_base 19: mod_base = OTHER; note = 2'-O-methylguanosine-3'-phosphate
  modified_base 20: mod_base = OTHER; note = 2'-O-methyladenosine-3'-phosphate
  modified_base 21: mod_base = OTHER; note = 2'-O-methyluridine-3'-phosphate N-[tris(GalNAc-alkyl)-amidodecanoyl)]-4-hydroxyprolinol (Hyp-(GalNAc-alkyl)3)
ttttccacagatgcttgtgat

SEQ ID NO: 2317 - RNA, 21 nt, synthetic construct
  source 1..21: mol_type = other RNA
  modified_base 1: mod_base = OTHER; note = 2'-O-methyluridine-3'-phosphorothioate
  modified_base 2: mod_base = OTHER; note = 2'-O-methyluridine-3'-phosphorothioate
  modified_base 3: mod_base = OTHER; note = 2'-O-methyluridine-3'-phosphate
  modified_base 4: mod_base = OTHER; note = 2'-O-methylcytidine-3'-phosphate
  modified_base 5: mod_base = OTHER; note = 2'-O-methylcytidine-3'-phosphate
  modified_base 6: mod_base = OTHER; note = 2'-O-methyladenosine-3'-phosphate
  modified_base 7: mod_base = OTHER; note = 2'-O-methylcytidine-3'-phosphate
  modified_base 8: mod_base = OTHER; note = 2'-O-methyladenosine-3'-phosphate
  modified_base 9: mod_base = OTHER; note = 2'-fluoroguanosine-3'-phosphate
  modified_base 10: mod_base = OTHER; note = 2'-fluoroadenosine-3'-phosphate
  modified_base 11: mod_base = OTHER; note = 2'-fluorouridine-3'-phosphate
  modified_base 12: mod_base = OTHER; note = 2'-O-methylguanosine-3'-phosphate
  modified_base 13: mod_base = OTHER; note = 2'-O-methylcytidine-3'-phosphate
  modified_base 14: mod_base = OTHER; note = 2'-O-methyluridine-3'-phosphate
  modified_base 15: mod_base = OTHER; note = 2'-O-methyluridine-3'-phosphate
  modified_base 16: mod_base = OTHER; note = 2'-O-methylguanosine-3'-phosphate
  modified_base 17: mod_base = OTHER; note = 2'-O-methyluridine-3'-phosphate
  modified_base 18: mod_base = OTHER; note = 2'-O-methylguanosine-3'-phosphate
  modified_base 19: mod_base = OTHER; note = 2'-O-methyladenosine-3'-phosphate
  modified_base 20: mod_base = OTHER; note = 2'-O-methyluridine-3'-phosphate
  modified_base 21: mod_base = OTHER; note = 2'-O-methyluridine-3'-phosphate N-[tris(GalNAc-alkyl)-amidodecanoyl)]-4-hydroxyprolinol (Hyp-(GalNAc-alkyl)3)
tttccacagatgcttgtgatt

SEQ ID NO: 2318 - RNA, 21 nt, synthetic construct
  source 1..21: mol_type = other RNA
  modified_base 1: mod_base = OTHER; note = 2'-O-methyluridine-3'-phosphorothioate
  modified_base 2: mod_base = OTHER; note = 2'-O-methyluridine-3'-phosphorothioate
  modified_base 3: mod_base = OTHER; note = 2'-O-methylcytidine-3'-phosphate
  modified_base 4: mod_base = OTHER; note = 2'-O-methylcytidine-3'-phosphate
  modified_base 5: mod_base = OTHER; note = 2'-O-methyladenosine-3'-phosphate
  modified_base 6: mod_base = OTHER; note = 2'-O-methylcytidine-3'-phosphate
  modified_base 7: mod_base = OTHER; note = 2'-O-methyladenosine-3'-phosphate
  modified_base 8: mod_base = OTHER; note = 2'-O-methylguanosine-3'-phosphate
  modified_base 9: mod_base = OTHER; note = 2'-fluoroadenosine-3'-phosphate
  modified_base 10: mod_base = OTHER; note = 2'-fluorouridine-3'-phosphate
  modified_base 11: mod_base = OTHER; note = 2'-fluoroguanosine-3'-phosphate
  modified_base 12: mod_base = OTHER; note = 2'-O-methylcytidine-3'-phosphate
  modified_base 13: mod_base = OTHER; note = 2'-O-methyluridine-3'-phosphate
  modified_base 14: mod_base = OTHER; note = 2'-O-methyluridine-3'-phosphate
  modified_base 15: mod_base = OTHER; note = 2'-O-methylguanosine-3'-phosphate
  modified_base 16: mod_base = OTHER; note = 2'-O-methyluridine-3'-phosphate
  modified_base 17: mod_base = OTHER; note = 2'-O-methylguanosine-3'-phosphate
  modified_base 18: mod_base = OTHER; note = 2'-O-methyladenosine-3'-phosphate
  modified_base 19: mod_base = OTHER; note = 2'-O-methyluridine-3'-phosphate
  modified_base 20: mod_base = OTHER; note = 2'-O-methyluridine-3'-phosphate
  modified_base 21: mod_base = OTHER; note = 2'-O-methyluridine-3'-phosphate N-[tris(GalNAc-alkyl)-amidodecanoyl)]-4-hydroxyprolinol (Hyp-(GalNAc-alkyl)3)
ttccacagatgcttgtgattt

SEQ ID NO: 2319 - RNA, 21 nt, synthetic construct
  source 1..21: mol_type = other RNA
  modified_base 1: mod_base = OTHER; note = 2'-O-methyluridine-3'-phosphorothioate
  modified_base 2: mod_base = OTHER; note = 2'-O-methylcytidine-3'-phosphorothioate
  modified_base 3: mod_base = OTHER; note = 2'-O-methylcytidine-3'-phosphate
  modified_base 4: mod_base = OTHER; note = 2'-O-methyladenosine-3'-phosphate
  modified_base 5: mod_base = OTHER; note = 2'-O-methylcytidine-3'-phosphate
  modified_base 6: mod_base = OTHER; note = 2'-O-methyladenosine-3'-phosphate
  modified_base 7: mod_base = OTHER; note = 2'-O-methylguanosine-3'-phosphate
  modified_base 8: mod_base = OTHER; note = 2'-O-methyladenosine-3'-phosphate
  modified_base 9: mod_base = OTHER; note = 2'-fluorouridine-3'-phosphate
  modified_base 10: mod_base = OTHER; note = 2'-fluoroguanosine-3'-phosphate
  modified_base 11: mod_base = OTHER; note = 2'-fluorocytidine-3'-phosphate
  modified_base 12: mod_base = OTHER; note = 2'-O-methyluridine-3'-phosphate
  modified_base 13: mod_base = OTHER; note = 2'-O-methyluridine-3'-phosphate
  modified_base 14: mod_base = OTHER; note = 2'-O-methylguanosine-3'-phosphate
  modified_base 15: mod_base = OTHER; note = 2'-O-methyluridine-3'-phosphate
  modified_base 16: mod_base = OTHER; note = 2'-O-methylguanosine-3'-phosphate
  modified_base 17: mod_base = OTHER; note = 2'-O-methyladenosine-3'-phosphate
  modified_base 18: mod_base = OTHER; note = 2'-O-methyluridine-3'-phosphate
  modified_base 19: mod_base = OTHER; note = 2'-O-methyluridine-3'-phosphate
  modified_base 20: mod_base = OTHER; note = 2'-O-methyluridine-3'-phosphate
  modified_base 21: mod_base = OTHER; note = 2'-O-methyluridine-3'-phosphate N-[tris(GalNAc-alkyl)-amidodecanoyl)]-4-hydroxyprolinol (Hyp-(GalNAc-alkyl)3)
tccacagatgcttgtgatttt

SEQ ID NO: 2320 - RNA, 21 nt, synthetic construct
  source 1..21: mol_type = other RNA
  modified_base 1: mod_base = OTHER; note = 2'-O-methylcytidine-3'-phosphorothioate
  modified_base 2: mod_base = OTHER; note = 2'-O-methylcytidine-3'-phosphorothioate
  modified_base 3: mod_base = OTHER; note = 2'-O-methyladenosine-3'-phosphate
  modified_base 4: mod_base = OTHER; note = 2'-O-methylcytidine-3'-phosphate
  modified_base 5: mod_base = OTHER; note = 2'-O-methyladenosine-3'-phosphate
  modified_base 6: mod_base = OTHER; note = 2'-O-methylguanosine-3'-phosphate
  modified_base 7: mod_base = OTHER; note = 2'-O-methyladenosine-3'-phosphate
  modified_base 8: mod_base = OTHER; note = 2'-O-methyluridine-3'-phosphate
  modified_base 9: mod_base = OTHER; note = 2'-fluoroguanosine-3'-phosphate
  modified_base 10: mod_base = OTHER; note = 2'-fluorocytidine-3'-phosphate
  modified_base 11: mod_base = OTHER; note = 2'-fluorouridine-3'-phosphate
  modified_base 12: mod_base = OTHER; note = 2'-O-methyluridine-3'-phosphate
  modified_base 13: mod_base = OTHER; note = 2'-O-methylguanosine-3'-phosphate
  modified_base 14: mod_base = OTHER; note = 2'-O-methyluridine-3'-phosphate
  modified_base 15: mod_base = OTHER; note = 2'-O-methylguanosine-3'-phosphate
  modified_base 16: mod_base = OTHER; note = 2'-O-methyladenosine-3'-phosphate
  modified_base 17: mod_base = OTHER; note = 2'-O-methyluridine-3'-phosphate
  modified_base 18: mod_base = OTHER; note = 2'-O-methyluridine-3'-phosphate
  modified_base 19: mod_base = OTHER; note = 2'-O-methyluridine-3'-phosphate
  modified_base 20: mod_base = OTHER; note = 2'-O-methyluridine-3'-phosphate
  modified_base 21: mod_base = OTHER; note = 2'-O-methyluridine-3'-phosphate N-[tris(GalNAc-alkyl)-amidodecanoyl)]-4-hydroxyprolinol (Hyp-(GalNAc-alkyl)3)
ccacagatgcttgtgattttt

SEQ ID NO: 2321 - RNA, 21 nt, synthetic construct
  source 1..21: mol_type = other RNA
  modified_base 1: mod_base = OTHER; note = 2'-O-methylcytidine-3'-phosphorothioate
  modified_base 2: mod_base = OTHER; note = 2'-O-methyladenosine-3'-phosphorothioate
  modified_base 3: mod_base = OTHER; note = 2'-O-methylcytidine-3'-phosphate
  modified_base 4: mod_base = OTHER; note = 2'-O-methyladenosine-3'-phosphate
  modified_base 5: mod_base = OTHER; note = 2'-O-methylguanosine-3'-phosphate
  modified_base 6: mod_base = OTHER; note = 2'-O-methyladenosine-3'-phosphate
  modified_base 7: mod_base = OTHER; note = 2'-O-methyluridine-3'-phosphate
  modified_base 8: mod_base = OTHER; note = 2'-O-methylguanosine-3'-phosphate
  modified_base 9: mod_base = OTHER; note = 2'-fluorocytidine-3'-phosphate
  modified_base 10: mod_base = OTHER; note = 2'-fluorouridine-3'-phosphate
  modified_base 11: mod_base = OTHER; note = 2'-fluorouridine-3'-phosphate
  modified_base 12: mod_base = OTHER; note = 2'-O-methylguanosine-3'-phosphate
  modified_base 13: mod_base = OTHER; note = 2'-O-methyluridine-3'-phosphate
  modified_base 14: mod_base = OTHER; note = 2'-O-methylguanosine-3'-phosphate
  modified_base 15: mod_base = OTHER; note = 2'-O-methyladenosine-3'-phosphate
  modified_base 16: mod_base = OTHER; note = 2'-O-methyluridine-3'-phosphate
  modified_base 17: mod_base = OTHER; note = 2'-O-methyluridine-3'-phosphate
  modified_base 18: mod_base = OTHER; note = 2'-O-methyluridine-3'-phosphate
  modified_base 19: mod_base = OTHER; note = 2'-O-methyluridine-3'-phosphate
  modified_base 20: mod_base = OTHER; note = 2'-O-methyluridine-3'-phosphate
  modified_base 21: mod_base = OTHER; note = 2'-O-methyluridine-3'-phosphate N-[tris(GalNAc-alkyl)-amidodecanoyl)]-4-hydroxyprolinol (Hyp-(GalNAc-alkyl)3)
cacagatgcttgtgatttttt

SEQ ID NO: 2322 - RNA, 21 nt, synthetic construct
  source 1..21: mol_type = other RNA
  modified_base 1: mod_base = OTHER; note = 2'-O-methyladenosine-3'-phosphorothioate
  modified_base 2: mod_base = OTHER; note = 2'-O-methylcytidine-3'-phosphorothioate
  modified_base 3: mod_base = OTHER; note = 2'-O-methylcytidine-3'-phosphate
  modified_base 4: mod_base = OTHER; note = 2'-O-methyluridine-3'-phosphate
  modified_base 5: mod_base = OTHER; note = 2'-O-methylguanosine-3'-phosphate
  modified_base 6: mod_base = OTHER; note = 2'-O-methyladenosine-3'-phosphate
  modified_base 7: mod_base = OTHER; note = 2'-O-methyladenosine-3'-phosphate
  modified_base 8: mod_base = OTHER; note = 2'-O-methyluridine-3'-phosphate
  modified_base 9: mod_base = OTHER; note = 2'-fluorouridine-3'-phosphate
  modified_base 10: mod_base = OTHER; note = 2'-fluorouridine-3'-phosphate
  modified_base 11: mod_base = OTHER; note = 2'-fluorocytidine-3'-phosphate
  modified_base 12: mod_base = OTHER; note = 2'-O-methyluridine-3'-phosphate
  modified_base 13: mod_base = OTHER; note = 2'-O-methylguanosine-3'-phosphate
  modified_base 14: mod_base = OTHER; note = 2'-O-methyluridine-3'-phosphate
  modified_base 15: mod_base = OTHER; note = 2'-O-methyluridine-3'-phosphate
  modified_base 16: mod_base = OTHER; note = 2'-O-methyluridine-3'-phosphate
  modified_base 17: mod_base = OTHER; note = 2'-O-methylguanosine-3'-phosphate
  modified_base 18: mod_base = OTHER; note = 2'-O-methyladenosine-3'-phosphate
  modified_base 19: mod_base = OTHER; note = 2'-O-methyladenosine-3'-phosphate
  modified_base 20: mod_base = OTHER; note = 2'-O-methyluridine-3'-phosphate
  modified_base 21: mod_base = OTHER; note = 2'-O-methyluridine-3'-phosphate N-[tris(GalNAc-alkyl)-amidodecanoyl)]-4-hydroxyprolinol (Hyp-(GalNAc-alkyl)3)
acctgaatttctgtttgaatt

SEQ ID NO: 2323 - RNA, 21 nt, synthetic construct
  source 1..21: mol_type = other RNA
  modified_base 1: mod_base = OTHER; note = 2'-O-methylcytidine-3'-phosphorothioate
  modified_base 2: mod_base = OTHER; note = 2'-O-methylcytidine-3'-phosphorothioate
  modified_base 3: mod_base = OTHER; note = 2'-O-methyluridine-3'-phosphate
  modified_base 4: mod_base = OTHER; note = 2'-O-methylguanosine-3'-phosphate
  modified_base 5: mod_base = OTHER; note = 2'-O-methyladenosine-3'-phosphate
  modified_base 6: mod_base = OTHER; note = 2'-O-methyladenosine-3'-phosphate
  modified_base 7: mod_base = OTHER; note = 2'-O-methyluridine-3'-phosphate
  modified_base 8: mod_base = OTHER; note = 2'-O-methyluridine-3'-phosphate
  modified_base 9: mod_base = OTHER; note = 2'-fluorouridine-3'-phosphate
  modified_base 10: mod_base = OTHER; note = 2'-fluorocytidine-3'-phosphate
  modified_base 11: mod_base = OTHER; note = 2'-fluorouridine-3'-phosphate
  modified_base 12: mod_base = OTHER; note = 2'-O-methylguanosine-3'-phosphate
  modified_base 13: mod_base = OTHER; note = 2'-O-methyluridine-3'-phosphate
  modified_base 14: mod_base = OTHER; note = 2'-O-methyluridine-3'-phosphate
  modified_base 15: mod_base = OTHER; note = 2'-O-methyluridine-3'-phosphate
  modified_base 16: mod_base = OTHER; note = 2'-O-methylguanosine-3'-phosphate
  modified_base 17: mod_base = OTHER; note = 2'-O-methyladenosine-3'-phosphate
  modified_base 18: mod_base = OTHER; note = 2'-O-methyladenosine-3'-phosphate
  modified_base 19: mod_base = OTHER; note = 2'-O-methyluridine-3'-phosphate
  modified_base 20: mod_base = OTHER; note = 2'-O-methylguanosine-3'-phosphate
  modified_base 21: mod_base = OTHER; note = 2'-O-methyluridine-3'-phosphate N-[tris(GalNAc-alkyl)-amidodecanoyl)]-4-hydroxyprolinol (Hyp-(GalNAc-alkyl)3)
cctgaatttctgtttgaatgt

SEQ ID NO: 2324 - RNA, 21 nt, synthetic construct
  source 1..21: mol_type = other RNA
  modified_base 1: mod_base = OTHER; note = 2'-O-methylguanosine-3'-phosphorothioate
  modified_base 2: mod_base = OTHER; note = 2'-O-methylguanosine-3'-phosphorothioate
  modified_base 3: mod_base = OTHER; note = 2'-O-methyladenosine-3'-phosphate
  modified_base 4: mod_base = OTHER; note = 2'-O-methyladenosine-3'-phosphate
  modified_base 5: mod_base = OTHER; note = 2'-O-methylcytidine-3'-phosphate
  modified_base 6: mod_base = OTHER; note = 2'-O-methylcytidine-3'-phosphate
  modified_base 7: mod_base = OTHER; note = 2'-O-methyladenosine-3'-phosphate
  modified_base 8: mod_base = OTHER; note = 2'-O-methyluridine-3'-phosphate
  modified_base 9: mod_base = OTHER; note = 2'-fluoroadenosine-3'-phosphate
  modified_base 10: mod_base = OTHER; note = 2'-fluoroguanosine-3'-phosphate
  modified_base 11: mod_base = OTHER; note = 2'-fluorocytidine-3'-phosphate
  modified_base 12: mod_base = OTHER; note = 2'-O-methyluridine-3'-phosphate
  modified_base 13: mod_base = OTHER; note = 2'-O-methylguanosine-3'-phosphate
  modified_base 14: mod_base = OTHER; note = 2'-O-methylguanosine-3'-phosphate
  modified_base 15: mod_base = OTHER; note = 2'-O-methyluridine-3'-phosphate
  modified_base 16: mod_base = OTHER; note = 2'-O-methyluridine-3'-phosphate
  modified_base 17: mod_base = OTHER; note = 2'-O-methyladenosine-3'-phosphate
  modified_base 18: mod_base = OTHER; note = 2'-O-methyluridine-3'-phosphate
  modified_base 19: mod_base = OTHER; note = 2'-O-methyluridine-3'-phosphate
  modified_base 20: mod_base = OTHER; note = 2'-O-methyluridine-3'-phosphate
  modified_base 21: mod_base = OTHER; note = 2'-O-methyluridine-3'-phosphate N-[tris(GalNAc-alkyl)-amidodecanoyl)]-4-hydroxyprolinol (Hyp-(GalNAc-alkyl)3)
ggaaccatagctggttatttt

SEQ ID NO: 2325 - RNA, 21 nt, synthetic construct
  source 1..21: mol_type = other RNA
  modified_base 1: mod_base = OTHER; note = 2'-O-methylguanosine-3'-phosphorothioate
  modified_base 2: mod_base = OTHER; note = 2'-O-methyladenosine-3'-phosphorothioate
  modified_base 3: mod_base = OTHER; note = 2'-O-methyladenosine-3'-phosphate
  modified_base 4: mod_base = OTHER; note = 2'-O-methylcytidine-3'-phosphate
  modified_base 5: mod_base = OTHER; note = 2'-O-methylcytidine-3'-phosphate
  modified_base 6: mod_base = OTHER; note = 2'-O-methyladenosine-3'-phosphate
  modified_base 7: mod_base = OTHER; note = 2'-O-methyluridine-3'-phosphate
  modified_base 8: mod_base = OTHER; note = 2'-O-methyladenosine-3'-phosphate
  modified_base 9: mod_base = OTHER; note = 2'-fluoroguanosine-3'-phosphate
  modified_base 10: mod_base = OTHER; note = 2'-fluorocytidine-3'-phosphate
  modified_base 11: mod_base = OTHER; note = 2'-fluorouridine-3'-phosphate
  modified_base 12: mod_base = OTHER; note = 2'-O-methylguanosine-3'-phosphate
  modified_base 13: mod_base = OTHER; note = 2'-O-methylguanosine-3'-phosphate
  modified_base 14: mod_base = OTHER; note = 2'-O-methyluridine-3'-phosphate
  modified_base 15: mod_base = OTHER; note = 2'-O-methyluridine-3'-phosphate
  modified_base 16: mod_base = OTHER; note = 2'-O-methyladenosine-3'-phosphate
  modified_base 17: mod_base = OTHER; note = 2'-O-methyluridine-3'-phosphate
  modified_base 18: mod_base = OTHER; note = 2'-O-methyluridine-3'-phosphate
  modified_base 19: mod_base = OTHER; note = 2'-O-methyluridine-3'-phosphate
  modified_base 20: mod_base = OTHER; note = 2'-O-methylcytidine-3'-phosphate
  modified_base 21: mod_base = OTHER; note = 2'-O-methyluridine-3'-phosphate N-[tris(GalNAc-alkyl)-amidodecanoyl)]-4-hydroxyprolinol (Hyp-(GalNAc-alkyl)3)
gaaccatagctggttatttct

SEQ ID NO: 2326 - RNA, 21 nt, synthetic construct
  source 1..21: mol_type = other RNA
  modified_base 1: mod_base = OTHER; note = 2'-O-methyladenosine-3'-phosphorothioate
  modified_base 2: mod_base = OTHER; note = 2'-O-methyladenosine-3'-phosphorothioate
  modified_base 3: mod_base = OTHER; note = 2'-O-methylcytidine-3'-phosphate
  modified_base 4: mod_base = OTHER; note = 2'-O-methylcytidine-3'-phosphate
  modified_base 5: mod_base = OTHER; note = 2'-O-methyladenosine-3'-phosphate
  modified_base 6: mod_base = OTHER; note = 2'-O-methyluridine-3'-phosphate
  modified_base 7: mod_base = OTHER; note = 2'-O-methyladenosine-3'-phosphate
  modified_base 8: mod_base = OTHER; note = 2'-O-methylguanosine-3'-phosphate
  modified_base 9: mod_base = OTHER; note = 2'-fluorocytidine-3'-phosphate
  modified_base 10: mod_base = OTHER; note = 2'-fluorouridine-3'-phosphate
  modified_base 11: mod_base = OTHER; note = 2'-fluoroguanosine-3'-phosphate
  modified_base 12: mod_base = OTHER; note = 2'-O-methylguanosine-3'-phosphate
  modified_base 13: mod_base = OTHER; note = 2'-O-methyluridine-3'-phosphate
  modified_base 14: mod_base = OTHER; note = 2'-O-methyluridine-3'-phosphate
  modified_base 15: mod_base = OTHER; note = 2'-O-methyladenosine-3'-phosphate
  modified_base 16: mod_base = OTHER; note = 2'-O-methyluridine-3'-phosphate
  modified_base 17: mod_base = OTHER; note = 2'-O-methyluridine-3'-phosphate
  modified_base 18: mod_base = OTHER; note = 2'-O-methyluridine-3'-phosphate
  modified_base 19: mod_base = OTHER; note = 2'-O-methylcytidine-3'-phosphate
  modified_base 20: mod_base = OTHER; note = 2'-O-methyluridine-3'-phosphate
  modified_base 21: mod_base = OTHER; note = 2'-O-methyluridine-3'-phosphate N-[tris(GalNAc-alkyl)-amidodecanoyl)]-4-hydroxyprolinol (Hyp-(GalNAc-alkyl)3)
aaccatagctggttatttctt

SEQ ID NO: 2327 - RNA, 21 nt, synthetic construct
  source 1..21: mol_type = other RNA
  modified_base 1: mod_base = OTHER; note = 2'-O-methyladenosine-3'-phosphorothioate
  modified_base 2: mod_base = OTHER; note = 2'-O-methylcytidine-3'-phosphorothioate
  modified_base 3: mod_base = OTHER; note = 2'-O-methylcytidine-3'-phosphate
  modified_base 4: mod_base = OTHER; note = 2'-O-methyladenosine-3'-phosphate
  modified_base 5: mod_base = OTHER; note = 2'-O-methyluridine-3'-phosphate
  modified_base 6: mod_base = OTHER; note = 2'-O-methyladenosine-3'-phosphate
  modified_base 7: mod_base = OTHER; note = 2'-O-methylguanosine-3'-phosphate
  modified_base 8: mod_base = OTHER; note = 2'-O-methylcytidine-3'-phosphate
  modified_base 9: mod_base = OTHER; note = 2'-fluorouridine-3'-phosphate
  modified_base 10: mod_base = OTHER; note = 2'-fluoroguanosine-3'-phosphate
  modified_base 11: mod_base = OTHER; note = 2'-fluoroguanosine-3'-phosphate
  modified_base 12: mod_base = OTHER; note = 2'-O-methyluridine-3'-phosphate
  modified_base 13: mod_base = OTHER; note = 2'-O-methyluridine-3'-phosphate
  modified_base 14: mod_base = OTHER; note = 2'-O-methyladenosine-3'-phosphate
  modified_base 15: mod_base = OTHER; note = 2'-O-methyluridine-3'-phosphate
  modified_base 16: mod_base = OTHER; note = 2'-O-methyluridine-3'-phosphate
  modified_base 17: mod_base = OTHER; note = 2'-O-methyluridine-3'-phosphate
  modified_base 18: mod_base = OTHER; note = 2'-O-methylcytidine-3'-phosphate
  modified_base 19: mod_base = OTHER; note = 2'-O-methyluridine-3'-phosphate
  modified_base 20: mod_base = OTHER; note = 2'-O-methylcytidine-3'-phosphate
  modified_base 21: mod_base = OTHER; note = 2'-O-methyluridine-3'-phosphate N-[tris(GalNAc-alkyl)-amidodecanoyl)]-4-hydroxyprolinol (Hyp-(GalNAc-alkyl)3)
accatagctggttatttctct

SEQ ID NO: 2328 - RNA, 21 nt, synthetic construct
  source 1..21: mol_type = other RNA
  modified_base 1: mod_base = OTHER; note = 2'-O-methylcytidine-3'-phosphorothioate
  modified_base 2: mod_base = OTHER; note = 2'-O-methylcytidine-3'-phosphorothioate
  modified_base 3: mod_base = OTHER; note = 2'-O-methyladenosine-3'-phosphate
  modified_base 4: mod_base = OTHER; note = 2'-O-methyluridine-3'-phosphate
  modified_base 5: mod_base = OTHER; note = 2'-O-methyladenosine-3'-phosphate
  modified_base 6: mod_base = OTHER; note = 2'-O-methylguanosine-3'-phosphate
  modified_base 7: mod_base = OTHER; note = 2'-O-methylcytidine-3'-phosphate
  modified_base 8: mod_base = OTHER; note = 2'-O-methyluridine-3'-phosphate
  modified_base 9: mod_base = OTHER; note = 2'-fluoroguanosine-3'-phosphate
  modified_base 10: mod_base = OTHER; note = 2'-fluoroguanosine-3'-phosphate
  modified_base 11: mod_base = OTHER; note = 2'-fluorouridine-3'-phosphate
  modified_base 12: mod_base = OTHER; note = 2'-O-methyluridine-3'-phosphate
  modified_base 13: mod_base = OTHER; note = 2'-O-methyladenosine-3'-phosphate
  modified_base 14: mod_base = OTHER; note = 2'-O-methyluridine-3'-phosphate
  modified_base 15: mod_base = OTHER; note = 2'-O-methyluridine-3'-phosphate
  modified_base 16: mod_base = OTHER; note = 2'-O-methyluridine-3'-phosphate
  modified_base 17: mod_base = OTHER; note = 2'-O-methylcytidine-3'-phosphate
  modified_base 18: mod_base = OTHER; note = 2'-O-methyluridine-3'-phosphate
  modified_base 19: mod_base = OTHER; note = 2'-O-methylcytidine-3'-phosphate
  modified_base 20: mod_base = OTHER; note = 2'-O-methylcytidine-3'-phosphate
  modified_base 21: mod_base = OTHER; note = 2'-O-methyluridine-3'-phosphate N-[tris(GalNAc-alkyl)-amidodecanoyl)]-4-hydroxyprolinol (Hyp-(GalNAc-alkyl)3)
ccatagctggttatttctcct

SEQ ID NO: 2329 - RNA, 21 nt, synthetic construct
  source 1..21: mol_type = other RNA
  modified_base 1: mod_base = OTHER; note = 2'-O-methylcytidine-3'-phosphorothioate
  modified_base 2: mod_base = OTHER; note = 2'-O-methylcytidine-3'-phosphorothioate
  modified_base 3: mod_base = OTHER; note = 2'-O-methyluridine-3'-phosphate
  modified_base 4: mod_base = OTHER; note = 2'-O-methyluridine-3'-phosphate
  modified_base 5: mod_base = OTHER; note = 2'-O-methylguanosine-3'-phosphate
  modified_base 6: mod_base = OTHER; note = 2'-O-methyluridine-3'-phosphate
  modified_base 7: mod_base = OTHER; note = 2'-O-methylguanosine-3'-phosphate
  modified_base 8: mod_base = OTHER; note = 2'-O-methyluridine-3'-phosphate
  modified_base 9: mod_base = OTHER; note = 2'-fluorouridine-3'-phosphate
  modified_base 10: mod_base = OTHER; note = 2'-fluoroadenosine-3'-phosphate
  modified_base 11: mod_base = OTHER; note = 2'-fluoroguanosine-3'-phosphate
  modified_base 12: mod_base = OTHER; note = 2'-O-methyluridine-3'-phosphate
  modified_base 13: mod_base = OTHER; note = 2'-O-methyladenosine-3'-phosphate
  modified_base 14: mod_base = OTHER; note = 2'-O-methyladenosine-3'-phosphate
  modified_base 15: mod_base = OTHER; note = 2'-O-methyluridine-3'-phosphate
  modified_base 16: mod_base = OTHER; note = 2'-O-methyladenosine-3'-phosphate
  modified_base 17: mod_base = OTHER; note = 2'-O-methyladenosine-3'-phosphate
  modified_base 18: mod_base = OTHER; note = 2'-O-methyladenosine-3'-phosphate
  modified_base 19: mod_base = OTHER; note = 2'-O-methylcytidine-3'-phosphate
  modified_base 20: mod_base = OTHER; note = 2'-O-methylguanosine-3'-phosphate
  modified_base 21: mod_base = OTHER; note = 2'-O-methyluridine-3'-phosphate N-[tris(GalNAc-alkyl)-amidodecanoyl)]-4-hydroxyprolinol (Hyp-(GalNAc-alkyl)3)
ccttgtgttagtaataaacgt

SEQ ID NO: 2330 - RNA, 21 nt, synthetic construct
  source 1..21: mol_type = other RNA
  modified_base 1: mod_base = OTHER; note = 2'-O-methylcytidine-3'-phosphorothioate
  modified_base 2: mod_base = OTHER; note = 2'-O-methyluridine-3'-phosphorothioate
  modified_base 3: mod_base = OTHER; note = 2'-O-methyluridine-3'-phosphate
  modified_base 4: mod_base = OTHER; note = 2'-O-methylguanosine-3'-phosphate
  modified_base 5: mod_base = OTHER; note = 2'-O-methyluridine-3'-phosphate
  modified_base 6: mod_base = OTHER; note = 2'-O-methylguanosine-3'-phosphate
  modified_base 7: mod_base = OTHER; note = 2'-O-methyluridine-3'-phosphate
  modified_base 8: mod_base = OTHER; note = 2'-O-methyluridine-3'-phosphate
  modified_base 9: mod_base = OTHER; note = 2'-fluoroadenosine-3'-phosphate
  modified_base 10: mod_base = OTHER; note = 2'-fluoroguanosine-3'-phosphate
  modified_base 11: mod_base = OTHER; note = 2'-fluorouridine-3'-phosphate
  modified_base 12: mod_base = OTHER; note = 2'-O-methyladenosine-3'-phosphate
  modified_base 13: mod_base = OTHER; note = 2'-O-methyladenosine-3'-phosphate
  modified_base 14: mod_base = OTHER; note = 2'-O-methyluridine-3'-phosphate
  modified_base 15: mod_base = OTHER; note = 2'-O-methyladenosine-3'-phosphate
  modified_base 16: mod_base = OTHER; note = 2'-O-methyladenosine-3'-phosphate
  modified_base 17: mod_base = OTHER; note = 2'-O-methyladenosine-3'-phosphate
  modified_base 18: mod_base = OTHER; note = 2'-O-methylcytidine-3'-phosphate
  modified_base 19: mod_base = OTHER; note = 2'-O-methylguanosine-3'-phosphate
  modified_base 20: mod_base = OTHER; note = 2'-O-methyluridine-3'-phosphate
  modified_base 21: mod_base = OTHER; note = 2'-O-methyluridine-3'-phosphate N-[tris(GalNAc-alkyl)-amidodecanoyl)]-4-hydroxyprolinol (Hyp-(GalNAc-alkyl)3)
cttgtgttagtaataaacgtt

SEQ ID NO: 2331 - RNA, 21 nt, synthetic construct
  source 1..21: mol_type = other RNA
  modified_base 1: mod_base = OTHER; note = 2'-O-methyluridine-3'-phosphorothioate
  modified_base 2: mod_base = OTHER; note = 2'-O-methyluridine-3'-phosphorothioate
  modified_base 3: mod_base = OTHER; note = 2'-O-methylguanosine-3'-phosphate
  modified_base 4: mod_base = OTHER; note = 2'-O-methyluridine-3'-phosphate
  modified_base 5: mod_base = OTHER; note = 2'-O-methylguanosine-3'-phosphate
  modified_base 6: mod_base = OTHER; note = 2'-O-methyluridine-3'-phosphate
  modified_base 7: mod_base = OTHER; note = 2'-O-methyluridine-3'-phosphate
  modified_base 8: mod_base = OTHER; note = 2'-O-methyladenosine-3'-phosphate
  modified_base 9: mod_base = OTHER; note = 2'-fluoroguanosine-3'-phosphate
  modified_base 10: mod_base = OTHER; note = 2'-fluorouridine-3'-phosphate
  modified_base 11: mod_base = OTHER; note = 2'-fluoroadenosine-3'-phosphate
  modified_base 12: mod_base = OTHER; note = 2'-O-methyladenosine-3'-phosphate
  modified_base 13: mod_base = OTHER; note = 2'-O-methyluridine-3'-phosphate
  modified_base 14: mod_base = OTHER; note = 2'-O-methyladenosine-3'-phosphate
  modified_base 15: mod_base = OTHER; note = 2'-O-methyladenosine-3'-phosphate
  modified_base 16: mod_base = OTHER; note = 2'-O-methyladenosine-3'-phosphate
  modified_base 17: mod_base = OTHER; note = 2'-O-methylcytidine-3'-phosphate
  modified_base 18: mod_base = OTHER; note = 2'-O-methylguanosine-3'-phosphate
  modified_base 19: mod_base = OTHER; note = 2'-O-methyluridine-3'-phosphate
  modified_base 20: mod_base = OTHER; note = 2'-O-methylcytidine-3'-phosphate
  modified_base 21: mod_base = OTHER; note = 2'-O-methyluridine-3'-phosphate N-[tris(GalNAc-alkyl)-amidodecanoyl)]-4-hydroxyprolinol (Hyp-(GalNAc-alkyl)3)
ttgtgttagtaataaacgtct

SEQ ID NO: 2332 - RNA, 21 nt, synthetic construct
  source 1..21: mol_type = other RNA
  modified_base 1: mod_base = OTHER; note = 2'-O-methyluridine-3'-phosphorothioate
  modified_base 2: mod_base = OTHER; note = 2'-O-methylguanosine-3'-phosphorothioate
  modified_base 3: mod_base = OTHER; note = 2'-O-methyluridine-3'-phosphate
  modified_base 4: mod_base = OTHER; note = 2'-O-methylguanosine-3'-phosphate
  modified_base 5: mod_base = OTHER; note = 2'-O-methyluridine-3'-phosphate
  modified_base 6: mod_base = OTHER; note = 2'-O-methyluridine-3'-phosphate
  modified_base 7: mod_base = OTHER; note = 2'-O-methyladenosine-3'-phosphate
  modified_base 8: mod_base = OTHER; note = 2'-O-methylguanosine-3'-phosphate
  modified_base 9: mod_base = OTHER; note = 2'-fluorouridine-3'-phosphate
  modified_base 10: mod_base = OTHER; note = 2'-fluoroadenosine-3'-phosphate
  modified_base 11: mod_base = OTHER; note = 2'-fluoroadenosine-3'-phosphate
  modified_base 12: mod_base = OTHER; note = 2'-O-methyluridine-3'-phosphate
  modified_base 13: mod_base = OTHER; note = 2'-O-methyladenosine-3'-phosphate
  modified_base 14: mod_base = OTHER; note = 2'-O-methyladenosine-3'-phosphate
  modified_base 15: mod_base = OTHER; note = 2'-O-methyladenosine-3'-phosphate
  modified_base 16: mod_base = OTHER; note = 2'-O-methylcytidine-3'-phosphate
  modified_base 17: mod_base = OTHER; note = 2'-O-methylguanosine-3'-phosphate
  modified_base 18: mod_base = OTHER; note = 2'-O-methyluridine-3'-phosphate
  modified_base 19: mod_base = OTHER; note = 2'-O-methylcytidine-3'-phosphate
  modified_base 20: mod_base = OTHER; note = 2'-O-methyluridine-3'-phosphate
  modified_base 21: mod_base = OTHER; note = 2'-O-methyluridine-3'-phosphate N-[tris(GalNAc-alkyl)-amidodecanoyl)]-4-hydroxyprolinol (Hyp-(GalNAc-alkyl)3)
tgtgttagtaataaacgtctt

SEQ ID NO: 2333 - RNA, 21 nt, synthetic construct
  source 1..21: mol_type = other RNA
  modified_base 1: mod_base = OTHER; note = 2'-O-methylguanosine-3'-phosphorothioate
  modified_base 2: mod_base = OTHER; note = 2'-O-methyluridine-3'-phosphorothioate
  modified_base 3: mod_base = OTHER; note = 2'-O-methylguanosine-3'-phosphate
  modified_base 4: mod_base = OTHER; note = 2'-O-methyluridine-3'-phosphate
  modified_base 5: mod_base = OTHER; note = 2'-O-methyluridine-3'-phosphate
  modified_base 6: mod_base = OTHER; note = 2'-O-methyladenosine-3'-phosphate
  modified_base 7: mod_base = OTHER; note = 2'-O-methylguanosine-3'-phosphate
  modified_base 8: mod_base = OTHER; note = 2'-O-methyluridine-3'-phosphate
  modified_base 9: mod_base = OTHER; note = 2'-fluoroadenosine-3'-phosphate
  modified_base 10: mod_base = OTHER; note = 2'-fluoroadenosine-3'-phosphate
  modified_base 11: mod_base = OTHER; note = 2'-fluorouridine-3'-phosphate
  modified_base 12: mod_base = OTHER; note = 2'-O-methyladenosine-3'-phosphate
  modified_base 13: mod_base = OTHER; note = 2'-O-methyladenosine-3'-phosphate
  modified_base 14: mod_base = OTHER; note = 2'-O-methyladenosine-3'-phosphate
  modified_base 15: mod_base = OTHER; note = 2'-O-methylcytidine-3'-phosphate
  modified_base 16: mod_base = OTHER; note = 2'-O-methylguanosine-3'-phosphate
  modified_base 17: mod_base = OTHER; note = 2'-O-methyluridine-3'-phosphate
  modified_base 18: mod_base = OTHER; note = 2'-O-methylcytidine-3'-phosphate
  modified_base 19: mod_base = OTHER; note = 2'-O-methyluridine-3'-phosphate
  modified_base 20: mod_base = OTHER; note = 2'-O-methyluridine-3'-phosphate
  modified_base 21: mod_base = OTHER; note = 2'-O-methyluridine-3'-phosphate N-[tris(GalNAc-alkyl)-amidodecanoyl)]-4-hydroxyprolinol (Hyp-(GalNAc-alkyl)3)
gtgttagtaataaacgtcttt

SEQ ID NO: 2334 - RNA, 21 nt, synthetic construct
  source 1..21: mol_type = other RNA
  modified_base 1: mod_base = OTHER; note = 2'-O-methyluridine-3'-phosphorothioate
  modified_base 2: mod_base = OTHER; note = 2'-O-methylguanosine-3'-phosphorothioate
  modified_base 3: mod_base = OTHER; note = 2'-O-methyluridine-3'-phosphate
  modified_base 4: mod_base = OTHER; note = 2'-O-methyluridine-3'-phosphate
  modified_base 5: mod_base = OTHER; note = 2'-O-methyladenosine-3'-phosphate
  modified_base 6: mod_base = OTHER; note = 2'-O-methylguanosine-3'-phosphate
  modified_base 7: mod_base = OTHER; note = 2'-O-methyluridine-3'-phosphate
  modified_base 8: mod_base = OTHER; note = 2'-O-methyladenosine-3'-phosphate
  modified_base 9: mod_base = OTHER; note = 2'-fluoroadenosine-3'-phosphate
  modified_base 10: mod_base = OTHER; note = 2'-fluorouridine-3'-phosphate
  modified_base 11: mod_base = OTHER; note = 2'-fluoroadenosine-3'-phosphate
  modified_base 12: mod_base = OTHER; note = 2'-O-methyladenosine-3'-phosphate
  modified_base 13: mod_base = OTHER; note = 2'-O-methyladenosine-3'-phosphate
  modified_base 14: mod_base = OTHER; note = 2'-O-methylcytidine-3'-phosphate
  modified_base 15: mod_base = OTHER; note = 2'-O-methylguanosine-3'-phosphate
  modified_base 16: mod_base = OTHER; note = 2'-O-methyluridine-3'-phosphate
  modified_base 17: mod_base = OTHER; note = 2'-O-methylcytidine-3'-phosphate
  modified_base 18: mod_base = OTHER; note = 2'-O-methyluridine-3'-phosphate
  modified_base 19: mod_base = OTHER; note = 2'-O-methyluridine-3'-phosphate
  modified_base 20: mod_base = OTHER; note = 2'-O-methylguanosine-3'-phosphate
  modified_base 21: mod_base = OTHER; note = 2'-O-methyluridine-3'-phosphate N-[tris(GalNAc-alkyl)-amidodecanoyl)]-4-hydroxyprolinol (Hyp-(GalNAc-alkyl)3)
tgttagtaataaacgtcttgt

SEQ ID NO: 2335 - RNA, 21 nt, synthetic construct
  source 1..21: mol_type = other RNA
  modified_base 1: mod_base = OTHER; note = 2'-O-methylguanosine-3'-phosphorothioate
  modified_base 2: mod_base = OTHER; note = 2'-O-methyluridine-3'-phosphorothioate
  modified_base 3: mod_base = OTHER; note = 2'-O-methyluridine-3'-phosphate
  modified_base 4: mod_base = OTHER; note = 2'-O-methyladenosine-3'-phosphate
  modified_base 5: mod_base = OTHER; note = 2'-O-methylguanosine-3'-phosphate
  modified_base 6: mod_base = OTHER; note = 2'-O-methyluridine-3'-phosphate
  modified_base 7: mod_base = OTHER; note = 2'-O-methyladenosine-3'-phosphate
  modified_base 8: mod_base = OTHER; note = 2'-O-methyladenosine-3'-phosphate
  modified_base 9: mod_base = OTHER; note = 2'-fluorouridine-3'-phosphate
  modified_base 10: mod_base = OTHER; note = 2'-fluoroadenosine-3'-phosphate
  modified_base 11: mod_base = OTHER; note = 2'-fluoroadenosine-3'-phosphate
  modified_base 12: mod_base = OTHER; note = 2'-O-methyladenosine-3'-phosphate
  modified_base 13: mod_base = OTHER; note = 2'-O-methylcytidine-3'-phosphate
  modified_base 14: mod_base = OTHER; note = 2'-O-methylguanosine-3'-phosphate
  modified_base 15: mod_base = OTHER; note = 2'-O-methyluridine-3'-phosphate
  modified_base 16: mod_base = OTHER; note = 2'-O-methylcytidine-3'-phosphate
  modified_base 17: mod_base = OTHER; note = 2'-O-methyluridine-3'-phosphate
  modified_base 18: mod_base = OTHER; note = 2'-O-methyluridine-3'-phosphate
  modified_base 19: mod_base = OTHER; note = 2'-O-methylguanosine-3'-phosphate
  modified_base 20: mod_base = OTHER; note = 2'-O-methylcytidine-3'-phosphate
  modified_base 21: mod_base = OTHER; note = 2'-O-methyluridine-3'-phosphate N-[tris(GalNAc-alkyl)-amidodecanoyl)]-4-hydroxyprolinol (Hyp-(GalNAc-alkyl)3)
gttagtaataaacgtcttgct

SEQ ID NO: 2336 - RNA, 21 nt, synthetic construct
  source 1..21: mol_type = other RNA
  modified_base 1: mod_base = OTHER; note = 2'-O-methyluridine-3'-phosphorothioate
  modified_base 2: mod_base = OTHER; note = 2'-O-methylcytidine-3'-phosphorothioate
  modified_base 3: mod_base = OTHER; note = 2'-O-methyluridine-3'-phosphate
  modified_base 4: mod_base = OTHER; note = 2'-O-methylcytidine-3'-phosphate
  modified_base 5: mod_base = OTHER; note = 2'-O-methylcytidine-3'-phosphate
  modified_base 6: mod_base = OTHER; note = 2'-O-methylcytidine-3'-phosphate
  modified_base 7: mod_base = OTHER; note = 2'-O-methyladenosine-3'-phosphate
  modified_base 8: mod_base = OTHER; note = 2'-O-methylcytidine-3'-phosphate
  modified_base 9: mod_base = OTHER; note = 2'-fluorocytidine-3'-phosphate
  modified_base 10: mod_base = OTHER; note = 2'-fluorouridine-3'-phosphate
  modified_base 11: mod_base = OTHER; note = 2'-fluorouridine-3'-phosphate
  modified_base 12: mod_base = OTHER; note = 2'-O-methyluridine-3'-phosphate
  modified_base 13: mod_base = OTHER; note = 2'-O-methyluridine-3'-phosphate
  modified_base 14: mod_base = OTHER; note = 2'-O-methylcytidine-3'-phosphate
  modified_base 15: mod_base = OTHER; note = 2'-O-methyluridine-3'-phosphate
  modified_base 16: mod_base = OTHER; note = 2'-O-methyluridine-3'-phosphate
  modified_base 17: mod_base = OTHER; note = 2'-O-methylcytidine-3'-phosphate
  modified_base 18: mod_base = OTHER; note = 2'-O-methyluridine-3'-phosphate
  modified_base 19: mod_base = OTHER; note = 2'-O-methyladenosine-3'-phosphate
  modified_base 20: mod_base = OTHER; note = 2'-O-methyladenosine-3'-phosphate
  modified_base 21: mod_base = OTHER; note = 2'-O-methyluridine-3'-phosphate N-[tris(GalNAc-alkyl)-amidodecanoyl)]-4-hydroxyprolinol (Hyp-(GalNAc-alkyl)3)
tctcccaccttttcttctaat

SEQ ID NO: 2337 - RNA, 21 nt, synthetic construct
  source 1..21: mol_type = other RNA
  modified_base 1: mod_base = OTHER; note = 2'-O-methylcytidine-3'-phosphorothioate
  modified_base 2: mod_base = OTHER; note = 2'-O-methylcytidine-3'-phosphorothioate
  modified_base 3: mod_base = OTHER; note = 2'-O-methyluridine-3'-phosphate
  modified_base 4: mod_base = OTHER; note = 2'-O-methylcytidine-3'-phosphate
  modified_base 5: mod_base = OTHER; note = 2'-O-methyladenosine-3'-phosphate
  modified_base 6: mod_base = OTHER; note = 2'-O-methyladenosine-3'-phosphate
  modified_base 7: mod_base = OTHER; note = 2'-O-methylcytidine-3'-phosphate
  modified_base 8: mod_base = OTHER; note = 2'-O-methyluridine-3'-phosphate
  modified_base 9: mod_base = OTHER; note = 2'-fluoroguanosine-3'-phosphate
  modified_base 10: mod_base = OTHER; note = 2'-fluoroguanosine-3'-phosphate
  modified_base 11: mod_base = OTHER; note = 2'-fluoroadenosine-3'-phosphate
  modified_base 12: mod_base = OTHER; note = 2'-O-methyluridine-3'-phosphate
  modified_base 13: mod_base = OTHER; note = 2'-O-methylguanosine-3'-phosphate
  modified_base 14: mod_base = OTHER; note = 2'-O-methyladenosine-3'-phosphate
  modified_base 15: mod_base = OTHER; note = 2'-O-methyladenosine-3'-phosphate
  modified_base 16: mod_base = OTHER; note = 2'-O-methylguanosine-3'-phosphate
  modified_base 17: mod_base = OTHER; note = 2'-O-methyladenosine-3'-phosphate
  modified_base 18: mod_base = OTHER; note = 2'-O-methyladenosine-3'-phosphate
  modified_base 19: mod_base = OTHER; note = 2'-O-methyladenosine-3'-phosphate
  modified_base 20: mod_base = OTHER; note = 2'-O-methylcytidine-3'-phosphate
  modified_base 21: mod_base = OTHER; note = 2'-O-methyluridine-3'-phosphate N-[tris(GalNAc-alkyl)-amidodecanoyl)]-4-hydroxyprolinol (Hyp-(GalNAc-alkyl)3)
cctcaactggatgaagaaact

SEQ ID NO: 2338 - DNA, 23 bp, synthetic construct
  source 1..23: mol_type = other DNA
  modified_base 1: mod_base = OTHER; note = 2'-O-methyladenosine-3'-phosphorothioate
  modified_base 2: mod_base = OTHER; note = 2'-deoxyadenosine-3'-phosphorothioate
  modified_base 3: mod_base = OTHER; note = 2'-O-methylguanosine-3'-phosphate
  modified_base 4: mod_base = OTHER; note = 2'-O-methylguanosine-3'-phosphate
  modified_base 6: mod_base = OTHER; note = 2'-O-methyluridine-3'-phosphate
  modified_base 8: mod_base = OTHER; note = 2'-O-methylguanosine-3'-phosphate
  modified_base 9: mod_base = OTHER; note = 2'-O-methyluridine-3'-phosphate
  modified_base 10: mod_base = OTHER; note = 2'-O-methylguanosine-3'-phosphate
  modified_base 11: mod_base = OTHER; note = 2'-O-methylguanosine-3'-phosphate
  modified_base 13: mod_base = OTHER; note = 2'-O-methylcytidine-3'-phosphate
  modified_base 14: mod_base = OTHER; note = 2'-fluorocytidine-3'-phosphate
  modified_base 15: mod_base = OTHER; note = 2'-O-methyluridine-3'-phosphate
  modified_base 16: mod_base = OTHER; note = 2'-O-methylcytidine-3'-phosphate
  modified_base 17: mod_base = OTHER; note = 2'-O-methyladenosine-3'-phosphate
  modified_base 18: mod_base = OTHER; note = 2'-O-methylguanosine-3'-phosphate
  modified_base 19: mod_base = OTHER; note = 2'-O-methylguanosine-3'-phosphate
  modified_base 20: mod_base = OTHER; note = 2'-O-methylcytidine-3'-phosphate
  modified_base 21: mod_base = OTHER; note = 2'-O-methyluridine-3'-phosphorothioate
  modified_base 22: mod_base = OTHER; note = 2'-O-methylcytidine-3'-phosphorothioate
  modified_base 23: mod_base = OTHER; note = 2'-O-methyladenosine-3'-phosphate
  misc_feature 1: note = RNA
  misc_feature 2: note = DNA
  misc_feature 3..4: note = RNA
  misc_feature 5: note = DNA
  misc_feature 6: note = RNA
  misc_feature 7: note = DNA
  misc_feature 8..11: note = RNA
  misc_feature 12: note = DNA
  misc_feature 13..23: note = RNA
aaggatggtggccctcaggctca

SEQ ID NO: 2339 - DNA, 23 bp, synthetic construct
  source 1..23: mol_type = other DNA
  modified_base 1: mod_base = OTHER; note = 2'-O-methyladenosine-3'-phosphorothioate
  modified_base 2: mod_base = OTHER; note = 2'-deoxyadenosine-3'-phosphorothioate
  modified_base 3: mod_base = OTHER; note = 2'-O-methylguanosine-3'-phosphate
  modified_base 4: mod_base = OTHER; note = 2'-O-methyladenosine-3'-phosphate
  modified_base 6: mod_base = OTHER; note = 2'-O-methylguanosine-3'-phosphate
  modified_base 8: mod_base = OTHER; note = 2'-O-methyluridine-3'-phosphate
  modified_base 9: mod_base = OTHER; note = 2'-O-methylguanosine-3'-phosphate
  modified_base 10: mod_base = OTHER; note = 2'-O-methylguanosine-3'-phosphate
  modified_base 11: mod_base = OTHER; note = 2'-O-methyluridine-3'-phosphate
  modified_base 13: mod_base = OTHER; note = 2'-O-methylguanosine-3'-phosphate
  modified_base 14: mod_base = OTHER; note = 2'-fluorocytidine-3'-phosphate
  modified_base 15: mod_base = OTHER; note = 2'-O-methylcytidine-3'-phosphate
  modified_base 16: mod_base = OTHER; note = 2'-O-methylcytidine-3'-phosphate
  modified_base 17: mod_base = OTHER; note = 2'-O-methyluridine-3'-phosphate
  modified_base 18: mod_base = OTHER; note = 2'-O-methylcytidine-3'-phosphate
  modified_base 19: mod_base = OTHER; note = 2'-O-methyladenosine-3'-phosphate
  modified_base 20: mod_base = OTHER; note = 2'-O-methylguanosine-3'-phosphate
  modified_base 21: mod_base = OTHER; note = 2'-O-methylguanosine-3'-phosphorothioate
  modified_base 22: mod_base = OTHER; note = 2'-O-methylcytidine-3'-phosphorothioate
  modified_base 23: mod_base = OTHER; note = 2'-O-methyluridine-3'-phosphate
  misc_feature 1: note = RNA
  misc_feature 2: note = DNA
  misc_feature 3..4: note = RNA
  misc_feature 5: note = DNA
  misc_feature 6: note = RNA
  misc_feature 7: note = DNA
  misc_feature 8..11: note = RNA
  misc_feature 12: note = DNA
  misc_feature 13..23: note = RNA
aagaggatggtggccctcaggct

SEQ ID NO: 2340 - DNA, 23 bp, synthetic construct
  source 1..23: mol_type = other DNA
  modified_base 1: mod_base = OTHER; note = 2'-O-methyladenosine-3'-phosphorothioate
  modified_base 2: mod_base = OTHER; note = 2'-deoxyadenosine-3'-phosphorothioate
  modified_base 3: mod_base = OTHER; note = 2'-O-methylguanosine-3'-phosphate
  modified_base 4: mod_base = OTHER; note = 2'-O-methylguanosine-3'-phosphate
  modified_base 6: mod_base = OTHER; note = 2'-O-methyladenosine-3'-phosphate
  modified_base 8: mod_base = OTHER; note = 2'-O-methyladenosine-3'-phosphate
  modified_base 9: mod_base = OTHER; note = 2'-O-methylguanosine-3'-phosphate
  modified_base 10: mod_base = OTHER; note = 2'-O-methylguanosine-3'-phosphate
  modified_base 11: mod_base = OTHER; note = 2'-O-methyladenosine-3'-phosphate
  modified_base 13: mod_base = OTHER; note = 2'-O-methylguanosine-3'-phosphate
  modified_base 14: mod_base = OTHER; note = 2'-fluoroguanosine-3'-phosphate
  modified_base 15: mod_base = OTHER; note = 2'-O-methyluridine-3'-phosphate
  modified_base 16: mod_base = OTHER; note = 2'-O-methylguanosine-3'-phosphate
  modified_base 17: mod_base = OTHER; note = 2'-O-methylguanosine-3'-phosphate
  modified_base 18: mod_base = OTHER; note = 2'-O-methylcytidine-3'-phosphate
  modified_base 19: mod_base = OTHER; note = 2'-O-methylcytidine-3'-phosphate
  modified_base 20: mod_base = OTHER; note = 2'-O-methylcytidine-3'-phosphate
  modified_base 21: mod_base = OTHER; note = 2'-O-methyluridine-3'-phosphorothioate
  modified_base 22: mod_base = OTHER; note = 2'-O-methylcytidine-3'-phosphorothioate
  modified_base 23: mod_base = OTHER; note = 2'-O-methyladenosine-3'-phosphate
  misc_feature 1: note = RNA
  misc_feature 2: note = DNA
  misc_feature 3..4: note = RNA
  misc_feature 5: note = DNA
  misc_feature 6: note = RNA
  misc_feature 7: note = DNA
  misc_feature 8..11: note = RNA
  misc_feature 12: note = DNA
  misc_feature 13..23: note = RNA
aaggcagaggatggtggccctca

SEQ ID NO: 2341 - DNA, 23 bp, synthetic construct
  source 1..23: mol_type = other DNA
  modified_base 1: mod_base = OTHER; note = 2'-O-methyladenosine-3'-phosphorothioate
  modified_base 2: mod_base = OTHER; note = 2'-deoxyguanosine-3'-phosphorothioate
  modified_base 3: mod_base = OTHER; note = 2'-O-methyluridine-3'-phosphate
  modified_base 4: mod_base = OTHER; note = 2'-O-methylguanosine-3'-phosphate
  modified_base 6: mod_base = OTHER; note = 2'-O-methyladenosine-3'-phosphate
  modified_base 8: mod_base = OTHER; note = 2'-O-methylguanosine-3'-phosphate
  modified_base 9: mod_base = OTHER; note = 2'-O-methyluridine-3'-phosphate
  modified_base 10: mod_base = OTHER; note = 2'-O-methyladenosine-3'-phosphate
  modified_base 11: mod_base = OTHER; note = 2'-O-methylcytidine-3'-phosphate
  modified_base 13: mod_base = OTHER; note = 2'-O-methylcytidine-3'-phosphate
  modified_base 14: mod_base = OTHER; note = 2'-fluorocytidine-3'-phosphate
  modified_base 15: mod_base = OTHER; note = 2'-O-methylcytidine-3'-phosphate
  modified_base 16: mod_base = OTHER; note = 2'-O-methylguanosine-3'-phosphate
  modified_base 17: mod_base = OTHER; note = 2'-O-methylguanosine-3'-phosphate
  modified_base 18: mod_base = OTHER; note = 2'-O-methyluridine-3'-phosphate
  modified_base 19: mod_base = OTHER; note = 2'-O-methylcytidine-3'-phosphate
  modified_base 20: mod_base = OTHER; note = 2'-O-methyladenosine-3'-phosphate
  modified_base 21: mod_base = OTHER; note = 2'-O-methylcytidine-3'-phosphorothioate
  modified_base 22: mod_base = OTHER; note = 2'-O-methylcytidine-3'-phosphorothioate
  modified_base 23: mod_base = OTHER; note = 2'-O-methyluridine-3'-phosphate
  misc_feature 1: note = RNA
  misc_feature 2: note = DNA
  misc_feature 3..4: note = RNA
  misc_feature 5: note = DNA
  misc_feature 6: note = RNA
  misc_feature 7: note = DNA
  misc_feature 8..11: note = RNA
  misc_feature 12: note = DNA
  misc_feature 13..23: note = RNA
agtgtatgtacacccggtcacct

SEQ ID NO: 2342 - DNA, 23 bp, synthetic construct
  source 1..23: mol_type = other DNA
  modified_base 1: mod_base = OTHER; note = 2'-O-methyladenosine-3'-phosphorothioate
  modified_base 2: mod_base = OTHER; note = 2'-deoxythimidine-3'-phosphorothioate
  modified_base 3: mod_base = OTHER; note = 2'-O-methylguanosine-3'-phosphate
  modified_base 4: mod_base = OTHER; note = 2'-O-methyluridine-3'-phosphate
  modified_base 6: mod_base = OTHER; note = 2'-O-methylguanosine-3'-phosphate
  modified_base 8: mod_base = OTHER; note = 2'-O-methyluridine-3'-phosphate
  modified_base 9: mod_base = OTHER; note = 2'-O-methylguanosine-3'-phosphate
  modified_base 10: mod_base = OTHER; note = 2'-O-methyladenosine-3'-phosphate
  modified_base 11: mod_base = OTHER; note = 2'-O-methylcytidine-3'-phosphate
  modified_base 13: mod_base = OTHER; note = 2'-O-methyladenosine-3'-phosphate
  modified_base 14: mod_base = OTHER; note = 2'-fluoroguanosine-3'-phosphate
  modified_base 15: mod_base = OTHER; note = 2'-O-methylguanosine-3'-phosphate
  modified_base 16: mod_base = OTHER; note = 2'-O-methyluridine-3'-phosphate
  modified_base 17: mod_base = OTHER; note = 2'-O-methylguanosine-3'-phosphate
  modified_base 18: mod_base = OTHER; note = 2'-O-methylguanosine-3'-phosphate
  modified_base 19: mod_base = OTHER; note = 2'-O-methyladenosine-3'-phosphate
  modified_base 20: mod_base = OTHER; note = 2'-O-methyladenosine-3'-phosphate
  modified_base 21: mod_base = OTHER; note = 2'-O-methylguanosine-3'-phosphorothioate
  modified_base 22: mod_base = OTHER; note = 2'-O-methylguanosine-3'-phosphorothioate
  modified_base 23: mod_base = OTHER; note = 2'-O-methylguanosine-3'-phosphate
  misc_feature 1: note = RNA
  misc_feature 2: note = DNA
  misc_feature 3..4: note = RNA
  misc_feature 5: note = DNA
  misc_feature 6: note = RNA
  misc_feature 7: note = DNA
  misc_feature 8..11: note = RNA
  misc_feature 12: note = DNA
  misc_feature 13..23: note = RNA
atgtggatgacgaggtggaaggg

SEQ ID NO: 2343 - DNA, 23 bp, synthetic construct
  source 1..23: mol_type = other DNA
  modified_base 1: mod_base = OTHER; note = 2'-O-methyladenosine-3'-phosphorothioate
  modified_base 2: mod_base = OTHER; note = 2'-deoxythimidine-3'-phosphorothioate
  modified_base 3: mod_base = OTHER; note = 2'-O-methyluridine-3'-phosphate
  modified_base 4: mod_base = OTHER; note = 2'-O-methylguanosine-3'-phosphate
  modified_base 6: mod_base = OTHER; note = 2'-O-methylguanosine-3'-phosphate
  modified_base 8: mod_base = OTHER; note = 2'-O-methyladenosine-3'-phosphate
  modified_base 9: mod_base = OTHER; note = 2'-O-methyluridine-3'-phosphate
  modified_base 10: mod_base = OTHER; note = 2'-O-methylguanosine-3'-phosphate
  modified_base 11: mod_base = OTHER; note = 2'-O-methyladenosine-3'-phosphate
  modified_base 13: mod_base = OTHER; note = 2'-O-methylguanosine-3'-phosphate
  modified_base 14: mod_base = OTHER; note = 2'-fluoroadenosine-3'-phosphate
  modified_base 15: mod_base = OTHER; note = 2'-O-methylguanosine-3'-phosphate
  modified_base 16: mod_base = OTHER; note = 2'-O-methylguanosine-3'-phosphate
  modified_base 17: mod_base = OTHER; note = 2'-O-methyluridine-3'-phosphate
  modified_base 18: mod_base = OTHER; note = 2'-O-methylguanosine-3'-phosphate
  modified_base 19: mod_base = OTHER; note = 2'-O-methylguanosine-3'-phosphate
  modified_base 20: mod_base = OTHER; note = 2'-O-methyladenosine-3'-phosphate
  modified_base 21: mod_base = OTHER; note = 2'-O-methyladenosine-3'-phosphorothioate
  modified_base 22: mod_base = OTHER; note = 2'-O-methylguanosine-3'-phosphorothioate
  modified_base 23: mod_base = OTHER; note = 2'-O-methylguanosine-3'-phosphate
  misc_feature 1: note = RNA
  misc_feature 2: note = DNA
  misc_feature 3..4: note = RNA
  misc_feature 5: note = DNA
  misc_feature 6: note = RNA
  misc_feature 7: note = DNA
  misc_feature 8..11: note = RNA
  misc_feature 12: note = DNA
  misc_feature 13..23: note = RNA
attgtggatgacgaggtggaagg

SEQ ID NO: 2344 - DNA, 23 bp, synthetic construct
  source 1..23: mol_type = other DNA
  modified_base 1: mod_base = OTHER; note = 2'-O-methyladenosine-3'-phosphorothioate
  modified_base 2: mod_base = OTHER; note = 2'-deoxyadenosine-3'-phosphorothioate
  modified_base 3: mod_base = OTHER; note = 2'-O-methyluridine-3'-phosphate
  modified_base 4: mod_base = OTHER; note = 2'-O-methyluridine-3'-phosphate
  modified_base 6: mod_base = OTHER; note = 2'-O-methyluridine-3'-phosphate
  modified_base 8: mod_base = OTHER; note = 2'-O-methylguanosine-3'-phosphate
  modified_base 9: mod_base = OTHER; note = 2'-O-methyladenosine-3'-phosphate
  modified_base 10: mod_base = OTHER; note = 2'-O-methyluridine-3'-phosphate
  modified_base 11: mod_base = OTHER; note = 2'-O-methylguanosine-3'-phosphate
  modified_base 13: mod_base = OTHER; note = 2'-O-methylcytidine-3'-phosphate
  modified_base 14: mod_base = OTHER; note = 2'-fluoroguanosine-3'-phosphate
  modified_base 15: mod_base = OTHER; note = 2'-O-methyladenosine-3'-phosphate
  modified_base 16: mod_base = OTHER; note = 2'-O-methylguanosine-3'-phosphate
  modified_base 17: mod_base = OTHER; note = 2'-O-methylguanosine-3'-phosphate
  modified_base 18: mod_base = OTHER; note = 2'-O-methyluridine-3'-phosphate
  modified_base 19: mod_base = OTHER; note = 2'-O-methylguanosine-3'-phosphate
  modified_base 20: mod_base = OTHER; note = 2'-O-methylguanosine-3'-phosphate
  modified_base 21: mod_base = OTHER; note = 2'-O-methyladenosine-3'-phosphorothioate
  modified_base 22: mod_base = OTHER; note = 2'-O-methyladenosine-3'-phosphorothioate
  modified_base 23: mod_base = OTHER; note = 2'-O-methylguanosine-3'-phosphate
  misc_feature 1: note = RNA
  misc_feature 2: note = DNA
  misc_feature 3..4: note = RNA
  misc_feature 5: note = DNA
  misc_feature 6: note = RNA
  misc_feature 7: note = DNA
  misc_feature 8..11: note = RNA
  misc_feature 12: note = DNA
  misc_feature 13..23: note = RNA
aattgtggatgacgaggtggaag

SEQ ID NO: 2345 - DNA, 23 bp, synthetic construct
  source 1..23: mol_type = other DNA
  modified_base 1: mod_base = OTHER; note = 2'-O-methyladenosine-3'-phosphorothioate
  modified_base 2: mod_base = OTHER; note = 2'-deoxycytidine-3'-phosphorothioate
  modified_base 3: mod_base = OTHER; note = 2'-O-methyladenosine-3'-phosphate
  modified_base 4: mod_base = OTHER; note = 2'-O-methyluridine-3'-phosphate
  modified_base 6: mod_base = OTHER; note = 2'-O-methylguanosine-3'-phosphate
  modified_base 8: mod_base = OTHER; note = 2'-O-methylguanosine-3'-phosphate
  modified_base 9: mod_base = OTHER; note = 2'-O-methylguanosine-3'-phosphate
  modified_base 10: mod_base = OTHER; note = 2'-O-methyladenosine-3'-phosphate
  modified_base 11: mod_base = OTHER; note = 2'-O-methyluridine-3'-phosphate
  modified_base 13: mod_base = OTHER; note = 2'-O-methyladenosine-3'-phosphate
  modified_base 14: mod_base = OTHER; note = 2'-fluorocytidine-3'-phosphate
  modified_base 15: mod_base = OTHER; note = 2'-O-methylguanosine-3'-phosphate
  modified_base 16: mod_base = OTHER; note = 2'-O-methyladenosine-3'-phosphate
  modified_base 17: mod_base = OTHER; note = 2'-O-methylguanosine-3'-phosphate
  modified_base 18: mod_base = OTHER; note = 2'-O-methylguanosine-3'-phosphate
  modified_base 19: mod_base = OTHER; note = 2'-O-methyluridine-3'-phosphate
  modified_base 20: mod_base = OTHER; note = 2'-O-methylguanosine-3'-phosphate
  modified_base 21: mod_base = OTHER; note = 2'-O-methylguanosine-3'-phosphorothioate
  modified_base 22: mod_base = OTHER; note = 2'-O-methyladenosine-3'-phosphorothioate
  modified_base 23: mod_base = OTHER; note = 2'-O-methyladenosine-3'-phosphate
  misc_feature 1: note = RNA
  misc_feature 2: note = DNA
  misc_feature 3..4: note = RNA
  misc_feature 5: note = DNA
  misc_feature 6: note = RNA
  misc_feature 7: note = DNA
  misc_feature 8..11: note = RNA
  misc_feature 12: note = DNA
  misc_feature 13..23: note = RNA
acattgtggatgacgaggtggaa

SEQ ID NO: 2346 - DNA, 23 bp, synthetic construct
  source 1..23: mol_type = other DNA
  modified_base 1: mod_base = OTHER; note = 2'-O-methyladenosine-3'-phosphorothioate
  modified_base 2: mod_base = OTHER; note = 2'-deoxythimidine-3'-phosphorothioate
  modified_base 3: mod_base = OTHER; note = 2'-O-methylcytidine-3'-phosphate
  modified_base 4: mod_base = OTHER; note = 2'-O-methyladenosine-3'-phosphate
  modified_base 6: mod_base = OTHER; note = 2'-O-methyluridine-3'-phosphate
  modified_base 8: mod_base = OTHER; note = 2'-O-methyluridine-3'-phosphate
  modified_base 9: mod_base = OTHER; note = 2'-O-methylguanosine-3'-phosphate
  modified_base 10: mod_base = OTHER; note = 2'-O-methylguanosine-3'-phosphate
  modified_base 11: mod_base = OTHER; note = 2'-O-methyladenosine-3'-phosphate
  modified_base 13: mod_base = OTHER; note = 2'-O-methylguanosine-3'-phosphate
  modified_base 14: mod_base = OTHER; note = 2'-fluoroadenosine-3'-phosphate
  modified_base 15: mod_base = OTHER; note = 2'-O-methylcytidine-3'-phosphate
  modified_base 16: mod_base = OTHER; note = 2'-O-methylguanosine-3'-phosphate
  modified_base 17: mod_base = OTHER; note = 2'-O-methyladenosine-3'-phosphate
  modified_base 18: mod_base = OTHER; note = 2'-O-methylguanosine-3'-phosphate
  modified_base 19: mod_base = OTHER; note = 2'-O-methylguanosine-3'-phosphate
  modified_base 20: mod_base = OTHER; note = 2'-O-methyluridine-3'-phosphate
  modified_base 21: mod_base = OTHER; note = 2'-O-methylguanosine-3'-phosphorothioate
  modified_base 22: mod_base = OTHER; note = 2'-O-methylguanosine-3'-phosphorothioate
  modified_base 23: mod_base = OTHER; note = 2'-O-methyladenosine-3'-phosphate
  misc_feature 1: note = RNA
  misc_feature 2: note = DNA
  misc_feature 3..4: note = RNA
  misc_feature 5: note = DNA
  misc_feature 6: note = RNA
  misc_feature 7: note = DNA
  misc_feature 8..11: note = RNA
  misc_feature 12: note = DNA
  misc_feature 13..23: note = RNA
atcattgtggatgacgaggtgga

SEQ ID NO: 2347 - DNA, 23 bp, synthetic construct
  source 1..23: mol_type = other DNA
  modified_base 1: mod_base = OTHER; note = 2'-O-methyladenosine-3'-phosphorothioate
  modified_base 2: mod_base = OTHER; note = 2'-deoxycytidine-3'-phosphorothioate
  modified_base 3: mod_base = OTHER; note = 2'-O-methyluridine-3'-phosphate
  modified_base 4: mod_base = OTHER; note = 2'-O-methylcytidine-3'-phosphate
  modified_base 6: mod_base = OTHER; note = 2'-O-methyluridine-3'-phosphate
  modified_base 8: mod_base = OTHER; note = 2'-O-methylguanosine-3'-phosphate
  modified_base 9: mod_base = OTHER; note = 2'-O-methyluridine-3'-phosphate
  modified_base 10: mod_base = OTHER; note = 2'-O-methylguanosine-3'-phosphate
  modified_base 11: mod_base = OTHER; note = 2'-O-methylguanosine-3'-phosphate
  modified_base 13: mod_base = OTHER; note = 2'-O-methyluridine-3'-phosphate
  modified_base 14: mod_base = OTHER; note = 2'-fluoroguanosine-3'-phosphate
  modified_base 15: mod_base = OTHER; note = 2'-O-methyladenosine-3'-phosphate
  modified_base 16: mod_base = OTHER; note = 2'-O-methylcytidine-3'-phosphate
  modified_base 17: mod_base = OTHER; note = 2'-O-methylguanosine-3'-phosphate
  modified_base 18: mod_base = OTHER; note = 2'-O-methyladenosine-3'-phosphate
  modified_base 19: mod_base = OTHER; note = 2'-O-methylguanosine-3'-phosphate
  modified_base 20: mod_base = OTHER; note = 2'-O-methylguanosine-3'-phosphate
  modified_base 21: mod_base = OTHER; note = 2'-O-methyluridine-3'-phosphorothioate
  modified_base 22: mod_base = OTHER; note = 2'-O-methylguanosine-3'-phosphorothioate
  modified_base 23: mod_base = OTHER; note = 2'-O-methylguanosine-3'-phosphate
  misc_feature 1: note = RNA
  misc_feature 2: note = DNA
  misc_feature 3..4: note = RNA
  misc_feature 5: note = DNA
  misc_feature 6: note = RNA
  misc_feature 7: note = DNA
  misc_feature 8..11: note = RNA
  misc_feature 12: note = DNA
  misc_feature 13..23: note = RNA
actcattgtggatgacgaggtgg

SEQ ID NO: 2348 - DNA, 23 bp, synthetic construct
  source 1..23: mol_type = other DNA
  modified_base 1: mod_base = OTHER; note = 2'-O-methyladenosine-3'-phosphorothioate
  modified_base 2: mod_base = OTHER; note = 2'-deoxythimidine-3'-phosphorothioate
  modified_base 3: mod_base = OTHER; note = 2'-O-methylcytidine-3'-phosphate
  modified_base 4: mod_base = OTHER; note = 2'-O-methyluridine-3'-phosphate
  modified_base 6: mod_base = OTHER; note = 2'-O-methyladenosine-3'-phosphate
  modified_base 8: mod_base = OTHER; note = 2'-O-methyluridine-3'-phosphate
  modified_base 9: mod_base = OTHER; note = 2'-O-methylguanosine-3'-phosphate
  modified_base 10: mod_base = OTHER; note = 2'-O-methyluridine-3'-phosphate
  modified_base 11: mod_base = OTHER; note = 2'-O-methylguanosine-3'-phosphate
  modified_base 13: mod_base = OTHER; note = 2'-O-methyladenosine-3'-phosphate
  modified_base 14: mod_base = OTHER; note = 2'-fluorouridine-3'-phosphate
  modified_base 15: mod_base = OTHER; note = 2'-O-methylguanosine-3'-phosphate
  modified_base 16: mod_base = OTHER; note = 2'-O-methyladenosine-3'-phosphate
  modified_base 17: mod_base = OTHER; note = 2'-O-methylcytidine-3'-phosphate
  modified_base 18: mod_base = OTHER; note = 2'-O-methylguanosine-3'-phosphate
  modified_base 19: mod_base = OTHER; note = 2'-O-methyladenosine-3'-phosphate
  modified_base 20: mod_base = OTHER; note = 2'-O-methylguanosine-3'-phosphate
  modified_base 21: mod_base = OTHER; note = 2'-O-methylguanosine-3'-phosphorothioate
  modified_base 22: mod_base = OTHER; note = 2'-O-methyluridine-3'-phosphorothioate
  modified_base 23: mod_base = OTHER; note = 2'-O-methylguanosine-3'-phosphate
  misc_feature 1: note = RNA
  misc_feature 2: note = DNA
  misc_feature 3..4: note = RNA
  misc_feature 5: note = DNA
  misc_feature 6: note = RNA
  misc_feature 7: note = DNA
  misc_feature 8..11: note = RNA
  misc_feature 12: note = DNA
  misc_feature 13..23: note = RNA
atctcattgtggatgacgaggtg

SEQ ID NO: 2349 - DNA, 23 bp, synthetic construct
  source 1..23: mol_type = other DNA
  modified_base 1: mod_base = OTHER; note = 2'-O-methyladenosine-3'-phosphorothioate
  modified_base 2: mod_base = OTHER; note = 2'-deoxycytidine-3'-phosphorothioate
  modified_base 3: mod_base = OTHER; note = 2'-O-methyluridine-3'-phosphate
  modified_base 4: mod_base = OTHER; note = 2'-O-methylcytidine-3'-phosphate
  modified_base 6: mod_base = OTHER; note = 2'-O-methylcytidine-3'-phosphate
  modified_base 8: mod_base = OTHER; note = 2'-O-methyluridine-3'-phosphate
  modified_base 9: mod_base = OTHER; note = 2'-O-methyluridine-3'-phosphate
  modified_base 10: mod_base = OTHER; note = 2'-O-methylguanosine-3'-phosphate
  modified_base 11: mod_base = OTHER; note = 2'-O-methyluridine-3'-phosphate
  modified_base 13: mod_base = OTHER; note = 2'-O-methylguanosine-3'-phosphate
  modified_base 14: mod_base = OTHER; note = 2'-fluoroadenosine-3'-phosphate
  modified_base 15: mod_base = OTHER; note = 2'-O-methyluridine-3'-phosphate
  modified_base 16: mod_base = OTHER; note = 2'-O-methylguanosine-3'-phosphate
  modified_base 17: mod_base = OTHER; note = 2'-O-methyladenosine-3'-phosphate
  modified_base 18: mod_base = OTHER; note = 2'-O-methylcytidine-3'-phosphate
  modified_base 19: mod_base = OTHER; note = 2'-O-methylguanosine-3'-phosphate
  modified_base 20: mod_base = OTHER; note = 2'-O-methyladenosine-3'-phosphate
  modified_base 21: mod_base = OTHER; note = 2'-O-methylguanosine-3'-phosphorothioate
  modified_base 22: mod_base = OTHER; note = 2'-O-methylguanosine-3'-phosphorothioate
  modified_base 23: mod_base = OTHER; note = 2'-O-methyluridine-3'-phosphate
  misc_feature 1: note = RNA
  misc_feature 2: note = DNA
  misc_feature 3..4: note = RNA
  misc_feature 5: note = DNA
  misc_feature 6: note = RNA
  misc_feature 7: note = DNA
  misc_feature 8..11: note = RNA
  misc_feature 12: note = DNA
  misc_feature 13..23: note = RNA
actctcattgtggatgacgaggt

SEQ ID NO: 2350 - DNA, 23 bp, synthetic construct
  source 1..23: mol_type = other DNA
  modified_base 1: mod_base = OTHER; note = 2'-O-methyladenosine-3'-phosphorothioate
  modified_base 2: mod_base = OTHER; note = 2'-deoxyadenosine-3'-phosphorothioate
  modified_base 3: mod_base = OTHER; note = 2'-O-methylcytidine-3'-phosphate
  modified_base 4: mod_base = OTHER; note = 2'-O-methyluridine-3'-phosphate
  modified_base 6: mod_base = OTHER; note = 2'-O-methyluridine-3'-phosphate
  modified_base 8: mod_base = OTHER; note = 2'-O-methyladenosine-3'-phosphate
  modified_base 9: mod_base = OTHER; note = 2'-O-methyluridine-3'-phosphate
  modified_base 10: mod_base = OTHER; note = 2'-O-methyluridine-3'-phosphate
  modified_base 11: mod_base = OTHER; note = 2'-O-methylguanosine-3'-phosphate
  modified_base 13: mod_base = OTHER; note = 2'-O-methylguanosine-3'-phosphate
  modified_base 14: mod_base = OTHER; note = 2'-fluoroguanosine-3'-phosphate
  modified_base 15: mod_base = OTHER; note = 2'-O-methyladenosine-3'-phosphate
  modified_base 16: mod_base = OTHER; note = 2'-O-methyluridine-3'-phosphate
  modified_base 17: mod_base = OTHER; note = 2'-O-methylguanosine-3'-phosphate
  modified_base 18: mod_base = OTHER; note = 2'-O-methyladenosine-3'-phosphate
  modified_base 19: mod_base = OTHER; note = 2'-O-methylcytidine-3'-phosphate
  modified_base 20: mod_base = OTHER; note = 2'-O-methylguanosine-3'-phosphate
  modified_base 21: mod_base = OTHER; note = 2'-O-methyladenosine-3'-phosphorothioate
  modified_base 22: mod_base = OTHER; note = 2'-O-methylguanosine-3'-phosphorothioate
  modified_base 23: mod_base = OTHER; note = 2'-O-methylguanosine-3'-phosphate
  misc_feature 1: note = RNA
  misc_feature 2: note = DNA
  misc_feature 3..4: note = RNA
  misc_feature 5: note = DNA
  misc_feature 6: note = RNA
  misc_feature 7: note = DNA
  misc_feature 8..11: note = RNA
  misc_feature 12: note = DNA
  misc_feature 13..23: note = RNA
aactctcattgtggatgacgagg

SEQ ID NO: 2351 - DNA, 23 bp, synthetic construct
  source 1..23: mol_type = other DNA
  modified_base 1: mod_base = OTHER; note = 2'-O-methyladenosine-3'-phosphorothioate
  modified_base 2: mod_base = OTHER; note = 2'-deoxythimidine-3'-phosphorothioate
  modified_base 3: mod_base = OTHER; note = 2'-O-methyladenosine-3'-phosphate
  modified_base 4: mod_base = OTHER; note = 2'-O-methylcytidine-3'-phosphate
  modified_base 6: mod_base = OTHER; note = 2'-O-methylcytidine-3'-phosphate
  modified_base 8: mod_base = OTHER; note = 2'-O-methylcytidine-3'-phosphate
  modified_base 9: mod_base = OTHER; note = 2'-O-methyladenosine-3'-phosphate
  modified_base 10: mod_base = OTHER; note = 2'-O-methyluridine-3'-phosphate
  modified_base 11: mod_base = OTHER; note = 2'-O-methyluridine-3'-phosphate
  modified_base 13: mod_base = OTHER; note = 2'-O-methyluridine-3'-phosphate
  modified_base 14: mod_base = OTHER; note = 2'-fluoroguanosine-3'-phosphate
  modified_base 15: mod_base = OTHER; note = 2'-O-methylguanosine-3'-phosphate
  modified_base 16: mod_base = OTHER; note = 2'-O-methyladenosine-3'-phosphate
  modified_base 17: mod_base = OTHER; note = 2'-O-methyluridine-3'-phosphate
  modified_base 18: mod_base = OTHER; note = 2'-O-methylguanosine-3'-phosphate
  modified_base 19: mod_base = OTHER; note = 2'-O-methyladenosine-3'-phosphate
  modified_base 20: mod_base = OTHER; note = 2'-O-methylcytidine-3'-phosphate
  modified_base 21: mod_base = OTHER; note = 2'-O-methylguanosine-3'-phosphorothioate
  modified_base 22: mod_base = OTHER; note = 2'-O-methyladenosine-3'-phosphorothioate
  modified_base 23: mod_base = OTHER; note = 2'-O-methylguanosine-3'-phosphate
  misc_feature 1: note = RNA
  misc_feature 2: note = DNA
  misc_feature 3..4: note = RNA
  misc_feature 5: note = DNA
  misc_feature 6: note = RNA
  misc_feature 7: note = DNA
  misc_feature 8..11: note = RNA
  misc_feature 12: note = DNA
  misc_feature 13..23: note = RNA
atactctcattgtggatgacgag

SEQ ID NO: 2352 - DNA, 23 bp, synthetic construct
  source 1..23: mol_type = other DNA
  modified_base 1: mod_base = OTHER; note = 2'-O-methyladenosine-3'-phosphorothioate
  modified_base 2: mod_base = OTHER; note = 2'-deoxyguanosine-3'-phosphorothioate
  modified_base 3: mod_base = OTHER; note = 2'-O-methyluridine-3'-phosphate
  modified_base 4: mod_base = OTHER; note = 2'-O-methyladenosine-3'-phosphate
  modified_base 6: mod_base = OTHER; note = 2'-O-methyluridine-3'-phosphate
  modified_base 8: mod_base = OTHER; note = 2'-O-methyluridine-3'-phosphate
  modified_base 9: mod_base = OTHER; note = 2'-O-methylcytidine-3'-phosphate
  modified_base 10: mod_base = OTHER; note = 2'-O-methyladenosine-3'-phosphate
  modified_base 11: mod_base = OTHER; note = 2'-O-methyluridine-3'-phosphate
  modified_base 13: mod_base = OTHER; note = 2'-O-methylguanosine-3'-phosphate
  modified_base 14: mod_base = OTHER; note = 2'-fluorouridine-3'-phosphate
  modified_base 15: mod_base = OTHER; note = 2'-O-methylguanosine-3'-phosphate
  modified_base 16: mod_base = OTHER; note = 2'-O-methylguanosine-3'-phosphate
  modified_base 17: mod_base = OTHER; note = 2'-O-methyladenosine-3'-phosphate
  modified_base 18: mod_base = OTHER; note = 2'-O-methyluridine-3'-phosphate
  modified_base 19: mod_base = OTHER; note = 2'-O-methylguanosine-3'-phosphate
  modified_base 20: mod_base = OTHER; note = 2'-O-methyladenosine-3'-phosphate
  modified_base 21: mod_base = OTHER; note = 2'-O-methylcytidine-3'-phosphorothioate
  modified_base 22: mod_base = OTHER; note = 2'-O-methylguanosine-3'-phosphorothioate
  modified_base 23: mod_base = OTHER; note = 2'-O-methyladenosine-3'-phosphate
  misc_feature 1: note = RNA
  misc_feature 2: note = DNA
  misc_feature 3..4: note = RNA
  misc_feature 5: note = DNA
  misc_feature 6: note = RNA
  misc_feature 7: note = DNA
  misc_feature 8..11: note = RNA
  misc_feature 12: note = DNA
  misc_feature 13..23: note = RNA
agtactctcattgtggatgacga

SEQ ID NO: 2353 - DNA, 23 bp, synthetic construct
  source 1..23: mol_type = other DNA
  modified_base 1: mod_base = OTHER; note = 2'-O-methyladenosine-3'-phosphorothioate
  modified_base 2: mod_base = OTHER; note = 2'-deoxyguanosine-3'-phosphorothioate
  modified_base 3: mod_base = OTHER; note = 2'-O-methylguanosine-3'-phosphate
  modified_base 4: mod_base = OTHER; note = 2'-O-methyluridine-3'-phosphate
  modified_base 6: mod_base = OTHER; note = 2'-O-methylcytidine-3'-phosphate
  modified_base 8: mod_base = OTHER; note = 2'-O-methylcytidine-3'-phosphate
  modified_base 9: mod_base = OTHER; note = 2'-O-methyluridine-3'-phosphate
  modified_base 10: mod_base = OTHER; note = 2'-O-methylcytidine-3'-phosphate
  modified_base 11: mod_base = OTHER; note = 2'-O-methyladenosine-3'-phosphate
  modified_base 13: mod_base = OTHER; note = 2'-O-methyluridine-3'-phosphate
  modified_base 14: mod_base = OTHER; note = 2'-fluoroguanosine-3'-phosphate
  modified_base 15: mod_base = OTHER; note = 2'-O-methyluridine-3'-phosphate
  modified_base 16: mod_base = OTHER; note = 2'-O-methylguanosine-3'-phosphate
  modified_base 17: mod_base = OTHER; note = 2'-O-methylguanosine-3'-phosphate
  modified_base 18: mod_base = OTHER; note = 2'-O-methyladenosine-3'-phosphate
  modified_base 19: mod_base = OTHER; note = 2'-O-methyluridine-3'-phosphate
  modified_base 20: mod_base = OTHER; note = 2'-O-methylguanosine-3'-phosphate
  modified_base 21: mod_base = OTHER; note = 2'-O-methyladenosine-3'-phosphorothioate
  modified_base 22: mod_base = OTHER; note = 2'-O-methylcytidine-3'-phosphorothioate
  modified_base 23: mod_base = OTHER; note = 2'-O-methylguanosine-3'-phosphate
  misc_feature 1: note = RNA
  misc_feature 2: note = DNA
  misc_feature 3..4: note = RNA
  misc_feature 5: note = DNA
  misc_feature 6: note = RNA
  misc_feature 7: note = DNA
  misc_feature 8..11: note = RNA
  misc_feature 12: note = DNA
  misc_feature 13..23: note = RNA
aggtactctcattgtggatgacg

SEQ ID NO: 2354 - DNA, 23 bp, synthetic construct
  source 1..23: mol_type = other DNA
  modified_base 1: mod_base = OTHER; note = 2'-O-methyladenosine-3'-phosphorothioate
  modified_base 2: mod_base = OTHER; note = 2'-deoxyadenosine-3'-phosphorothioate
  modified_base 3: mod_base = OTHER; note = 2'-O-methylguanosine-3'-phosphate
  modified_base 4: mod_base = OTHER; note = 2'-O-methylguanosine-3'-phosphate
  modified_base 6: mod_base = OTHER; note = 2'-O-methyladenosine-3'-phosphate
  modified_base 8: mod_base = OTHER; note = 2'-O-methyluridine-3'-phosphate
  modified_base 9: mod_base = OTHER; note = 2'-O-methylcytidine-3'-phosphate
  modified_base 10: mod_base = OTHER; note = 2'-O-methyluridine-3'-phosphate
  modified_base 11: mod_base = OTHER; note = 2'-O-methylcytidine-3'-phosphate
  modified_base 13: mod_base = OTHER; note = 2'-O-methyluridine-3'-phosphate
  modified_base 14: mod_base = OTHER; note = 2'-fluorouridine-3'-phosphate
  modified_base 15: mod_base = OTHER; note = 2'-O-methylguanosine-3'-phosphate
  modified_base 16: mod_base = OTHER; note = 2'-O-methyluridine-3'-phosphate
  modified_base 17: mod_base = OTHER; note = 2'-O-methylguanosine-3'-phosphate
  modified_base 18: mod_base = OTHER; note = 2'-O-methylguanosine-3'-phosphate
  modified_base 19: mod_base = OTHER; note = 2'-O-methyladenosine-3'-phosphate
  modified_base 20: mod_base = OTHER; note = 2'-O-methyluridine-3'-phosphate
  modified_base 21: mod_base = OTHER; note = 2'-O-methylguanosine-3'-phosphorothioate
  modified_base 22: mod_base = OTHER; note = 2'-O-methyladenosine-3'-phosphorothioate
  modified_base 23: mod_base = OTHER; note = 2'-O-methylcytidine-3'-phosphate
  misc_feature 1: note = RNA
  misc_feature 2: note = DNA
  misc_feature 3..4: note = RNA
  misc_feature 5: note = DNA
  misc_feature 6: note = RNA
  misc_feature 7: note = DNA
  misc_feature 8..11: note = RNA
  misc_feature 12: note = DNA
  misc_feature 13..23: note = RNA
aaggtactctcattgtggatgac

SEQ ID NO: 2355 - DNA, 23 bp, synthetic construct
  source 1..23: mol_type = other DNA
  modified_base 1: mod_base = OTHER; note = 2'-O-methyladenosine-3'-phosphorothioate
  modified_base 2: mod_base = OTHER; note = 2'-deoxycytidine-3'-phosphorothioate
  modified_base 3: mod_base = OTHER; note = 2'-O-methyladenosine-3'-phosphate
  modified_base 4: mod_base = OTHER; note = 2'-O-methylguanosine-3'-phosphate
  modified_base 6: mod_base = OTHER; note = 2'-O-methyluridine-3'-phosphate
  modified_base 8: mod_base = OTHER; note = 2'-O-methylcytidine-3'-phosphate
  modified_base 9: mod_base = OTHER; note = 2'-O-methyluridine-3'-phosphate
  modified_base 10: mod_base = OTHER; note = 2'-O-methylcytidine-3'-phosphate
  modified_base 11: mod_base = OTHER; note = 2'-O-methyluridine-3'-phosphate
  modified_base 13: mod_base = OTHER; note = 2'-O-methyladenosine-3'-phosphate
  modified_base 14: mod_base = OTHER; note = 2'-fluorouridine-3'-phosphate
  modified_base 15: mod_base = OTHER; note = 2'-O-methyluridine-3'-phosphate
  modified_base 16: mod_base = OTHER; note = 2'-O-methylguanosine-3'-phosphate
  modified_base 17: mod_base = OTHER; note = 2'-O-methyluridine-3'-phosphate
  modified_base 18: mod_base = OTHER; note = 2'-O-methylguanosine-3'-phosphate
  modified_base 19: mod_base = OTHER; note = 2'-O-methylguanosine-3'-phosphate
  modified_base 20: mod_base = OTHER; note = 2'-O-methyladenosine-3'-phosphate
  modified_base 21: mod_base = OTHER; note = 2'-O-methyluridine-3'-phosphorothioate
  modified_base 22: mod_base = OTHER; note = 2'-O-methylguanosine-3'-phosphorothioate
  modified_base 23: mod_base = OTHER; note = 2'-O-methyladenosine-3'-phosphate
  misc_feature 1: note = RNA
  misc_feature 2: note = DNA
  misc_feature 3..4: note = RNA
  misc_feature 5: note = DNA
  misc_feature 6: note = RNA
  misc_feature 7: note = DNA
  misc_feature 8..11: note = RNA
  misc_feature 12: note = DNA
  misc_feature 13..23: note = RNA
acaggtactctcattgtggatga

SEQ ID NO: 2356 - DNA, 23 bp, synthetic construct
  source 1..23: mol_type = other DNA
  modified_base 1: mod_base = OTHER; note = 2'-O-methyladenosine-3'-phosphorothioate
  modified_base 2: mod_base = OTHER; note = 2'-deoxyadenosine-3'-phosphorothioate
  modified_base 3: mod_base = OTHER; note = 2'-O-methylcytidine-3'-phosphate
  modified_base 4: mod_base = OTHER; note = 2'-O-methyladenosine-3'-phosphate
  modified_base 6: mod_base = OTHER; note = 2'-O-methylguanosine-3'-phosphate
  modified_base 8: mod_base = OTHER; note = 2'-O-methyladenosine-3'-phosphate
  modified_base 9: mod_base = OTHER; note = 2'-O-methylcytidine-3'-phosphate
  modified_base 10: mod_base = OTHER; note = 2'-O-methyluridine-3'-phosphate
  modified_base 11: mod_base = OTHER; note = 2'-O-methylcytidine-3'-phosphate
  modified_base 13: mod_base = OTHER; note = 2'-O-methylcytidine-3'-phosphate
  modified_base 14: mod_base = OTHER; note = 2'-fluoroadenosine-3'-phosphate
  modified_base 15: mod_base = OTHER; note = 2'-O-methyluridine-3'-phosphate
  modified_base 16: mod_base = OTHER; note = 2'-O-methyluridine-3'-phosphate
  modified_base 17: mod_base = OTHER; note = 2'-O-methylguanosine-3'-phosphate
  modified_base 18: mod_base = OTHER; note = 2'-O-methyluridine-3'-phosphate
  modified_base 19: mod_base = OTHER; note = 2'-O-methylguanosine-3'-phosphate
  modified_base 20: mod_base = OTHER; note = 2'-O-methylguanosine-3'-phosphate
  modified_base 21: mod_base = OTHER; note = 2'-O-methyladenosine-3'-phosphorothioate
  modified_base 22: mod_base = OTHER; note = 2'-O-methyluridine-3'-phosphorothioate
  modified_base 23: mod_base = OTHER; note = 2'-O-methylguanosine-3'-phosphate
  misc_feature 1: note = RNA
  misc_feature 2: note = DNA
  misc_feature 3..4: note = RNA
  misc_feature 5: note = DNA
  misc_feature 6: note = RNA
  misc_feature 7: note = DNA
  misc_feature 8..11: note = RNA
  misc_feature 12: note = DNA
  misc_feature 13..23: note = RNA
aacaggtactctcattgtggatg

SEQ ID NO: 2357 - DNA, 23 bp, synthetic construct
  source 1..23: mol_type = other DNA
  modified_base 1: mod_base = OTHER; note = 2'-O-methyladenosine-3'-phosphorothioate
  modified_base 2: mod_base = OTHER; note = 2'-deoxycytidine-3'-phosphorothioate
  modified_base 3: mod_base = OTHER; note = 2'-O-methyladenosine-3'-phosphate
  modified_base 4: mod_base = OTHER; note = 2'-O-methylcytidine-3'-phosphate
  modified_base 6: mod_base = OTHER; note = 2'-O-methylguanosine-3'-phosphate
  modified_base 8: mod_base = OTHER; note = 2'-O-methyluridine-3'-phosphate
  modified_base 9: mod_base = OTHER; note = 2'-O-methyladenosine-3'-phosphate
  modified_base 10: mod_base = OTHER; note = 2'-O-methylcytidine-3'-phosphate
  modified_base 11: mod_base = OTHER; note = 2'-O-methyluridine-3'-phosphate
  modified_base 13: mod_base = OTHER; note = 2'-O-methyluridine-3'-phosphate
  modified_base 14: mod_base = OTHER; note = 2'-fluorocytidine-3'-phosphate
  modified_base 15: mod_base = OTHER; note = 2'-O-methyladenosine-3'-phosphate
  modified_base 16: mod_base = OTHER; note = 2'-O-methyluridine-3'-phosphate
  modified_base 17: mod_base = OTHER; note = 2'-O-methyluridine-3'-phosphate
  modified_base 18: mod_base = OTHER; note = 2'-O-methylguanosine-3'-phosphate
  modified_base 19: mod_base = OTHER; note = 2'-O-methyluridine-3'-phosphate
  modified_base 20: mod_base = OTHER; note = 2'-O-methylguanosine-3'-phosphate
  modified_base 21: mod_base = OTHER; note = 2'-O-methylguanosine-3'-phosphorothioate
  modified_base 22: mod_base = OTHER; note = 2'-O-methyladenosine-3'-phosphorothioate
  modified_base 23: mod_base = OTHER; note = 2'-O-methyluridine-3'-phosphate
  misc_feature 1: note = RNA
  misc_feature 2: note = DNA
  misc_feature 3..4: note = RNA
  misc_feature 5: note = DNA
  misc_feature 6: note = RNA
  misc_feature 7: note = DNA
  misc_feature 8..11: note = RNA
  misc_feature 12: note = DNA
  misc_feature 13..23: note = RNA
acacaggtactctcattgtggat

SEQ ID NO: 2358 - DNA, 23 bp, synthetic construct
  source 1..23: mol_type = other DNA
  modified_base 1: mod_base = OTHER; note = 2'-O-methyladenosine-3'-phosphorothioate
  modified_base 2: mod_base = OTHER; note = 2'-deoxythimidine-3'-phosphorothioate
  modified_base 3: mod_base = OTHER; note = 2'-O-methylcytidine-3'-phosphate
  modified_base 4: mod_base = OTHER; note = 2'-O-methyladenosine-3'-phosphate
  modified_base 6: mod_base = OTHER; note = 2'-O-methyladenosine-3'-phosphate
  modified_base 8: mod_base = OTHER; note = 2'-O-methylguanosine-3'-phosphate
  modified_base 9: mod_base = OTHER; note = 2'-O-methyluridine-3'-phosphate
  modified_base 10: mod_base = OTHER; note = 2'-O-methyladenosine-3'-phosphate
  modified_base 11: mod_base = OTHER; note = 2'-O-methylcytidine-3'-phosphate
  modified_base 13: mod_base = OTHER; note = 2'-O-methylcytidine-3'-phosphate
  modified_base 14: mod_base = OTHER; note = 2'-fluorouridine-3'-phosphate
  modified_base 15: mod_base = OTHER; note = 2'-O-methylcytidine-3'-phosphate
  modified_base 16: mod_base = OTHER; note = 2'-O-methyladenosine-3'-phosphate
  modified_base 17: mod_base = OTHER; note = 2'-O-methyluridine-3'-phosphate
  modified_base 18: mod_base = OTHER; note = 2'-O-methyluridine-3'-phosphate
  modified_base 19: mod_base = OTHER; note = 2'-O-methylguanosine-3'-phosphate
  modified_base 20: mod_base = OTHER; note = 2'-O-methyluridine-3'-phosphate
  modified_base 21: mod_base = OTHER; note = 2'-O-methylguanosine-3'-phosphorothioate
  modified_base 22: mod_base = OTHER; note = 2'-O-methylguanosine-3'-phosphorothioate
  modified_base 23: mod_base = OTHER; note = 2'-O-methyladenosine-3'-phosphate
  misc_feature 1: note = RNA
  misc_feature 2: note = DNA
  misc_feature 3..4: note = RNA
  misc_feature 5: note = DNA
  misc_feature 6: note = RNA
  misc_feature 7: note = DNA
  misc_feature 8..11: note = RNA
  misc_feature 12: note = DNA
  misc_feature 13..23: note = RNA
atcacaggtactctcattgtgga

SEQ ID NO: 2359 - DNA, 23 bp, synthetic construct
  source 1..23: mol_type = other DNA
  modified_base 1: mod_base = OTHER; note = 2'-O-methyladenosine-3'-phosphorothioate
  modified_base 2: mod_base = OTHER; note = 2'-deoxycytidine-3'-phosphorothioate
  modified_base 3: mod_base = OTHER; note = 2'-O-methyluridine-3'-phosphate
  modified_base 4: mod_base = OTHER; note = 2'-O-methylcytidine-3'-phosphate
  modified_base 6: mod_base = OTHER; note = 2'-O-methylcytidine-3'-phosphate
  modified_base 8: mod_base = OTHER; note = 2'-O-methylguanosine-3'-phosphate
  modified_base 9: mod_base = OTHER; note = 2'-O-methylguanosine-3'-phosphate
  modified_base 10: mod_base = OTHER; note = 2'-O-methyluridine-3'-phosphate
  modified_base 11: mod_base = OTHER; note = 2'-O-methyladenosine-3'-phosphate
  modified_base 13: mod_base = OTHER; note = 2'-O-methyluridine-3'-phosphate
  modified_base 14: mod_base = OTHER; note = 2'-fluorocytidine-3'-phosphate
  modified_base 15: mod_base = OTHER; note = 2'-O-methyluridine-3'-phosphate
  modified_base 16: mod_base = OTHER; note = 2'-O-methylcytidine-3'-phosphate
  modified_base 17: mod_base = OTHER; note = 2'-O-methyladenosine-3'-phosphate
  modified_base 18: mod_base = OTHER; note = 2'-O-methyluridine-3'-phosphate
  modified_base 19: mod_base = OTHER; note = 2'-O-methyluridine-3'-phosphate
  modified_base 20: mod_base = OTHER; note = 2'-O-methylguanosine-3'-phosphate
  modified_base 21: mod_base = OTHER; note = 2'-O-methyluridine-3'-phosphorothioate
  modified_base 22: mod_base = OTHER; note = 2'-O-methylguanosine-3'-phosphorothioate
  modified_base 23: mod_base = OTHER; note = 2'-O-methylguanosine-3'-phosphate
  misc_feature 1: note = RNA
  misc_feature 2: note = DNA
  misc_feature 3..4: note = RNA
  misc_feature 5: note = DNA
  misc_feature 6: note = RNA
  misc_feature 7: note = DNA
  misc_feature 8..11: note = RNA
  misc_feature 12: note = DNA
  misc_feature 13..23: note = RNA
actcacaggtactctcattgtgg

SEQ ID NO: 2360 - DNA, 23 bp, synthetic construct
  source 1..23: mol_type = other DNA
  modified_base 1: mod_base = OTHER; note = 2'-O-methyladenosine-3'-phosphorothioate
  modified_base 2: mod_base = OTHER; note = 2'-deoxyguanosine-3'-phosphorothioate
  modified_base 3: mod_base = OTHER; note = 2'-O-methylcytidine-3'-phosphate
  modified_base 4: mod_base = OTHER; note = 2'-O-methyluridine-3'-phosphate
  modified_base 6: mod_base = OTHER; note = 2'-O-methyladenosine-3'-phosphate
  modified_base 8: mod_base = OTHER; note = 2'-O-methyladenosine-3'-phosphate
  modified_base 9: mod_base = OTHER; note = 2'-O-methylguanosine-3'-phosphate
  modified_base 10: mod_base = OTHER; note = 2'-O-methylguanosine-3'-phosphate
  modified_base 11: mod_base = OTHER; note = 2'-O-methyluridine-3'-phosphate
  modified_base 13: mod_base = OTHER; note = 2'-O-methylcytidine-3'-phosphate
  modified_base 14: mod_base = OTHER; note = 2'-fluorouridine-3'-phosphate
  modified_base 15: mod_base = OTHER; note = 2'-O-methylcytidine-3'-phosphate
  modified_base 16: mod_base = OTHER; note = 2'-O-methyluridine-3'-phosphate
  modified_base 17: mod_base = OTHER; note = 2'-O-methylcytidine-3'-phosphate
  modified_base 18: mod_base = OTHER; note = 2'-O-methyladenosine-3'-phosphate
  modified_base 19: mod_base = OTHER; note = 2'-O-methyluridine-3'-phosphate
  modified_base 20: mod_base = OTHER; note = 2'-O-methyluridine-3'-phosphate
  modified_base 21: mod_base = OTHER; note = 2'-O-methylguanosine-3'-phosphorothioate
  modified_base 22: mod_base = OTHER; note = 2'-O-methyluridine-3'-phosphorothioate
  modified_base 23: mod_base = OTHER; note = 2'-O-methylguanosine-3'-phosphate
  misc_feature 1: note = RNA
  misc_feature 2: note = DNA
  misc_feature 3..4: note = RNA
  misc_feature 5: note = DNA
  misc_feature 6: note = RNA
  misc_feature 7: note = DNA
  misc_feature 8..11: note = RNA
  misc_feature 12: note = DNA
  misc_feature 13..23: note = RNA
agctcacaggtactctcattgtg

SEQ ID NO: 2361 - DNA, 23 bp, synthetic construct
  source 1..23: mol_type = other DNA
  modified_base 1: mod_base = OTHER; note = 2'-O-methyladenosine-3'-phosphorothioate
  modified_base 2: mod_base = OTHER; note = 2'-deoxythimidine-3'-phosphorothioate
  modified_base 3: mod_base = OTHER; note = 2'-O-methylguanosine-3'-phosphate
  modified_base 4: mod_base = OTHER; note = 2'-O-methylcytidine-3'-phosphate
  modified_base 6: mod_base = OTHER; note = 2'-O-methylcytidine-3'-phosphate
  modified_base 8: mod_base = OTHER; note = 2'-O-methylcytidine-3'-phosphate
  modified_base 9: mod_base = OTHER; note = 2'-O-methyladenosine-3'-phosphate
  modified_base 10: mod_base = OTHER; note = 2'-O-methylguanosine-3'-phosphate
  modified_base 11: mod_base = OTHER; note = 2'-O-methylguanosine-3'-phosphate
  modified_base 13: mod_base = OTHER; note = 2'-O-methyladenosine-3'-phosphate
  modified_base 14: mod_base = OTHER; note = 2'-fluorocytidine-3'-phosphate
  modified_base 15: mod_base = OTHER; note = 2'-O-methyluridine-3'-phosphate
  modified_base 16: mod_base = OTHER; note = 2'-O-methylcytidine-3'-phosphate
  modified_base 17: mod_base = OTHER; note = 2'-O-methyluridine-3'-phosphate
  modified_base 18: mod_base = OTHER; note = 2'-O-methylcytidine-3'-phosphate
  modified_base 19: mod_base = OTHER; note = 2'-O-methyladenosine-3'-phosphate
  modified_base 20: mod_base = OTHER; note = 2'-O-methyluridine-3'-phosphate
  modified_base 21: mod_base = OTHER; note = 2'-O-methyluridine-3'-phosphorothioate
  modified_base 22: mod_base = OTHER; note = 2'-O-methylguanosine-3'-phosphorothioate
  modified_base 23: mod_base = OTHER; note = 2'-O-methyluridine-3'-phosphate
  misc_feature 1: note = RNA
  misc_feature 2: note = DNA
  misc_feature 3..4: note = RNA
  misc_feature 5: note = DNA
  misc_feature 6: note = RNA
  misc_feature 7: note = DNA
  misc_feature 8..11: note = RNA
  misc_feature 12: note = DNA
  misc_feature 13..23: note = RNA
atgctcacaggtactctcattgt

SEQ ID NO: 2362 - DNA, 23 bp, synthetic construct
  source 1..23: mol_type = other DNA
  modified_base 1: mod_base = OTHER; note = 2'-O-methyladenosine-3'-phosphorothioate
  modified_base 2: mod_base = OTHER; note = 2'-deoxycytidine-3'-phosphorothioate
  modified_base 3: mod_base = OTHER; note = 2'-O-methyluridine-3'-phosphate
  modified_base 4: mod_base = OTHER; note = 2'-O-methylguanosine-3'-phosphate
  modified_base 6: mod_base = OTHER; note = 2'-O-methyluridine-3'-phosphate
  modified_base 8: mod_base = OTHER; note = 2'-O-methyladenosine-3'-phosphate
  modified_base 9: mod_base = OTHER; note = 2'-O-methylcytidine-3'-phosphate
  modified_base 10: mod_base = OTHER; note = 2'-O-methyladenosine-3'-phosphate
  modified_base 11: mod_base = OTHER; note = 2'-O-methylguanosine-3'-phosphate
  modified_base 13: mod_base = OTHER; note = 2'-O-methyluridine-3'-phosphate
  modified_base 14: mod_base = OTHER; note = 2'-fluoroadenosine-3'-phosphate
  modified_base 15: mod_base = OTHER; note = 2'-O-methylcytidine-3'-phosphate
  modified_base 16: mod_base = OTHER; note = 2'-O-methyluridine-3'-phosphate
  modified_base 17: mod_base = OTHER; note = 2'-O-methylcytidine-3'-phosphate
  modified_base 18: mod_base = OTHER; note = 2'-O-methyluridine-3'-phosphate
  modified_base 19: mod_base = OTHER; note = 2'-O-methylcytidine-3'-phosphate
  modified_base 20: mod_base = OTHER; note = 2'-O-methyladenosine-3'-phosphate
  modified_base 21: mod_base = OTHER; note = 2'-O-methyluridine-3'-phosphorothioate
  modified_base 22: mod_base = OTHER; note = 2'-O-methyluridine-3'-phosphorothioate
  modified_base 23: mod_base = OTHER; note = 2'-O-methylguanosine-3'-phosphate
  misc_feature 1: note = RNA
  misc_feature 2: note = DNA
  misc_feature 3..4: note = RNA
  misc_feature 5: note = DNA
  misc_feature 6: note = RNA
  misc_feature 7: note = DNA
  misc_feature 8..11: note = RNA
  misc_feature 12: note = DNA
  misc_feature 13..23: note = RNA
actgctcacaggtactctcattg

SEQ ID NO: 2363 - DNA, 23 bp, synthetic construct
  source 1..23: mol_type = other DNA
  modified_base 1: mod_base = OTHER; note = 2'-O-methyladenosine-3'-phosphorothioate
  modified_base 2: mod_base = OTHER; note = 2'-deoxyguanosine-3'-phosphorothioate
  modified_base 3: mod_base = OTHER; note = 2'-O-methylcytidine-3'-phosphate
  modified_base 4: mod_base = OTHER; note = 2'-O-methyluridine-3'-phosphate
  modified_base 6: mod_base = OTHER; note = 2'-O-methylcytidine-3'-phosphate
  modified_base 8: mod_base = OTHER; note = 2'-O-methylcytidine-3'-phosphate
  modified_base 9: mod_base = OTHER; note = 2'-O-methyladenosine-3'-phosphate
  modified_base 10: mod_base = OTHER; note = 2'-O-methylcytidine-3'-phosphate
  modified_base 11: mod_base = OTHER; note = 2'-O-methyladenosine-3'-phosphate
  modified_base 13: mod_base = OTHER; note = 2'-O-methylguanosine-3'-phosphate
  modified_base 14: mod_base = OTHER; note = 2'-fluorouridine-3'-phosphate
  modified_base 15: mod_base = OTHER; note = 2'-O-methyladenosine-3'-phosphate
  modified_base 16: mod_base = OTHER; note = 2'-O-methylcytidine-3'-phosphate
  modified_base 17: mod_base = OTHER; note = 2'-O-methyluridine-3'-phosphate
  modified_base 18: mod_base = OTHER; note = 2'-O-methylcytidine-3'-phosphate
  modified_base 19: mod_base = OTHER; note = 2'-O-methyluridine-3'-phosphate
  modified_base 20: mod_base = OTHER; note = 2'-O-methylcytidine-3'-phosphate
  modified_base 21: mod_base = OTHER; note = 2'-O-methyladenosine-3'-phosphorothioate
  modified_base 22: mod_base = OTHER; note = 2'-O-methyluridine-3'-phosphorothioate
  modified_base 23: mod_base = OTHER; note = 2'-O-methyluridine-3'-phosphate
  misc_feature 1: note = RNA
  misc_feature 2: note = DNA
  misc_feature 3..4: note = RNA
  misc_feature 5: note = DNA
  misc_feature 6: note = RNA
  misc_feature 7: note = DNA
  misc_feature 8..11: note = RNA
  misc_feature 12: note = DNA
  misc_feature 13..23: note = RNA
agctgctcacaggtactctcatt

SEQ ID NO: 2364 - DNA, 23 bp, synthetic construct
  source 1..23: mol_type = other DNA
  modified_base 1: mod_base = OTHER; note = 2'-O-methyladenosine-3'-phosphorothioate
  modified_base 2: mod_base = OTHER; note = 2'-deoxyadenosine-3'-phosphorothioate
  modified_base 3: mod_base = OTHER; note = 2'-O-methylguanosine-3'-phosphate
  modified_base 4: mod_base = OTHER; note = 2'-O-methylcytidine-3'-phosphate
  modified_base 6: mod_base = OTHER; note = 2'-O-methylguanosine-3'-phosphate
  modified_base 8: mod_base = OTHER; note = 2'-O-methyluridine-3'-phosphate
  modified_base 9: mod_base = OTHER; note = 2'-O-methylcytidine-3'-phosphate
  modified_base 10: mod_base = OTHER; note = 2'-O-methyladenosine-3'-phosphate
  modified_base 11: mod_base = OTHER; note = 2'-O-methylcytidine-3'-phosphate
  modified_base 13: mod_base = OTHER; note = 2'-O-methylguanosine-3'-phosphate
  modified_base 14: mod_base = OTHER; note = 2'-fluoroguanosine-3'-phosphate
  modified_base 15: mod_base = OTHER; note = 2'-O-methyluridine-3'-phosphate
  modified_base 16: mod_base = OTHER; note = 2'-O-methyladenosine-3'-phosphate
  modified_base 17: mod_base = OTHER; note = 2'-O-methylcytidine-3'-phosphate
  modified_base 18: mod_base = OTHER; note = 2'-O-methyluridine-3'-phosphate
  modified_base 19: mod_base = OTHER; note = 2'-O-methylcytidine-3'-phosphate
  modified_base 20: mod_base = OTHER; note = 2'-O-methyluridine-3'-phosphate
  modified_base 21: mod_base = OTHER; note = 2'-O-methylcytidine-3'-phosphorothioate
  modified_base 22: mod_base = OTHER; note = 2'-O-methyladenosine-3'-phosphorothioate
  modified_base 23: mod_base = OTHER; note = 2'-O-methyluridine-3'-phosphate
  misc_feature 1: note = RNA
  misc_feature 2: note = DNA
  misc_feature 3..4: note = RNA
  misc_feature 5: note = DNA
  misc_feature 6: note = RNA
  misc_feature 7: note = DNA
  misc_feature 8..11: note = RNA
  misc_feature 12: note = DNA
  misc_feature 13..23: note = RNA
aagctgctcacaggtactctcat

SEQ ID NO: 2365 - DNA, 23 bp, synthetic construct
  source 1..23: mol_type = other DNA
  modified_base 1: mod_base = OTHER; note = 2'-O-methyladenosine-3'-phosphorothioate
  modified_base 2: mod_base = OTHER; note = 2'-deoxycytidine-3'-phosphorothioate
  modified_base 3: mod_base = OTHER; note = 2'-O-methyladenosine-3'-phosphate
  modified_base 4: mod_base = OTHER; note = 2'-O-methylguanosine-3'-phosphate
  modified_base 6: mod_base = OTHER; note = 2'-O-methyluridine-3'-phosphate
  modified_base 8: mod_base = OTHER; note = 2'-O-methylcytidine-3'-phosphate
  modified_base 9: mod_base = OTHER; note = 2'-O-methyluridine-3'-phosphate
  modified_base 10: mod_base = OTHER; note = 2'-O-methylcytidine-3'-phosphate
  modified_base 11: mod_base = OTHER; note = 2'-O-methyladenosine-3'-phosphate
  modified_base 13: mod_base = OTHER; note = 2'-O-methyladenosine-3'-phosphate
  modified_base 14: mod_base = OTHER; note = 2'-fluoroguanosine-3'-phosphate
  modified_base 15: mod_base = OTHER; note = 2'-O-methylguanosine-3'-phosphate
  modified_base 16: mod_base = OTHER; note = 2'-O-methyluridine-3'-phosphate
  modified_base 17: mod_base = OTHER; note = 2'-O-methyladenosine-3'-phosphate
  modified_base 18: mod_base = OTHER; note = 2'-O-methylcytidine-3'-phosphate
  modified_base 19: mod_base = OTHER; note = 2'-O-methyluridine-3'-phosphate
  modified_base 20: mod_base = OTHER; note = 2'-O-methylcytidine-3'-phosphate
  modified_base 21: mod_base = OTHER; note = 2'-O-methyluridine-3'-phosphorothioate
  modified_base 22: mod_base = OTHER; note = 2'-O-methylcytidine-3'-phosphorothioate
  modified_base 23: mod_base = OTHER; note = 2'-O-methyladenosine-3'-phosphate
  misc_feature 1: note = RNA
  misc_feature 2: note = DNA
  misc_feature 3..4: note = RNA
  misc_feature 5: note = DNA
  misc_feature 6: note = RNA
  misc_feature 7: note = DNA
  misc_feature 8..11: note = RNA
  misc_feature 12: note = DNA
  misc_feature 13..23: note = RNA
acagctgctcacaggtactctca

SEQ ID NO: 2366 - DNA, 23 bp, synthetic construct
  source 1..23: mol_type = other DNA
  modified_base 1: mod_base = OTHER; note = 2'-O-methyladenosine-3'-phosphorothioate
  modified_base 2: mod_base = OTHER; note = 2'-deoxycytidine-3'-phosphorothioate
  modified_base 3: mod_base = OTHER; note = 2'-O-methylcytidine-3'-phosphate
  modified_base 4: mod_base = OTHER; note = 2'-O-methyladenosine-3'-phosphate
  modified_base 6: mod_base = OTHER; note = 2'-O-methylcytidine-3'-phosphate
  modified_base 8: mod_base = OTHER; note = 2'-O-methylguanosine-3'-phosphate
  modified_base 9: mod_base = OTHER; note = 2'-O-methylcytidine-3'-phosphate
  modified_base 10: mod_base = OTHER; note = 2'-O-methyluridine-3'-phosphate
  modified_base 11: mod_base = OTHER; note = 2'-O-methylcytidine-3'-phosphate
  modified_base 13: mod_base = OTHER; note = 2'-O-methylcytidine-3'-phosphate
  modified_base 14: mod_base = OTHER; note = 2'-fluoroadenosine-3'-phosphate
  modified_base 15: mod_base = OTHER; note = 2'-O-methylguanosine-3'-phosphate
  modified_base 16: mod_base = OTHER; note = 2'-O-methylguanosine-3'-phosphate
  modified_base 17: mod_base = OTHER; note = 2'-O-methyluridine-3'-phosphate
  modified_base 18: mod_base = OTHER; note = 2'-O-methyladenosine-3'-phosphate
  modified_base 19: mod_base = OTHER; note = 2'-O-methylcytidine-3'-phosphate
  modified_base 20: mod_base = OTHER; note = 2'-O-methyluridine-3'-phosphate
  modified_base 21: mod_base = OTHER; note = 2'-O-methylcytidine-3'-phosphorothioate
  modified_base 22: mod_base = OTHER; note = 2'-O-methyluridine-3'-phosphorothioate
  modified_base 23: mod_base = OTHER; note = 2'-O-methylcytidine-3'-phosphate
  misc_feature 1: note = RNA
  misc_feature 2: note = DNA
  misc_feature 3..4: note = RNA
  misc_feature 5: note = DNA
  misc_feature 6: note = RNA
  misc_feature 7: note = DNA
  misc_feature 8..11: note = RNA
  misc_feature 12: note = DNA
  misc_feature 13..23: note = RNA
accagctgctcacaggtactctc

SEQ ID NO: 2367 - DNA, 23 bp, synthetic construct
  source 1..23: mol_type = other DNA
  modified_base 1: mod_base = OTHER; note = 2'-O-methyladenosine-3'-phosphorothioate
  modified_base 2: mod_base = OTHER; note = 2'-deoxyguanosine-3'-phosphorothioate
  modified_base 3: mod_base = OTHER; note = 2'-O-methylcytidine-3'-phosphate
  modified_base 4: mod_base = OTHER; note = 2'-O-methylcytidine-3'-phosphate
  modified_base 6: mod_base = OTHER; note = 2'-O-methylguanosine-3'-phosphate
  modified_base 8: mod_base = OTHER; note = 2'-O-methyluridine-3'-phosphate
  modified_base 9: mod_base = OTHER; note = 2'-O-methylguanosine-3'-phosphate
  modified_base 10: mod_base = OTHER; note = 2'-O-methylcytidine-3'-phosphate
  modified_base 11: mod_base = OTHER; note = 2'-O-methyluridine-3'-phosphate
  modified_base 13: mod_base = OTHER; note = 2'-O-methyladenosine-3'-phosphate
  modified_base 14: mod_base = OTHER; note = 2'-fluorocytidine-3'-phosphate
  modified_base 15: mod_base = OTHER; note = 2'-O-methyladenosine-3'-phosphate
  modified_base 16: mod_base = OTHER; note = 2'-O-methylguanosine-3'-phosphate
  modified_base 17: mod_base = OTHER; note = 2'-O-methylguanosine-3'-phosphate
  modified_base 18: mod_base = OTHER; note = 2'-O-methyluridine-3'-phosphate
  modified_base 19: mod_base = OTHER; note = 2'-O-methyladenosine-3'-phosphate
  modified_base 20: mod_base = OTHER; note = 2'-O-methylcytidine-3'-phosphate
  modified_base 21: mod_base = OTHER; note = 2'-O-methyluridine-3'-phosphorothioate
  modified_base 22: mod_base = OTHER; note = 2'-O-methylcytidine-3'-phosphorothioate
  modified_base 23: mod_base = OTHER; note = 2'-O-methyluridine-3'-phosphate
  misc_feature 1: note = RNA
  misc_feature 2: note = DNA
  misc_feature 3..4: note = RNA
  misc_feature 5: note = DNA
  misc_feature 6: note = RNA
  misc_feature 7: note = DNA
  misc_feature 8..11: note = RNA
  misc_feature 12: note = DNA
  misc_feature 13..23: note = RNA
agccagctgctcacaggtactct

SEQ ID NO: 2368 - DNA, 23 bp, synthetic construct
  source 1..23: mol_type = other DNA
  modified_base 1: mod_base = OTHER; note = 2'-O-methyladenosine-3'-phosphorothioate
  modified_base 2: mod_base = OTHER; note = 2'-deoxythimidine-3'-phosphorothioate
  modified_base 3: mod_base = OTHER; note = 2'-O-methylguanosine-3'-phosphate
  modified_base 4: mod_base = OTHER; note = 2'-O-methylcytidine-3'-phosphate
  modified_base 6: mod_base = OTHER; note = 2'-O-methyladenosine-3'-phosphate
  modified_base 8: mod_base = OTHER; note = 2'-O-methylcytidine-3'-phosphate
  modified_base 9: mod_base = OTHER; note = 2'-O-methyluridine-3'-phosphate
  modified_base 10: mod_base = OTHER; note = 2'-O-methylguanosine-3'-phosphate
  modified_base 11: mod_base = OTHER; note = 2'-O-methylcytidine-3'-phosphate
  modified_base 13: mod_base = OTHER; note = 2'-O-methylcytidine-3'-phosphate
  modified_base 14: mod_base = OTHER; note = 2'-fluoroadenosine-3'-phosphate
  modified_base 15: mod_base = OTHER; note = 2'-O-methylcytidine-3'-phosphate
  modified_base 16: mod_base = OTHER; note = 2'-O-methyladenosine-3'-phosphate
  modified_base 17: mod_base = OTHER; note = 2'-O-methylguanosine-3'-phosphate
  modified_base 18: mod_base = OTHER; note = 2'-O-methylguanosine-3'-phosphate
  modified_base 19: mod_base = OTHER; note = 2'-O-methyluridine-3'-phosphate
  modified_base 20: mod_base = OTHER; note = 2'-O-methyladenosine-3'-phosphate
  modified_base 21: mod_base = OTHER; note = 2'-O-methylcytidine-3'-phosphorothioate
  modified_base 22: mod_base = OTHER; note = 2'-O-methyluridine-3'-phosphorothioate
  modified_base 23: mod_base = OTHER; note = 2'-O-methylcytidine-3'-phosphate
  misc_feature 1: note = RNA
  misc_feature 2: note = DNA
  misc_feature 3..4: note = RNA
  misc_feature 5: note = DNA
  misc_feature 6: note = RNA
  misc_feature 7: note = DNA
  misc_feature 8..11: note = RNA
  misc_feature 12: note = DNA
  misc_feature 13..23: note = RNA
atgccagctgctcacaggtactc

SEQ ID NO: 2369 - DNA, 23 bp, synthetic construct
  source 1..23: mol_type = other DNA
  modified_base 1: mod_base = OTHER; note = 2'-O-methyladenosine-3'-phosphorothioate
  modified_base 2: mod_base = OTHER; note = 2'-deoxythimidine-3'-phosphorothioate
  modified_base 3: mod_base = OTHER; note = 2'-O-methyluridine-3'-phosphate
  modified_base 4: mod_base = OTHER; note = 2'-O-methylguanosine-3'-phosphate
  modified_base 6: mod_base = OTHER; note = 2'-O-methylcytidine-3'-phosphate
  modified_base 8: mod_base = OTHER; note = 2'-O-methylguanosine-3'-phosphate
  modified_base 9: mod_base = OTHER; note = 2'-O-methylcytidine-3'-phosphate
  modified_base 10: mod_base = OTHER; note = 2'-O-methyluridine-3'-phosphate
  modified_base 11: mod_base = OTHER; note = 2'-O-methylguanosine-3'-phosphate
  modified_base 13: mod_base = OTHER; note = 2'-O-methyluridine-3'-phosphate
  modified_base 14: mod_base = OTHER; note = 2'-fluorocytidine-3'-phosphate
  modified_base 15: mod_base = OTHER; note = 2'-O-methyladenosine-3'-phosphate
  modified_base 16: mod_base = OTHER; note = 2'-O-methylcytidine-3'-phosphate
  modified_base 17: mod_base = OTHER; note = 2'-O-methyladenosine-3'-phosphate
  modified_base 18: mod_base = OTHER; note = 2'-O-methylguanosine-3'-phosphate
  modified_base 19: mod_base = OTHER; note = 2'-O-methylguanosine-3'-phosphate
  modified_base 20: mod_base = OTHER; note = 2'-O-methyluridine-3'-phosphate
  modified_base 21: mod_base = OTHER; note = 2'-O-methyladenosine-3'-phosphorothioate
  modified_base 22: mod_base = OTHER; note = 2'-O-methylcytidine-3'-phosphorothioate
  modified_base 23: mod_base = OTHER; note = 2'-O-methyluridine-3'-phosphate
  misc_feature 1: note = RNA
  misc_feature 2: note = DNA
  misc_feature 3..4: note = RNA
  misc_feature 5: note = DNA
  misc_feature 6: note = RNA
  misc_feature 7: note = DNA
  misc_feature 8..11: note = RNA
  misc_feature 12: note = DNA
  misc_feature 13..23: note = RNA
attgccagctgctcacaggtact

SEQ ID NO: 2370 - DNA, 23 bp, synthetic construct
  source 1..23: mol_type = other DNA
  modified_base 1: mod_base = OTHER; note = 2'-O-methyladenosine-3'-phosphorothioate
  modified_base 2: mod_base = OTHER; note = 2'-deoxythimidine-3'-phosphorothioate
  modified_base 3: mod_base = OTHER; note = 2'-O-methylguanosine-3'-phosphate
  modified_base 4: mod_base = OTHER; note = 2'-O-methylguanosine-3'-phosphate
  modified_base 6: mod_base = OTHER; note = 2'-O-methylcytidine-3'-phosphate
  modified_base 8: mod_base = OTHER; note = 2'-O-methylguanosine-3'-phosphate
  modified_base 9: mod_base = OTHER; note = 2'-O-methylcytidine-3'-phosphate
  modified_base 10: mod_base = OTHER; note = 2'-O-methyladenosine-3'-phosphate
  modified_base 11: mod_base = OTHER; note = 2'-O-methyluridine-3'-phosphate
  modified_base 13: mod_base = OTHER; note = 2'-O-methylcytidine-3'-phosphate
  modified_base 14: mod_base = OTHER; note = 2'-fluorocytidine-3'-phosphate
  modified_base 15: mod_base = OTHER; note = 2'-O-methylguanosine-3'-phosphate
  modified_base 16: mod_base = OTHER; note = 2'-O-methyladenosine-3'-phosphate
  modified_base 17: mod_base = OTHER; note = 2'-O-methylcytidine-3'-phosphate
  modified_base 18: mod_base = OTHER; note = 2'-O-methylcytidine-3'-phosphate
  modified_base 19: mod_base = OTHER; note = 2'-O-methyladenosine-3'-phosphate
  modified_base 20: mod_base = OTHER; note = 2'-O-methyluridine-3'-phosphate
  modified_base 21: mod_base = OTHER; note = 2'-O-methyluridine-3'-phosphorothioate
  modified_base 22: mod_base = OTHER; note = 2'-O-methylguanosine-3'-phosphorothioate
  modified_base 23: mod_base = OTHER; note = 2'-O-methylcytidine-3'-phosphate
  misc_feature 1: note = RNA
  misc_feature 2: note = DNA
  misc_feature 3..4: note = RNA
  misc_feature 5: note = DNA
  misc_feature 6: note = RNA
  misc_feature 7: note = DNA
  misc_feature 8..11: note = RNA
  misc_feature 12: note = DNA
  misc_feature 13..23: note = RNA
atggccagcatcccgaccattgc

SEQ ID NO: 2371 - DNA, 23 bp, synthetic construct
  source 1..23: mol_type = other DNA
  modified_base 1: mod_base = OTHER; note = 2'-O-methyladenosine-3'-phosphorothioate
  modified_base 2: mod_base = OTHER; note = 2'-deoxythimidine-3'-phosphorothioate
  modified_base 3: mod_base = OTHER; note = 2'-O-methyluridine-3'-phosphate
  modified_base 4: mod_base = OTHER; note = 2'-O-methylguanosine-3'-phosphate
  modified_base 6: mod_base = OTHER; note = 2'-O-methylcytidine-3'-phosphate
  modified_base 8: mod_base = OTHER; note = 2'-O-methyladenosine-3'-phosphate
  modified_base 9: mod_base = OTHER; note = 2'-O-methylguanosine-3'-phosphate
  modified_base 10: mod_base = OTHER; note = 2'-O-methylcytidine-3'-phosphate
  modified_base 11: mod_base = OTHER; note = 2'-O-methyladenosine-3'-phosphate
  modified_base 13: mod_base = OTHER; note = 2'-O-methylcytidine-3'-phosphate
  modified_base 14: mod_base = OTHER; note = 2'-fluorocytidine-3'-phosphate
  modified_base 15: mod_base = OTHER; note = 2'-O-methylcytidine-3'-phosphate
  modified_base 16: mod_base = OTHER; note = 2'-O-methylguanosine-3'-phosphate
  modified_base 17: mod_base = OTHER; note = 2'-O-methyladenosine-3'-phosphate
  modified_base 18: mod_base = OTHER; note = 2'-O-methylcytidine-3'-phosphate
  modified_base 19: mod_base = OTHER; note = 2'-O-methylcytidine-3'-phosphate
  modified_base 20: mod_base = OTHER; note = 2'-O-methyladenosine-3'-phosphate
  modified_base 21: mod_base = OTHER; note = 2'-O-methyluridine-3'-phosphorothioate
  modified_base 22: mod_base = OTHER; note = 2'-O-methyluridine-3'-phosphorothioate
  modified_base 23: mod_base = OTHER; note = 2'-O-methylguanosine-3'-phosphate
  misc_feature 1: note = RNA
  misc_feature 2: note = DNA
  misc_feature 3..4: note = RNA
  misc_feature 5: note = DNA
  misc_feature 6: note = RNA
  misc_feature 7: note = DNA
  misc_feature 8..11: note = RNA
  misc_feature 12: note = DNA
  misc_feature 13..23: note = RNA
attggccagcatcccgaccattg

SEQ ID NO: 2372 - DNA, 23 bp, synthetic construct
  source 1..23: mol_type = other DNA
  modified_base 1: mod_base = OTHER; note = 2'-O-methyladenosine-3'-phosphorothioate
  modified_base 2: mod_base = OTHER; note = 2'-deoxyguanosine-3'-phosphorothioate
  modified_base 3: mod_base = OTHER; note = 2'-O-methyluridine-3'-phosphate
  modified_base 4: mod_base = OTHER; note = 2'-O-methyluridine-3'-phosphate
  modified_base 6: mod_base = OTHER; note = 2'-O-methylguanosine-3'-phosphate
  modified_base 8: mod_base = OTHER; note = 2'-O-methylcytidine-3'-phosphate
  modified_base 9: mod_base = OTHER; note = 2'-O-methyladenosine-3'-phosphate
  modified_base 10: mod_base = OTHER; note = 2'-O-methylguanosine-3'-phosphate
  modified_base 11: mod_base = OTHER; note = 2'-O-methylcytidine-3'-phosphate
  modified_base 13: mod_base = OTHER; note = 2'-O-methyluridine-3'-phosphate
  modified_base 14: mod_base = OTHER; note = 2'-fluorocytidine-3'-phosphate
  modified_base 15: mod_base = OTHER; note = 2'-O-methylcytidine-3'-phosphate
  modified_base 16: mod_base = OTHER; note = 2'-O-methylcytidine-3'-phosphate
  modified_base 17: mod_base = OTHER; note = 2'-O-methylguanosine-3'-phosphate
  modified_base 18: mod_base = OTHER; note = 2'-O-methyladenosine-3'-phosphate
  modified_base 19: mod_base = OTHER; note = 2'-O-methylcytidine-3'-phosphate
  modified_base 20: mod_base = OTHER; note = 2'-O-methylcytidine-3'-phosphate
  modified_base 21: mod_base = OTHER; note = 2'-O-methyladenosine-3'-phosphorothioate
  modified_base 22: mod_base = OTHER; note = 2'-O-methyluridine-3'-phosphorothioate
  modified_base 23: mod_base = OTHER; note = 2'-O-methyluridine-3'-phosphate
  misc_feature 1: note = RNA
  misc_feature 2: note = DNA
  misc_feature 3..4: note = RNA
  misc_feature 5: note = DNA
  misc_feature 6: note = RNA
  misc_feature 7: note = DNA
  misc_feature 8..11: note = RNA
  misc_feature 12: note = DNA
  misc_feature 13..23: note = RNA
agttggccagcatcccgaccatt

SEQ ID NO: 2373 - DNA, 23 bp, synthetic construct
  source 1..23: mol_type = other DNA
  modified_base 1: mod_base = OTHER; note = 2'-O-methyladenosine-3'-phosphorothioate
  modified_base 2: mod_base = OTHER; note = 2'-deoxyadenosine-3'-phosphorothioate
  modified_base 3: mod_base = OTHER; note = 2'-O-methylguanosine-3'-phosphate
  modified_base 4: mod_base = OTHER; note = 2'-O-methyluridine-3'-phosphate
  modified_base 6: mod_base = OTHER; note = 2'-O-methylguanosine-3'-phosphate
  modified_base 8: mod_base = OTHER; note = 2'-O-methylcytidine-3'-phosphate
  modified_base 9: mod_base = OTHER; note = 2'-O-methylcytidine-3'-phosphate
  modified_base 10: mod_base = OTHER; note = 2'-O-methyladenosine-3'-phosphate
  modified_base 11: mod_base = OTHER; note = 2'-O-methylguanosine-3'-phosphate
  modified_base 13: mod_base = OTHER; note = 2'-O-methyladenosine-3'-phosphate
  modified_base 14: mod_base = OTHER; note = 2'-fluorouridine-3'-phosphate
  modified_base 15: mod_base = OTHER; note = 2'-O-methylcytidine-3'-phosphate
  modified_base 16: mod_base = OTHER; note = 2'-O-methylcytidine-3'-phosphate
  modified_base 17: mod_base = OTHER; note = 2'-O-methylcytidine-3'-phosphate
  modified_base 18: mod_base = OTHER; note = 2'-O-methylguanosine-3'-phosphate
  modified_base 19: mod_base = OTHER; note = 2'-O-methyladenosine-3'-phosphate
  modified_base 20: mod_base = OTHER; note = 2'-O-methylcytidine-3'-phosphate
  modified_base 21: mod_base = OTHER; note = 2'-O-methylcytidine-3'-phosphorothioate
  modified_base 22: mod_base = OTHER; note = 2'-O-methyladenosine-3'-phosphorothioate
  modified_base 23: mod_base = OTHER; note = 2'-O-methyluridine-3'-phosphate
  misc_feature 1: note = RNA
  misc_feature 2: note = DNA
  misc_feature 3..4: note = RNA
  misc_feature 5: note = DNA
  misc_feature 6: note = RNA
  misc_feature 7: note = DNA
  misc_feature 8..11: note = RNA
  misc_feature 12: note = DNA
  misc_feature 13..23: note = RNA
aagttggccagcatcccgaccat

SEQ ID NO: 2374 - DNA, 23 bp, synthetic construct
  source 1..23: mol_type = other DNA
  modified_base 1: mod_base = OTHER; note = 2'-O-methyladenosine-3'-phosphorothioate
  modified_base 2: mod_base = OTHER; note = 2'-deoxyadenosine-3'-phosphorothioate
  modified_base 3: mod_base = OTHER; note = 2'-O-methyladenosine-3'-phosphate
  modified_base 4: mod_base = OTHER; note = 2'-O-methylguanosine-3'-phosphate
  modified_base 6: mod_base = OTHER; note = 2'-O-methyluridine-3'-phosphate
  modified_base 8: mod_base = OTHER; note = 2'-O-methylguanosine-3'-phosphate
  modified_base 9: mod_base = OTHER; note = 2'-O-methylcytidine-3'-phosphate
  modified_base 10: mod_base = OTHER; note = 2'-O-methylcytidine-3'-phosphate
  modified_base 11: mod_base = OTHER; note = 2'-O-methyladenosine-3'-phosphate
  modified_base 13: mod_base = OTHER; note = 2'-O-methylcytidine-3'-phosphate
  modified_base 14: mod_base = OTHER; note = 2'-fluoroadenosine-3'-phosphate
  modified_base 15: mod_base = OTHER; note = 2'-O-methyluridine-3'-phosphate
  modified_base 16: mod_base = OTHER; note = 2'-O-methylcytidine-3'-phosphate
  modified_base 17: mod_base = OTHER; note = 2'-O-methylcytidine-3'-phosphate
  modified_base 18: mod_base = OTHER; note = 2'-O-methylcytidine-3'-phosphate
  modified_base 19: mod_base = OTHER; note = 2'-O-methylguanosine-3'-phosphate
  modified_base 20: mod_base = OTHER; note = 2'-O-methyladenosine-3'-phosphate
  modified_base 21: mod_base = OTHER; note = 2'-O-methylcytidine-3'-phosphorothioate
  modified_base 22: mod_base = OTHER; note = 2'-O-methylcytidine-3'-phosphorothioate
  modified_base 23: mod_base = OTHER; note = 2'-O-methyladenosine-3'-phosphate
  misc_feature 1: note = RNA
  misc_feature 2: note = DNA
  misc_feature 3..4: note = RNA
  misc_feature 5: note = DNA
  misc_feature 6: note = RNA
  misc_feature 7: note = DNA
  misc_feature 8..11: note = RNA
  misc_feature 12: note = DNA
  misc_feature 13..23: note = RNA
aaagttggccagcatcccgacca

SEQ ID NO: 2375 - DNA, 23 bp, synthetic construct
  source 1..23: mol_type = other DNA
  modified_base 1: mod_base = OTHER; note = 2'-O-methyladenosine-3'-phosphorothioate
  modified_base 2: mod_base = OTHER; note = 2'-deoxyguanosine-3'-phosphorothioate
  modified_base 3: mod_base = OTHER; note = 2'-O-methyladenosine-3'-phosphate
  modified_base 4: mod_base = OTHER; note = 2'-O-methyladenosine-3'-phosphate
  modified_base 6: mod_base = OTHER; note = 2'-O-methyluridine-3'-phosphate
  modified_base 8: mod_base = OTHER; note = 2'-O-methylguanosine-3'-phosphate
  modified_base 9: mod_base = OTHER; note = 2'-O-methylguanosine-3'-phosphate
  modified_base 10: mod_base = OTHER; note = 2'-O-methylcytidine-3'-phosphate
  modified_base 11: mod_base = OTHER; note = 2'-O-methylcytidine-3'-phosphate
  modified_base 13: mod_base = OTHER; note = 2'-O-methylguanosine-3'-phosphate
  modified_base 14: mod_base = OTHER; note = 2'-fluorocytidine-3'-phosphate
  modified_base 15: mod_base = OTHER; note = 2'-O-methyladenosine-3'-phosphate
  modified_base 16: mod_base = OTHER; note = 2'-O-methyluridine-3'-phosphate
  modified_base 17: mod_base = OTHER; note = 2'-O-methylcytidine-3'-phosphate
  modified_base 18: mod_base = OTHER; note = 2'-O-methylcytidine-3'-phosphate
  modified_base 19: mod_base = OTHER; note = 2'-O-methylcytidine-3'-phosphate
  modified_base 20: mod_base = OTHER; note = 2'-O-methylguanosine-3'-phosphate
  modified_base 21: mod_base = OTHER; note = 2'-O-methyladenosine-3'-phosphorothioate
  modified_base 22: mod_base = OTHER; note = 2'-O-methylcytidine-3'-phosphorothioate
  modified_base 23: mod_base = OTHER; note = 2'-O-methylcytidine-3'-phosphate
  misc_feature 1: note = RNA
  misc_feature 2: note = DNA
  misc_feature 3..4: note = RNA
  misc_feature 5: note = DNA
  misc_feature 6: note = RNA
  misc_feature 7: note = DNA
  misc_feature 8..11: note = RNA
  misc_feature 12: note = DNA
  misc_feature 13..23: note = RNA
agaagttggccagcatcccgacc

SEQ ID NO: 2376 - DNA, 23 bp, synthetic construct
  source 1..23: mol_type = other DNA
  modified_base 1: mod_base = OTHER; note = 2'-O-methyladenosine-3'-phosphorothioate
  modified_base 2: mod_base = OTHER; note = 2'-deoxyadenosine-3'-phosphorothioate
  modified_base 3: mod_base = OTHER; note = 2'-O-methylguanosine-3'-phosphate
  modified_base 4: mod_base = OTHER; note = 2'-O-methyladenosine-3'-phosphate
  modified_base 6: mod_base = OTHER; note = 2'-O-methylguanosine-3'-phosphate
  modified_base 8: mod_base = OTHER; note = 2'-O-methyluridine-3'-phosphate
  modified_base 9: mod_base = OTHER; note = 2'-O-methylguanosine-3'-phosphate
  modified_base 10: mod_base = OTHER; note = 2'-O-methylguanosine-3'-phosphate
  modified_base 11: mod_base = OTHER; note = 2'-O-methylcytidine-3'-phosphate
  modified_base 13: mod_base = OTHER; note = 2'-O-methyladenosine-3'-phosphate
  modified_base 14: mod_base = OTHER; note = 2'-fluoroguanosine-3'-phosphate
  modified_base 15: mod_base = OTHER; note = 2'-O-methylcytidine-3'-phosphate
  modified_base 16: mod_base = OTHER; note = 2'-O-methyladenosine-3'-phosphate
  modified_base 17: mod_base = OTHER; note = 2'-O-methyluridine-3'-phosphate
  modified_base 18: mod_base = OTHER; note = 2'-O-methylcytidine-3'-phosphate
  modified_base 19: mod_base = OTHER; note = 2'-O-methylcytidine-3'-phosphate
  modified_base 20: mod_base = OTHER; note = 2'-O-methylcytidine-3'-phosphate
  modified_base 21: mod_base = OTHER; note = 2'-O-methylguanosine-3'-phosphorothioate
  modified_base 22: mod_base = OTHER; note = 2'-O-methyladenosine-3'-phosphorothioate
  modified_base 23: mod_base = OTHER; note = 2'-O-methylcytidine-3'-phosphate
  misc_feature 1: note = RNA
  misc_feature 2: note = DNA
  misc_feature 3..4: note = RNA
  misc_feature 5: note = DNA
  misc_feature 6: note = RNA
  misc_feature 7: note = DNA
  misc_feature 8..11: note = RNA
  misc_feature 12: note = DNA
  misc_feature 13..23: note = RNA
aagaagttggccagcatcccgac

SEQ ID NO: 2377 - DNA, 23 bp, synthetic construct
  source 1..23: mol_type = other DNA
  modified_base 1: mod_base = OTHER; note = 2'-O-methyladenosine-3'-phosphorothioate
  modified_base 2: mod_base = OTHER; note = 2'-deoxyadenosine-3'-phosphorothioate
  modified_base 3: mod_base = OTHER; note = 2'-O-methyladenosine-3'-phosphate
  modified_base 4: mod_base = OTHER; note = 2'-O-methylguanosine-3'-phosphate
  modified_base 6: mod_base = OTHER; note = 2'-O-methyladenosine-3'-phosphate
  modified_base 8: mod_base = OTHER; note = 2'-O-methyluridine-3'-phosphate
  modified_base 9: mod_base = OTHER; note = 2'-O-methyluridine-3'-phosphate
  modified_base 10: mod_base = OTHER; note = 2'-O-methylguanosine-3'-phosphate
  modified_base 11: mod_base = OTHER; note = 2'-O-methylguanosine-3'-phosphate
  modified_base 13: mod_base = OTHER; note = 2'-O-methylcytidine-3'-phosphate
  modified_base 14: mod_base = OTHER; note = 2'-fluoroadenosine-3'-phosphate
  modified_base 15: mod_base = OTHER; note = 2'-O-methylguanosine-3'-phosphate
  modified_base 16: mod_base = OTHER; note = 2'-O-methylcytidine-3'-phosphate
  modified_base 17: mod_base = OTHER; note = 2'-O-methyladenosine-3'-phosphate
  modified_base 18: mod_base = OTHER; note = 2'-O-methyluridine-3'-phosphate
  modified_base 19: mod_base = OTHER; note = 2'-O-methylcytidine-3'-phosphate
  modified_base 20: mod_base = OTHER; note = 2'-O-methylcytidine-3'-phosphate
  modified_base 21: mod_base = OTHER; note = 2'-O-methylcytidine-3'-phosphorothioate
  modified_base 22: mod_base = OTHER; note = 2'-O-methylguanosine-3'-phosphorothioate
  modified_base 23: mod_base = OTHER; note = 2'-O-methyladenosine-3'-phosphate
  misc_feature 1: note = RNA
  misc_feature 2: note = DNA
  misc_feature 3..4: note = RNA
  misc_feature 5: note = DNA
  misc_feature 6: note = RNA
  misc_feature 7: note = DNA
  misc_feature 8..11: note = RNA
  misc_feature 12: note = DNA
  misc_feature 13..23: note = RNA
aaagaagttggccagcatcccga

SEQ ID NO: 2378 - DNA, 23 bp, synthetic construct
  source 1..23: mol_type = other DNA
  modified_base 1: mod_base = OTHER; note = 2'-O-methyladenosine-3'-phosphorothioate
  modified_base 2: mod_base = OTHER; note = 2'-deoxycytidine-3'-phosphorothioate
  modified_base 3: mod_base = OTHER; note = 2'-O-methyladenosine-3'-phosphate
  modified_base 4: mod_base = OTHER; note = 2'-O-methyladenosine-3'-phosphate
  modified_base 6: mod_base = OTHER; note = 2'-O-methyladenosine-3'-phosphate
  modified_base 8: mod_base = OTHER; note = 2'-O-methylguanosine-3'-phosphate
  modified_base 9: mod_base = OTHER; note = 2'-O-methyluridine-3'-phosphate
  modified_base 10: mod_base = OTHER; note = 2'-O-methyluridine-3'-phosphate
  modified_base 11: mod_base = OTHER; note = 2'-O-methylguanosine-3'-phosphate
  modified_base 13: mod_base = OTHER; note = 2'-O-methylcytidine-3'-phosphate
  modified_base 14: mod_base = OTHER; note = 2'-fluorocytidine-3'-phosphate
  modified_base 15: mod_base = OTHER; note = 2'-O-methyladenosine-3'-phosphate
  modified_base 16: mod_base = OTHER; note = 2'-O-methylguanosine-3'-phosphate
  modified_base 17: mod_base = OTHER; note = 2'-O-methylcytidine-3'-phosphate
  modified_base 18: mod_base = OTHER; note = 2'-O-methyladenosine-3'-phosphate
  modified_base 19: mod_base = OTHER; note = 2'-O-methyluridine-3'-phosphate
  modified_base 20: mod_base = OTHER; note = 2'-O-methylcytidine-3'-phosphate
  modified_base 21: mod_base = OTHER; note = 2'-O-methylcytidine-3'-phosphorothioate
  modified_base 22: mod_base = OTHER; note = 2'-O-methylcytidine-3'-phosphorothioate
  modified_base 23: mod_base = OTHER; note = 2'-O-methylguanosine-3'-phosphate
  misc_feature 1: note = RNA
  misc_feature 2: note = DNA
  misc_feature 3..4: note = RNA
  misc_feature 5: note = DNA
  misc_feature 6: note = RNA
  misc_feature 7: note = DNA
  misc_feature 8..11: note = RNA
  misc_feature 12: note = DNA
  misc_feature 13..23: note = RNA
acaagaagttggccagcatcccg

SEQ ID NO: 2379 - DNA, 23 bp, synthetic construct
  source 1..23: mol_type = other DNA
  modified_base 1: mod_base = OTHER; note = 2'-O-methyladenosine-3'-phosphorothioate
  modified_base 2: mod_base = OTHER; note = 2'-deoxycytidine-3'-phosphorothioate
  modified_base 3: mod_base = OTHER; note = 2'-O-methylcytidine-3'-phosphate
  modified_base 4: mod_base = OTHER; note = 2'-O-methyladenosine-3'-phosphate
  modified_base 6: mod_base = OTHER; note = 2'-O-methylguanosine-3'-phosphate
  modified_base 8: mod_base = OTHER; note = 2'-O-methyladenosine-3'-phosphate
  modified_base 9: mod_base = OTHER; note = 2'-O-methylguanosine-3'-phosphate
  modified_base 10: mod_base = OTHER; note = 2'-O-methyluridine-3'-phosphate
  modified_base 11: mod_base = OTHER; note = 2'-O-methyluridine-3'-phosphate
  modified_base 13: mod_base = OTHER; note = 2'-O-methylguanosine-3'-phosphate
  modified_base 14: mod_base = OTHER; note = 2'-fluorocytidine-3'-phosphate
  modified_base 15: mod_base = OTHER; note = 2'-O-methylcytidine-3'-phosphate
  modified_base 16: mod_base = OTHER; note = 2'-O-methyladenosine-3'-phosphate
  modified_base 17: mod_base = OTHER; note = 2'-O-methylguanosine-3'-phosphate
  modified_base 18: mod_base = OTHER; note = 2'-O-methylcytidine-3'-phosphate
  modified_base 19: mod_base = OTHER; note = 2'-O-methyladenosine-3'-phosphate
  modified_base 20: mod_base = OTHER; note = 2'-O-methyluridine-3'-phosphate
  modified_base 21: mod_base = OTHER; note = 2'-O-methylcytidine-3'-phosphorothioate
  modified_base 22: mod_base = OTHER; note = 2'-O-methylcytidine-3'-phosphorothioate
  modified_base 23: mod_base = OTHER; note = 2'-O-methylcytidine-3'-phosphate
  misc_feature 1: note = RNA
  misc_feature 2: note = DNA
  misc_feature 3..4: note = RNA
  misc_feature 5: note = DNA
  misc_feature 6: note = RNA
  misc_feature 7: note = DNA
  misc_feature 8..11: note = RNA
  misc_feature 12: note = DNA
  misc_feature 13..23: note = RNA
accaagaagttggccagcatccc

SEQ ID NO: 2380 - DNA, 23 bp, synthetic construct
  source 1..23: mol_type = other DNA
  modified_base 1: mod_base = OTHER; note = 2'-O-methyladenosine-3'-phosphorothioate
  modified_base 2: mod_base = OTHER; note = 2'-deoxyadenosine-3'-phosphorothioate
  modified_base 3: mod_base = OTHER; note = 2'-O-methylguanosine-3'-phosphate
  modified_base 4: mod_base = OTHER; note = 2'-O-methylcytidine-3'-phosphate
  modified_base 6: mod_base = OTHER; note = 2'-O-methylcytidine-3'-phosphate
  modified_base 8: mod_base = OTHER; note = 2'-O-methyladenosine-3'-phosphate
  modified_base 9: mod_base = OTHER; note = 2'-O-methylguanosine-3'-phosphate
  modified_base 10: mod_base = OTHER; note = 2'-O-methyladenosine-3'-phosphate
  modified_base 11: mod_base = OTHER; note = 2'-O-methyladenosine-3'-phosphate
  modified_base 13: mod_base = OTHER; note = 2'-O-methyluridine-3'-phosphate
  modified_base 14: mod_base = OTHER; note = 2'-fluorouridine-3'-phosphate
  modified_base 15: mod_base = OTHER; note = 2'-O-methylguanosine-3'-phosphate
  modified_base 16: mod_base = OTHER; note = 2'-O-methylguanosine-3'-phosphate
  modified_base 17: mod_base = OTHER; note = 2'-O-methylcytidine-3'-phosphate
  modified_base 18: mod_base = OTHER; note = 2'-O-methylcytidine-3'-phosphate
  modified_base 19: mod_base = OTHER; note = 2'-O-methyladenosine-3'-phosphate
  modified_base 20: mod_base = OTHER; note = 2'-O-methylguanosine-3'-phosphate
  modified_base 21: mod_base = OTHER; note = 2'-O-methylcytidine-3'-phosphorothioate
  modified_base 22: mod_base = OTHER; note = 2'-O-methyladenosine-3'-phosphorothioate
  modified_base 23: mod_base = OTHER; note = 2'-O-methyluridine-3'-phosphate
  misc_feature 1: note = RNA
  misc_feature 2: note = DNA
  misc_feature 3..4: note = RNA
  misc_feature 5: note = DNA
  misc_feature 6: note = RNA
  misc_feature 7: note = DNA
  misc_feature 8..11: note = RNA
  misc_feature 12: note = DNA
  misc_feature 13..23: note = RNA
aagcccaagaagttggccagcat

SEQ ID NO: 2381 - DNA, 23 bp, synthetic construct
  source 1..23: mol_type = other DNA
  modified_base 1: mod_base = OTHER; note = 2'-O-methyladenosine-3'-phosphorothioate
  modified_base 2: mod_base = OTHER; note = 2'-deoxyadenosine-3'-phosphorothioate
  modified_base 3: mod_base = OTHER; note = 2'-O-methyladenosine-3'-phosphate
  modified_base 4: mod_base = OTHER; note = 2'-O-methylguanosine-3'-phosphate
  modified_base 6: mod_base = OTHER; note = 2'-O-methylcytidine-3'-phosphate
  modified_base 8: mod_base = OTHER; note = 2'-O-methyladenosine-3'-phosphate
  modified_base 9: mod_base = OTHER; note = 2'-O-methyladenosine-3'-phosphate
  modified_base 10: mod_base = OTHER; note = 2'-O-methylguanosine-3'-phosphate
  modified_base 11: mod_base = OTHER; note = 2'-O-methyladenosine-3'-phosphate
  modified_base 13: mod_base = OTHER; note = 2'-O-methylguanosine-3'-phosphate
  modified_base 14: mod_base = OTHER; note = 2'-fluorouridine-3'-phosphate
  modified_base 15: mod_base = OTHER; note = 2'-O-methyluridine-3'-phosphate
  modified_base 16: mod_base = OTHER; note = 2'-O-methylguanosine-3'-phosphate
  modified_base 17: mod_base = OTHER; note = 2'-O-methylguanosine-3'-phosphate
  modified_base 18: mod_base = OTHER; note = 2'-O-methylcytidine-3'-phosphate
  modified_base 19: mod_base = OTHER; note = 2'-O-methylcytidine-3'-phosphate
  modified_base 20: mod_base = OTHER; note = 2'-O-methyladenosine-3'-phosphate
  modified_base 21: mod_base = OTHER; note = 2'-O-methylguanosine-3'-phosphorothioate
  modified_base 22: mod_base = OTHER; note = 2'-O-methylcytidine-3'-phosphorothioate
  modified_base 23: mod_base = OTHER; note = 2'-O-methyladenosine-3'-phosphate
  misc_feature 1: note = RNA
  misc_feature 2: note = DNA
  misc_feature 3..4: note = RNA
  misc_feature 5: note = DNA
  misc_feature 6: note = RNA
  misc_feature 7: note = DNA
  misc_feature 8..11: note = RNA
  misc_feature 12: note = DNA
  misc_feature 13..23: note = RNA
aaagcccaagaagttggccagca

SEQ ID NO: 2382 - DNA, 23 bp, synthetic construct
  source 1..23: mol_type = other DNA
  modified_base 1: mod_base = OTHER; note = 2'-O-methyladenosine-3'-phosphorothioate
  modified_base 2: mod_base = OTHER; note = 2'-deoxycytidine-3'-phosphorothioate
  modified_base 3: mod_base = OTHER; note = 2'-O-methylguanosine-3'-phosphate
  modified_base 4: mod_base = OTHER; note = 2'-O-methylguanosine-3'-phosphate
  modified_base 6: mod_base = OTHER; note = 2'-O-methyladenosine-3'-phosphate
  modified_base 8: mod_base = OTHER; note = 2'-O-methylcytidine-3'-phosphate
  modified_base 9: mod_base = OTHER; note = 2'-O-methylcytidine-3'-phosphate
  modified_base 10: mod_base = OTHER; note = 2'-O-methylcytidine-3'-phosphate
  modified_base 11: mod_base = OTHER; note = 2'-O-methyladenosine-3'-phosphate
  modified_base 13: mod_base = OTHER; note = 2'-O-methylguanosine-3'-phosphate
  modified_base 14: mod_base = OTHER; note = 2'-fluoroadenosine-3'-phosphate
  modified_base 15: mod_base = OTHER; note = 2'-O-methyladenosine-3'-phosphate
  modified_base 16: mod_base = OTHER; note = 2'-O-methylguanosine-3'-phosphate
  modified_base 17: mod_base = OTHER; note = 2'-O-methyluridine-3'-phosphate
  modified_base 18: mod_base = OTHER; note = 2'-O-methyluridine-3'-phosphate
  modified_base 19: mod_base = OTHER; note = 2'-O-methylguanosine-3'-phosphate
  modified_base 20: mod_base = OTHER; note = 2'-O-methylguanosine-3'-phosphate
  modified_base 21: mod_base = OTHER; note = 2'-O-methylcytidine-3'-phosphorothioate
  modified_base 22: mod_base = OTHER; note = 2'-O-methylcytidine-3'-phosphorothioate
  modified_base 23: mod_base = OTHER; note = 2'-O-methyladenosine-3'-phosphate
  misc_feature 1: note = RNA
  misc_feature 2: note = DNA
  misc_feature 3..4: note = RNA
  misc_feature 5: note = DNA
  misc_feature 6: note = RNA
  misc_feature 7: note = DNA
  misc_feature 8..11: note = RNA
  misc_feature 12: note = DNA
  misc_feature 13..23: note = RNA
acggaagcccaagaagttggcca

SEQ ID NO: 2383 - DNA, 23 bp, synthetic construct
  source 1..23: mol_type = other DNA
  modified_base 1: mod_base = OTHER; note = 2'-O-methyladenosine-3'-phosphorothioate
  modified_base 2: mod_base = OTHER; note = 2'-deoxyadenosine-3'-phosphorothioate
  modified_base 3: mod_base = OTHER; note = 2'-O-methylcytidine-3'-phosphate
  modified_base 4: mod_base = OTHER; note = 2'-O-methylguanosine-3'-phosphate
  modified_base 6: mod_base = OTHER; note = 2'-O-methyladenosine-3'-phosphate
  modified_base 8: mod_base = OTHER; note = 2'-O-methylguanosine-3'-phosphate
  modified_base 9: mod_base = OTHER; note = 2'-O-methylcytidine-3'-phosphate
  modified_base 10: mod_base = OTHER; note = 2'-O-methylcytidine-3'-phosphate
  modified_base 11: mod_base = OTHER; note = 2'-O-methylcytidine-3'-phosphate
  modified_base 13: mod_base = OTHER; note = 2'-O-methyladenosine-3'-phosphate
  modified_base 14: mod_base = OTHER; note = 2'-fluoroguanosine-3'-phosphate
  modified_base 15: mod_base = OTHER; note = 2'-O-methyladenosine-3'-phosphate
  modified_base 16: mod_base = OTHER; note = 2'-O-methyladenosine-3'-phosphate
  modified_base 17: mod_base = OTHER; note = 2'-O-methylguanosine-3'-phosphate
  modified_base 18: mod_base = OTHER; note = 2'-O-methyluridine-3'-phosphate
  modified_base 19: mod_base = OTHER; note = 2'-O-methyluridine-3'-phosphate
  modified_base 20: mod_base = OTHER; note = 2'-O-methylguanosine-3'-phosphate
  modified_base 21: mod_base = OTHER; note = 2'-O-methylguanosine-3'-phosphorothioate
  modified_base 22: mod_base = OTHER; note = 2'-O-methylcytidine-3'-phosphorothioate
  modified_base 23: mod_base = OTHER; note = 2'-O-methylcytidine-3'-phosphate
  misc_feature 1: note = RNA
  misc_feature 2: note = DNA
  misc_feature 3..4: note = RNA
  misc_feature 5: note = DNA
  misc_feature 6: note = RNA
  misc_feature 7: note = DNA
  misc_feature 8..11: note = RNA
  misc_feature 12: note = DNA
  misc_feature 13..23: note = RNA
aacggaagcccaagaagttggcc

SEQ ID NO: 2384 - DNA, 23 bp, synthetic construct
  source 1..23: mol_type = other DNA
  modified_base 1: mod_base = OTHER; note = 2'-O-methyladenosine-3'-phosphorothioate
  modified_base 2: mod_base = OTHER; note = 2'-deoxythimidine-3'-phosphorothioate
  modified_base 3: mod_base = OTHER; note = 2'-O-methyladenosine-3'-phosphate
  modified_base 4: mod_base = OTHER; note = 2'-O-methylcytidine-3'-phosphate
  modified_base 6: mod_base = OTHER; note = 2'-O-methylguanosine-3'-phosphate
  modified_base 8: mod_base = OTHER; note = 2'-O-methyladenosine-3'-phosphate
  modified_base 9: mod_base = OTHER; note = 2'-O-methylguanosine-3'-phosphate
  modified_base 10: mod_base = OTHER; note = 2'-O-methylcytidine-3'-phosphate
  modified_base 11: mod_base = OTHER; note = 2'-O-methylcytidine-3'-phosphate
  modified_base 13: mod_base = OTHER; note = 2'-O-methyladenosine-3'-phosphate
  modified_base 14: mod_base = OTHER; note = 2'-fluoroadenosine-3'-phosphate
  modified_base 15: mod_base = OTHER; note = 2'-O-methylguanosine-3'-phosphate
  modified_base 16: mod_base = OTHER; note = 2'-O-methyladenosine-3'-phosphate
  modified_base 17: mod_base = OTHER; note = 2'-O-methyladenosine-3'-phosphate
  modified_base 18: mod_base = OTHER; note = 2'-O-methylguanosine-3'-phosphate
  modified_base 19: mod_base = OTHER; note = 2'-O-methyluridine-3'-phosphate
  modified_base 20: mod_base = OTHER; note = 2'-O-methyluridine-3'-phosphate
  modified_base 21: mod_base = OTHER; note = 2'-O-methylguanosine-3'-phosphorothioate
  modified_base 22: mod_base = OTHER; note = 2'-O-methylguanosine-3'-phosphorothioate
  modified_base 23: mod_base = OTHER; note = 2'-O-methylcytidine-3'-phosphate
  misc_feature 1: note = RNA
  misc_feature 2: note = DNA
  misc_feature 3..4: note = RNA
  misc_feature 5: note = DNA
  misc_feature 6: note = RNA
  misc_feature 7: note = DNA
  misc_feature 8..11: note = RNA
  misc_feature 12: note = DNA
  misc_feature 13..23: note = RNA
atacggaagcccaagaagttggc

SEQ ID NO: 2385 - DNA, 23 bp, synthetic construct
  source 1..23: mol_type = other DNA
  modified_base 1: mod_base = OTHER; note = 2'-O-methyladenosine-3'-phosphorothioate
  modified_base 2: mod_base = OTHER; note = 2'-deoxyadenosine-3'-phosphorothioate
  modified_base 3: mod_base = OTHER; note = 2'-O-methyluridine-3'-phosphate
  modified_base 4: mod_base = OTHER; note = 2'-O-methyladenosine-3'-phosphate
  modified_base 6: mod_base = OTHER; note = 2'-O-methylguanosine-3'-phosphate
  modified_base 8: mod_base = OTHER; note = 2'-O-methyladenosine-3'-phosphate
  modified_base 9: mod_base = OTHER; note = 2'-O-methyladenosine-3'-phosphate
  modified_base 10: mod_base = OTHER; note = 2'-O-methylguanosine-3'-phosphate
  modified_base 11: mod_base = OTHER; note = 2'-O-methylcytidine-3'-phosphate
  modified_base 13: mod_base = OTHER; note = 2'-O-methylcytidine-3'-phosphate
  modified_base 14: mod_base = OTHER; note = 2'-fluoroadenosine-3'-phosphate
  modified_base 15: mod_base = OTHER; note = 2'-O-methyladenosine-3'-phosphate
  modified_base 16: mod_base = OTHER; note = 2'-O-methylguanosine-3'-phosphate
  modified_base 17: mod_base = OTHER; note = 2'-O-methyladenosine-3'-phosphate
  modified_base 18: mod_base = OTHER; note = 2'-O-methyladenosine-3'-phosphate
  modified_base 19: mod_base = OTHER; note = 2'-O-methylguanosine-3'-phosphate
  modified_base 20: mod_base = OTHER; note = 2'-O-methyluridine-3'-phosphate
  modified_base 21: mod_base = OTHER; note = 2'-O-methyluridine-3'-phosphorothioate
  modified_base 22: mod_base = OTHER; note = 2'-O-methylguanosine-3'-phosphorothioate
  modified_base 23: mod_base = OTHER; note = 2'-O-methylguanosine-3'-phosphate
  misc_feature 1: note = RNA
  misc_feature 2: note = DNA
  misc_feature 3..4: note = RNA
  misc_feature 5: note = DNA
  misc_feature 6: note = RNA
  misc_feature 7: note = DNA
  misc_feature 8..11: note = RNA
  misc_feature 12: note = DNA
  misc_feature 13..23: note = RNA
aatacggaagcccaagaagttgg

SEQ ID NO: 2386 - DNA, 23 bp, synthetic construct
  source 1..23: mol_type = other DNA
  modified_base 1: mod_base = OTHER; note = 2'-O-methyladenosine-3'-phosphorothioate
  modified_base 2: mod_base = OTHER; note = 2'-deoxythimidine-3'-phosphorothioate
  modified_base 3: mod_base = OTHER; note = 2'-O-methyladenosine-3'-phosphate
  modified_base 4: mod_base = OTHER; note = 2'-O-methyluridine-3'-phosphate
  modified_base 6: mod_base = OTHER; note = 2'-O-methylcytidine-3'-phosphate
  modified_base 8: mod_base = OTHER; note = 2'-O-methylguanosine-3'-phosphate
  modified_base 9: mod_base = OTHER; note = 2'-O-methyladenosine-3'-phosphate
  modified_base 10: mod_base = OTHER; note = 2'-O-methyladenosine-3'-phosphate
  modified_base 11: mod_base = OTHER; note = 2'-O-methylguanosine-3'-phosphate
  modified_base 13: mod_base = OTHER; note = 2'-O-methylcytidine-3'-phosphate
  modified_base 14: mod_base = OTHER; note = 2'-fluorocytidine-3'-phosphate
  modified_base 15: mod_base = OTHER; note = 2'-O-methyladenosine-3'-phosphate
  modified_base 16: mod_base = OTHER; note = 2'-O-methyladenosine-3'-phosphate
  modified_base 17: mod_base = OTHER; note = 2'-O-methylguanosine-3'-phosphate
  modified_base 18: mod_base = OTHER; note = 2'-O-methyladenosine-3'-phosphate
  modified_base 19: mod_base = OTHER; note = 2'-O-methyladenosine-3'-phosphate
  modified_base 20: mod_base = OTHER; note = 2'-O-methylguanosine-3'-phosphate
  modified_base 21: mod_base = OTHER; note = 2'-O-methyluridine-3'-phosphorothioate
  modified_base 22: mod_base = OTHER; note = 2'-O-methyluridine-3'-phosphorothioate
  modified_base 23: mod_base = OTHER; note = 2'-O-methylguanosine-3'-phosphate
  misc_feature 1: note = RNA
  misc_feature 2: note = DNA
  misc_feature 3..4: note = RNA
  misc_feature 5: note = DNA
  misc_feature 6: note = RNA
  misc_feature 7: note = DNA
  misc_feature 8..11: note = RNA
  misc_feature 12: note = DNA
  misc_feature 13..23: note = RNA
atatacggaagcccaagaagttg

SEQ ID NO: 2387 - DNA, 23 bp, synthetic construct
  source 1..23: mol_type = other DNA
  modified_base 1: mod_base = OTHER; note = 2'-O-methyladenosine-3'-phosphorothioate
  modified_base 2: mod_base = OTHER; note = 2'-deoxyadenosine-3'-phosphorothioate
  modified_base 3: mod_base = OTHER; note = 2'-O-methyluridine-3'-phosphate
  modified_base 4: mod_base = OTHER; note = 2'-O-methyladenosine-3'-phosphate
  modified_base 6: mod_base = OTHER; note = 2'-O-methyladenosine-3'-phosphate
  modified_base 8: mod_base = OTHER; note = 2'-O-methylguanosine-3'-phosphate
  modified_base 9: mod_base = OTHER; note = 2'-O-methylguanosine-3'-phosphate
  modified_base 10: mod_base = OTHER; note = 2'-O-methyladenosine-3'-phosphate
  modified_base 11: mod_base = OTHER; note = 2'-O-methyladenosine-3'-phosphate
  modified_base 13: mod_base = OTHER; note = 2'-O-methylcytidine-3'-phosphate
  modified_base 14: mod_base = OTHER; note = 2'-fluorocytidine-3'-phosphate
  modified_base 15: mod_base = OTHER; note = 2'-O-methylcytidine-3'-phosphate
  modified_base 16: mod_base = OTHER; note = 2'-O-methyladenosine-3'-phosphate
  modified_base 17: mod_base = OTHER; note = 2'-O-methyladenosine-3'-phosphate
  modified_base 18: mod_base = OTHER; note = 2'-O-methylguanosine-3'-phosphate
  modified_base 19: mod_base = OTHER; note = 2'-O-methyladenosine-3'-phosphate
  modified_base 20: mod_base = OTHER; note = 2'-O-methyladenosine-3'-phosphate
  modified_base 21: mod_base = OTHER; note = 2'-O-methylguanosine-3'-phosphorothioate
  modified_base 22: mod_base = OTHER; note = 2'-O-methyluridine-3'-phosphorothioate
  modified_base 23: mod_base = OTHER; note = 2'-O-methyluridine-3'-phosphate
  misc_feature 1: note = RNA
  misc_feature 2: note = DNA
  misc_feature 3..4: note = RNA
  misc_feature 5: note = DNA
  misc_feature 6: note = RNA
  misc_feature 7: note = DNA
  misc_feature 8..11: note = RNA
  misc_feature 12: note = DNA
  misc_feature 13..23: note = RNA
aatatacggaagcccaagaagtt

SEQ ID NO: 2388 - DNA, 23 bp, synthetic construct
  source 1..23: mol_type = other DNA
  modified_base 1: mod_base = OTHER; note = 2'-O-methyladenosine-3'-phosphorothioate
  modified_base 2: mod_base = OTHER; note = 2'-deoxythimidine-3'-phosphorothioate
  modified_base 3: mod_base = OTHER; note = 2'-O-methyladenosine-3'-phosphate
  modified_base 4: mod_base = OTHER; note = 2'-O-methyluridine-3'-phosphate
  modified_base 6: mod_base = OTHER; note = 2'-O-methyluridine-3'-phosphate
  modified_base 8: mod_base = OTHER; note = 2'-O-methylcytidine-3'-phosphate
  modified_base 9: mod_base = OTHER; note = 2'-O-methylguanosine-3'-phosphate
  modified_base 10: mod_base = OTHER; note = 2'-O-methylguanosine-3'-phosphate
  modified_base 11: mod_base = OTHER; note = 2'-O-methyladenosine-3'-phosphate
  modified_base 13: mod_base = OTHER; note = 2'-O-methylguanosine-3'-phosphate
  modified_base 14: mod_base = OTHER; note = 2'-fluorocytidine-3'-phosphate
  modified_base 15: mod_base = OTHER; note = 2'-O-methylcytidine-3'-phosphate
  modified_base 16: mod_base = OTHER; note = 2'-O-methylcytidine-3'-phosphate
  modified_base 17: mod_base = OTHER; note = 2'-O-methyladenosine-3'-phosphate
  modified_base 18: mod_base = OTHER; note = 2'-O-methyladenosine-3'-phosphate
  modified_base 19: mod_base = OTHER; note = 2'-O-methylguanosine-3'-phosphate
  modified_base 20: mod_base = OTHER; note = 2'-O-methyladenosine-3'-phosphate
  modified_base 21: mod_base = OTHER; note = 2'-O-methyladenosine-3'-phosphorothioate
  modified_base 22: mod_base = OTHER; note = 2'-O-methylguanosine-3'-phosphorothioate
  modified_base 23: mod_base = OTHER; note = 2'-O-methyluridine-3'-phosphate
  misc_feature 1: note = RNA
  misc_feature 2: note = DNA
  misc_feature 3..4: note = RNA
  misc_feature 5: note = DNA
  misc_feature 6: note = RNA
  misc_feature 7: note = DNA
  misc_feature 8..11: note = RNA
  misc_feature 12: note = DNA
  misc_feature 13..23: note = RNA
atatatacggaagcccaagaagt

SEQ ID NO: 2389 - DNA, 23 bp, synthetic construct
  source 1..23: mol_type = other DNA
  modified_base 1: mod_base = OTHER; note = 2'-O-methyladenosine-3'-phosphorothioate
  modified_base 2: mod_base = OTHER; note = 2'-deoxyadenosine-3'-phosphorothioate
  modified_base 3: mod_base = OTHER; note = 2'-O-methyluridine-3'-phosphate
  modified_base 4: mod_base = OTHER; note = 2'-O-methyladenosine-3'-phosphate
  modified_base 6: mod_base = OTHER; note = 2'-O-methyladenosine-3'-phosphate
  modified_base 8: mod_base = OTHER; note = 2'-O-methyladenosine-3'-phosphate
  modified_base 9: mod_base = OTHER; note = 2'-O-methylcytidine-3'-phosphate
  modified_base 10: mod_base = OTHER; note = 2'-O-methylguanosine-3'-phosphate
  modified_base 11: mod_base = OTHER; note = 2'-O-methylguanosine-3'-phosphate
  modified_base 13: mod_base = OTHER; note = 2'-O-methyladenosine-3'-phosphate
  modified_base 14: mod_base = OTHER; note = 2'-fluoroguanosine-3'-phosphate
  modified_base 15: mod_base = OTHER; note = 2'-O-methylcytidine-3'-phosphate
  modified_base 16: mod_base = OTHER; note = 2'-O-methylcytidine-3'-phosphate
  modified_base 17: mod_base = OTHER; note = 2'-O-methylcytidine-3'-phosphate
  modified_base 18: mod_base = OTHER; note = 2'-O-methyladenosine-3'-phosphate
  modified_base 19: mod_base = OTHER; note = 2'-O-methyladenosine-3'-phosphate
  modified_base 20: mod_base = OTHER; note = 2'-O-methylguanosine-3'-phosphate
  modified_base 21: mod_base = OTHER; note = 2'-O-methyladenosine-3'-phosphorothioate
  modified_base 22: mod_base = OTHER; note = 2'-O-methyladenosine-3'-phosphorothioate
  modified_base 23: mod_base = OTHER; note = 2'-O-methylguanosine-3'-phosphate
  misc_feature 1: note = RNA
  misc_feature 2: note = DNA
  misc_feature 3..4: note = RNA
  misc_feature 5: note = DNA
  misc_feature 6: note = RNA
  misc_feature 7: note = DNA
  misc_feature 8..11: note = RNA
  misc_feature 12: note = DNA
  misc_feature 13..23: note = RNA
aatatatacggaagcccaagaag

SEQ ID NO: 2390 - DNA, 23 bp, synthetic construct
  source 1..23: mol_type = other DNA
  modified_base 1: mod_base = OTHER; note = 2'-O-methyladenosine-3'-phosphorothioate
  modified_base 2: mod_base = OTHER; note = 2'-deoxycytidine-3'-phosphorothioate
  modified_base 3: mod_base = OTHER; note = 2'-O-methyladenosine-3'-phosphate
  modified_base 4: mod_base = OTHER; note = 2'-O-methyluridine-3'-phosphate
  modified_base 6: mod_base = OTHER; note = 2'-O-methyluridine-3'-phosphate
  modified_base 8: mod_base = OTHER; note = 2'-O-methyluridine-3'-phosphate
  modified_base 9: mod_base = OTHER; note = 2'-O-methyladenosine-3'-phosphate
  modified_base 10: mod_base = OTHER; note = 2'-O-methylcytidine-3'-phosphate
  modified_base 11: mod_base = OTHER; note = 2'-O-methylguanosine-3'-phosphate
  modified_base 13: mod_base = OTHER; note = 2'-O-methyladenosine-3'-phosphate
  modified_base 14: mod_base = OTHER; note = 2'-fluoroadenosine-3'-phosphate
  modified_base 15: mod_base = OTHER; note = 2'-O-methylguanosine-3'-phosphate
  modified_base 16: mod_base = OTHER; note = 2'-O-methylcytidine-3'-phosphate
  modified_base 17: mod_base = OTHER; note = 2'-O-methylcytidine-3'-phosphate
  modified_base 18: mod_base = OTHER; note = 2'-O-methylcytidine-3'-phosphate
  modified_base 19: mod_base = OTHER; note = 2'-O-methyladenosine-3'-phosphate
  modified_base 20: mod_base = OTHER; note = 2'-O-methyladenosine-3'-phosphate
  modified_base 21: mod_base = OTHER; note = 2'-O-methylguanosine-3'-phosphorothioate
  modified_base 22: mod_base = OTHER; note = 2'-O-methyladenosine-3'-phosphorothioate
  modified_base 23: mod_base = OTHER; note = 2'-O-methyladenosine-3'-phosphate
  misc_feature 1: note = RNA
  misc_feature 2: note = DNA
  misc_feature 3..4: note = RNA
  misc_feature 5: note = DNA
  misc_feature 6: note = RNA
  misc_feature 7: note = DNA
  misc_feature 8..11: note = RNA
  misc_feature 12: note = DNA
  misc_feature 13..23: note = RNA
acatatatacggaagcccaagaa

SEQ ID NO: 2391 - DNA, 23 bp, synthetic construct
  source 1..23: mol_type = other DNA
  modified_base 1: mod_base = OTHER; note = 2'-O-methyladenosine-3'-phosphorothioate
  modified_base 2: mod_base = OTHER; note = 2'-deoxycytidine-3'-phosphorothioate
  modified_base 3: mod_base = OTHER; note = 2'-O-methylcytidine-3'-phosphate
  modified_base 4: mod_base = OTHER; note = 2'-O-methyladenosine-3'-phosphate
  modified_base 6: mod_base = OTHER; note = 2'-O-methyladenosine-3'-phosphate
  modified_base 8: mod_base = OTHER; note = 2'-O-methyladenosine-3'-phosphate
  modified_base 9: mod_base = OTHER; note = 2'-O-methyluridine-3'-phosphate
  modified_base 10: mod_base = OTHER; note = 2'-O-methyladenosine-3'-phosphate
  modified_base 11: mod_base = OTHER; note = 2'-O-methylcytidine-3'-phosphate
  modified_base 13: mod_base = OTHER; note = 2'-O-methylguanosine-3'-phosphate
  modified_base 14: mod_base = OTHER; note = 2'-fluoroadenosine-3'-phosphate
  modified_base 15: mod_base = OTHER; note = 2'-O-methyladenosine-3'-phosphate
  modified_base 16: mod_base = OTHER; note = 2'-O-methylguanosine-3'-phosphate
  modified_base 17: mod_base = OTHER; note = 2'-O-methylcytidine-3'-phosphate
  modified_base 18: mod_base = OTHER; note = 2'-O-methylcytidine-3'-phosphate
  modified_base 19: mod_base = OTHER; note = 2'-O-methylcytidine-3'-phosphate
  modified_base 20: mod_base = OTHER; note = 2'-O-methyladenosine-3'-phosphate
  modified_base 21: mod_base = OTHER; note = 2'-O-methyladenosine-3'-phosphorothioate
  modified_base 22: mod_base = OTHER; note = 2'-O-methylguanosine-3'-phosphorothioate
  modified_base 23: mod_base = OTHER; note = 2'-O-methyladenosine-3'-phosphate
  misc_feature 1: note = RNA
  misc_feature 2: note = DNA
  misc_feature 3..4: note = RNA
  misc_feature 5: note = DNA
  misc_feature 6: note = RNA
  misc_feature 7: note = DNA
  misc_feature 8..11: note = RNA
  misc_feature 12: note = DNA
  misc_feature 13..23: note = RNA
accatatatacggaagcccaaga

SEQ ID NO: 2392 - DNA, 23 bp, synthetic construct
  source 1..23: mol_type = other DNA
  modified_base 1: mod_base = OTHER; note = 2'-O-methyladenosine-3'-phosphorothioate
  modified_base 2: mod_base = OTHER; note = 2'-deoxyguanosine-3'-phosphorothioate
  modified_base 3: mod_base = OTHER; note = 2'-O-methylcytidine-3'-phosphate
  modified_base 4: mod_base = OTHER; note = 2'-O-methylcytidine-3'-phosphate
  modified_base 6: mod_base = OTHER; note = 2'-O-methyluridine-3'-phosphate
  modified_base 8: mod_base = OTHER; note = 2'-O-methyluridine-3'-phosphate
  modified_base 9: mod_base = OTHER; note = 2'-O-methyladenosine-3'-phosphate
  modified_base 10: mod_base = OTHER; note = 2'-O-methyluridine-3'-phosphate
  modified_base 11: mod_base = OTHER; note = 2'-O-methyladenosine-3'-phosphate
  modified_base 13: mod_base = OTHER; note = 2'-O-methylguanosine-3'-phosphate
  modified_base 14: mod_base = OTHER; note = 2'-fluoroguanosine-3'-phosphate
  modified_base 15: mod_base = OTHER; note = 2'-O-methyladenosine-3'-phosphate
  modified_base 16: mod_base = OTHER; note = 2'-O-methyladenosine-3'-phosphate
  modified_base 17: mod_base = OTHER; note = 2'-O-methylguanosine-3'-phosphate
  modified_base 18: mod_base = OTHER; note = 2'-O-methylcytidine-3'-phosphate
  modified_base 19: mod_base = OTHER; note = 2'-O-methylcytidine-3'-phosphate
  modified_base 20: mod_base = OTHER; note = 2'-O-methylcytidine-3'-phosphate
  modified_base 21: mod_base = OTHER; note = 2'-O-methyladenosine-3'-phosphorothioate
  modified_base 22: mod_base = OTHER; note = 2'-O-methyladenosine-3'-phosphorothioate
  modified_base 23: mod_base = OTHER; note = 2'-O-methylguanosine-3'-phosphate
  misc_feature 1: note = RNA
  misc_feature 2: note = DNA
  misc_feature 3..4: note = RNA
  misc_feature 5: note = DNA
  misc_feature 6: note = RNA
  misc_feature 7: note = DNA
  misc_feature 8..11: note = RNA
  misc_feature 12: note = DNA
  misc_feature 13..23: note = RNA
agccatatatacggaagcccaag

SEQ ID NO: 2393 - DNA, 23 bp, synthetic construct
  source 1..23: mol_type = other DNA
  modified_base 1: mod_base = OTHER; note = 2'-O-methyladenosine-3'-phosphorothioate
  modified_base 2: mod_base = OTHER; note = 2'-deoxythimidine-3'-phosphorothioate
  modified_base 3: mod_base = OTHER; note = 2'-O-methylguanosine-3'-phosphate
  modified_base 4: mod_base = OTHER; note = 2'-O-methylcytidine-3'-phosphate
  modified_base 6: mod_base = OTHER; note = 2'-O-methyladenosine-3'-phosphate
  modified_base 8: mod_base = OTHER; note = 2'-O-methyladenosine-3'-phosphate
  modified_base 9: mod_base = OTHER; note = 2'-O-methyluridine-3'-phosphate
  modified_base 10: mod_base = OTHER; note = 2'-O-methyladenosine-3'-phosphate
  modified_base 11: mod_base = OTHER; note = 2'-O-methyluridine-3'-phosphate
  modified_base 13: mod_base = OTHER; note = 2'-O-methylcytidine-3'-phosphate
  modified_base 14: mod_base = OTHER; note = 2'-fluoroguanosine-3'-phosphate
  modified_base 15: mod_base = OTHER; note = 2'-O-methylguanosine-3'-phosphate
  modified_base 16: mod_base = OTHER; note = 2'-O-methyladenosine-3'-phosphate
  modified_base 17: mod_base = OTHER; note = 2'-O-methyladenosine-3'-phosphate
  modified_base 18: mod_base = OTHER; note = 2'-O-methylguanosine-3'-phosphate
  modified_base 19: mod_base = OTHER; note = 2'-O-methylcytidine-3'-phosphate
  modified_base 20: mod_base = OTHER; note = 2'-O-methylcytidine-3'-phosphate
  modified_base 21: mod_base = OTHER; note = 2'-O-methylcytidine-3'-phosphorothioate
  modified_base 22: mod_base = OTHER; note = 2'-O-methyladenosine-3'-phosphorothioate
  modified_base 23: mod_base = OTHER; note = 2'-O-methyladenosine-3'-phosphate
  misc_feature 1: note = RNA
  misc_feature 2: note = DNA
  misc_feature 3..4: note = RNA
  misc_feature 5: note = DNA
  misc_feature 6: note = RNA
  misc_feature 7: note = DNA
  misc_feature 8..11: note = RNA
  misc_feature 12: note = DNA
  misc_feature 13..23: note = RNA
atgccatatatacggaagcccaa

SEQ ID NO: 2394 - DNA, 23 bp, synthetic construct
  source 1..23: mol_type = other DNA
  modified_base 1: mod_base = OTHER; note = 2'-O-methyladenosine-3'-phosphorothioate
  modified_base 2: mod_base = OTHER; note = 2'-deoxyadenosine-3'-phosphorothioate
  modified_base 3: mod_base = OTHER; note = 2'-O-methyluridine-3'-phosphate
  modified_base 4: mod_base = OTHER; note = 2'-O-methylguanosine-3'-phosphate
  modified_base 6: mod_base = OTHER; note = 2'-O-methylcytidine-3'-phosphate
  modified_base 8: mod_base = OTHER; note = 2'-O-methyluridine-3'-phosphate
  modified_base 9: mod_base = OTHER; note = 2'-O-methyladenosine-3'-phosphate
  modified_base 10: mod_base = OTHER; note = 2'-O-methyluridine-3'-phosphate
  modified_base 11: mod_base = OTHER; note = 2'-O-methyladenosine-3'-phosphate
  modified_base 13: mod_base = OTHER; note = 2'-O-methyladenosine-3'-phosphate
  modified_base 14: mod_base = OTHER; note = 2'-fluorocytidine-3'-phosphate
  modified_base 15: mod_base = OTHER; note = 2'-O-methylguanosine-3'-phosphate
  modified_base 16: mod_base = OTHER; note = 2'-O-methylguanosine-3'-phosphate
  modified_base 17: mod_base = OTHER; note = 2'-O-methyladenosine-3'-phosphate
  modified_base 18: mod_base = OTHER; note = 2'-O-methyladenosine-3'-phosphate
  modified_base 19: mod_base = OTHER; note = 2'-O-methylguanosine-3'-phosphate
  modified_base 20: mod_base = OTHER; note = 2'-O-methylcytidine-3'-phosphate
  modified_base 21: mod_base = OTHER; note = 2'-O-methylcytidine-3'-phosphorothioate
  modified_base 22: mod_base = OTHER; note = 2'-O-methylcytidine-3'-phosphorothioate
  modified_base 23: mod_base = OTHER; note = 2'-O-methyladenosine-3'-phosphate
  misc_feature 1: note = RNA
  misc_feature 2: note = DNA
  misc_feature 3..4: note = RNA
  misc_feature 5: note = DNA
  misc_feature 6: note = RNA
  misc_feature 7: note = DNA
  misc_feature 8..11: note = RNA
  misc_feature 12: note = DNA
  misc_feature 13..23: note = RNA
aatgccatatatacggaagccca

SEQ ID NO: 2395 - DNA, 23 bp, synthetic construct
  source 1..23: mol_type = other DNA
  modified_base 1: mod_base = OTHER; note = 2'-O-methyladenosine-3'-phosphorothioate
  modified_base 2: mod_base = OTHER; note = 2'-deoxycytidine-3'-phosphorothioate
  modified_base 3: mod_base = OTHER; note = 2'-O-methyladenosine-3'-phosphate
  modified_base 4: mod_base = OTHER; note = 2'-O-methyluridine-3'-phosphate
  modified_base 6: mod_base = OTHER; note = 2'-O-methylcytidine-3'-phosphate
  modified_base 8: mod_base = OTHER; note = 2'-O-methyladenosine-3'-phosphate
  modified_base 9: mod_base = OTHER; note = 2'-O-methyluridine-3'-phosphate
  modified_base 10: mod_base = OTHER; note = 2'-O-methyladenosine-3'-phosphate
  modified_base 11: mod_base = OTHER; note = 2'-O-methyluridine-3'-phosphate
  modified_base 13: mod_base = OTHER; note = 2'-O-methyluridine-3'-phosphate
  modified_base 14: mod_base = OTHER; note = 2'-fluoroadenosine-3'-phosphate
  modified_base 15: mod_base = OTHER; note = 2'-O-methylcytidine-3'-phosphate
  modified_base 16: mod_base = OTHER; note = 2'-O-methylguanosine-3'-phosphate
  modified_base 17: mod_base = OTHER; note = 2'-O-methylguanosine-3'-phosphate
  modified_base 18: mod_base = OTHER; note = 2'-O-methyladenosine-3'-phosphate
  modified_base 19: mod_base = OTHER; note = 2'-O-methyladenosine-3'-phosphate
  modified_base 20: mod_base = OTHER; note = 2'-O-methylguanosine-3'-phosphate
  modified_base 21: mod_base = OTHER; note = 2'-O-methylcytidine-3'-phosphorothioate
  modified_base 22: mod_base = OTHER; note = 2'-O-methylcytidine-3'-phosphorothioate
  modified_base 23: mod_base = OTHER; note = 2'-O-methylcytidine-3'-phosphate
  misc_feature 1: note = RNA
  misc_feature 2: note = DNA
  misc_feature 3..4: note = RNA
  misc_feature 5: note = DNA
  misc_feature 6: note = RNA
  misc_feature 7: note = DNA
  misc_feature 8..11: note = RNA
  misc_feature 12: note = DNA
  misc_feature 13..23: note = RNA
acatgccatatatacggaagccc

SEQ ID NO: 2396 - DNA, 23 bp, synthetic construct
  source 1..23: mol_type = other DNA
  modified_base 1: mod_base = OTHER; note = 2'-O-methyladenosine-3'-phosphorothioate
  modified_base 2: mod_base = OTHER; note = 2'-deoxycytidine-3'-phosphorothioate
  modified_base 3: mod_base = OTHER; note = 2'-O-methyladenosine-3'-phosphate
  modified_base 4: mod_base = OTHER; note = 2'-O-methylcytidine-3'-phosphate
  modified_base 6: mod_base = OTHER; note = 2'-O-methylguanosine-3'-phosphate
  modified_base 8: mod_base = OTHER; note = 2'-O-methylguanosine-3'-phosphate
  modified_base 9: mod_base = OTHER; note = 2'-O-methylcytidine-3'-phosphate
  modified_base 10: mod_base = OTHER; note = 2'-O-methyladenosine-3'-phosphate
  modified_base 11: mod_base = OTHER; note = 2'-O-methyluridine-3'-phosphate
  modified_base 13: mod_base = OTHER; note = 2'-O-methylcytidine-3'-phosphate
  modified_base 14: mod_base = OTHER; note = 2'-fluorocytidine-3'-phosphate
  modified_base 15: mod_base = OTHER; note = 2'-O-methyladenosine-3'-phosphate
  modified_base 16: mod_base = OTHER; note = 2'-O-methyluridine-3'-phosphate
  modified_base 17: mod_base = OTHER; note = 2'-O-methyladenosine-3'-phosphate
  modified_base 18: mod_base = OTHER; note = 2'-O-methyluridine-3'-phosphate
  modified_base 19: mod_base = OTHER; note = 2'-O-methyladenosine-3'-phosphate
  modified_base 20: mod_base = OTHER; note = 2'-O-methyluridine-3'-phosphate
  modified_base 21: mod_base = OTHER; note = 2'-O-methyladenosine-3'-phosphorothioate
  modified_base 22: mod_base = OTHER; note = 2'-O-methylcytidine-3'-phosphorothioate
  modified_base 23: mod_base = OTHER; note = 2'-O-methylguanosine-3'-phosphate
  misc_feature 1: note = RNA
  misc_feature 2: note = DNA
  misc_feature 3..4: note = RNA
  misc_feature 5: note = DNA
  misc_feature 6: note = RNA
  misc_feature 7: note = DNA
  misc_feature 8..11: note = RNA
  misc_feature 12: note = DNA
  misc_feature 13..23: note = RNA
acactgtgcatgccatatatacg

SEQ ID NO: 2397 - DNA, 23 bp, synthetic construct
  source 1..23: mol_type = other DNA
  modified_base 1: mod_base = OTHER; note = 2'-O-methyladenosine-3'-phosphorothioate
  modified_base 2: mod_base = OTHER; note = 2'-deoxythimidine-3'-phosphorothioate
  modified_base 3: mod_base = OTHER; note = 2'-O-methylcytidine-3'-phosphate
  modified_base 4: mod_base = OTHER; note = 2'-O-methyladenosine-3'-phosphate
  modified_base 6: mod_base = OTHER; note = 2'-O-methyluridine-3'-phosphate
  modified_base 8: mod_base = OTHER; note = 2'-O-methyluridine-3'-phosphate
  modified_base 9: mod_base = OTHER; note = 2'-O-methylguanosine-3'-phosphate
  modified_base 10: mod_base = OTHER; note = 2'-O-methylcytidine-3'-phosphate
  modified_base 11: mod_base = OTHER; note = 2'-O-methyladenosine-3'-phosphate
  modified_base 13: mod_base = OTHER; note = 2'-O-methylguanosine-3'-phosphate
  modified_base 14: mod_base = OTHER; note = 2'-fluorocytidine-3'-phosphate
  modified_base 15: mod_base = OTHER; note = 2'-O-methylcytidine-3'-phosphate
  modified_base 16: mod_base = OTHER; note = 2'-O-methyladenosine-3'-phosphate
  modified_base 17: mod_base = OTHER; note = 2'-O-methyluridine-3'-phosphate
  modified_base 18: mod_base = OTHER; note = 2'-O-methyladenosine-3'-phosphate
  modified_base 19: mod_base = OTHER; note = 2'-O-methyluridine-3'-phosphate
  modified_base 20: mod_base = OTHER; note = 2'-O-methyladenosine-3'-phosphate
  modified_base 21: mod_base = OTHER; note = 2'-O-methyluridine-3'-phosphorothioate
  modified_base 22: mod_base = OTHER; note = 2'-O-methyladenosine-3'-phosphorothioate
  modified_base 23: mod_base = OTHER; note = 2'-O-methylcytidine-3'-phosphate
  misc_feature 1: note = RNA
  misc_feature 2: note = DNA
  misc_feature 3..4: note = RNA
  misc_feature 5: note = DNA
  misc_feature 6: note = RNA
  misc_feature 7: note = DNA
  misc_feature 8..11: note = RNA
  misc_feature 12: note = DNA
  misc_feature 13..23: note = RNA
atcactgtgcatgccatatatac

SEQ ID NO: 2398 - DNA, 23 bp, synthetic construct
  source 1..23: mol_type = other DNA
  modified_base 1: mod_base = OTHER; note = 2'-O-methyladenosine-3'-phosphorothioate
  modified_base 2: mod_base = OTHER; note = 2'-deoxycytidine-3'-phosphorothioate
  modified_base 3: mod_base = OTHER; note = 2'-O-methyluridine-3'-phosphate
  modified_base 4: mod_base = OTHER; note = 2'-O-methylcytidine-3'-phosphate
  modified_base 6: mod_base = OTHER; note = 2'-O-methylcytidine-3'-phosphate
  modified_base 8: mod_base = OTHER; note = 2'-O-methylguanosine-3'-phosphate
  modified_base 9: mod_base = OTHER; note = 2'-O-methyluridine-3'-phosphate
  modified_base 10: mod_base = OTHER; note = 2'-O-methylguanosine-3'-phosphate
  modified_base 11: mod_base = OTHER; note = 2'-O-methylcytidine-3'-phosphate
  modified_base 13: mod_base = OTHER; note = 2'-O-methyluridine-3'-phosphate
  modified_base 14: mod_base = OTHER; note = 2'-fluoroguanosine-3'-phosphate
  modified_base 15: mod_base = OTHER; note = 2'-O-methylcytidine-3'-phosphate
  modified_base 16: mod_base = OTHER; note = 2'-O-methylcytidine-3'-phosphate
  modified_base 17: mod_base = OTHER; note = 2'-O-methyladenosine-3'-phosphate
  modified_base 18: mod_base = OTHER; note = 2'-O-methyluridine-3'-phosphate
  modified_base 19: mod_base = OTHER; note = 2'-O-methyladenosine-3'-phosphate
  modified_base 20: mod_base = OTHER; note = 2'-O-methyluridine-3'-phosphate
  modified_base 21: mod_base = OTHER; note = 2'-O-methyladenosine-3'-phosphorothioate
  modified_base 22: mod_base = OTHER; note = 2'-O-methyluridine-3'-phosphorothioate
  modified_base 23: mod_base = OTHER; note = 2'-O-methyladenosine-3'-phosphate
  misc_feature 1: note = RNA
  misc_feature 2: note = DNA
  misc_feature 3..4: note = RNA
  misc_feature 5: note = DNA
  misc_feature 6: note = RNA
  misc_feature 7: note = DNA
  misc_feature 8..11: note = RNA
  misc_feature 12: note = DNA
  misc_feature 13..23: note = RNA
actcactgtgcatgccatatata

SEQ ID NO: 2399 - DNA, 23 bp, synthetic construct
  source 1..23: mol_type = other DNA
  modified_base 1: mod_base = OTHER; note = 2'-O-methyladenosine-3'-phosphorothioate
  modified_base 2: mod_base = OTHER; note = 2'-deoxyguanosine-3'-phosphorothioate
  modified_base 3: mod_base = OTHER; note = 2'-O-methylcytidine-3'-phosphate
  modified_base 4: mod_base = OTHER; note = 2'-O-methyluridine-3'-phosphate
  modified_base 6: mod_base = OTHER; note = 2'-O-methyladenosine-3'-phosphate
  modified_base 8: mod_base = OTHER; note = 2'-O-methyluridine-3'-phosphate
  modified_base 9: mod_base = OTHER; note = 2'-O-methylguanosine-3'-phosphate
  modified_base 10: mod_base = OTHER; note = 2'-O-methyluridine-3'-phosphate
  modified_base 11: mod_base = OTHER; note = 2'-O-methylguanosine-3'-phosphate
  modified_base 13: mod_base = OTHER; note = 2'-O-methyladenosine-3'-phosphate
  modified_base 14: mod_base = OTHER; note = 2'-fluorouridine-3'-phosphate
  modified_base 15: mod_base = OTHER; note = 2'-O-methylguanosine-3'-phosphate
  modified_base 16: mod_base = OTHER; note = 2'-O-methylcytidine-3'-phosphate
  modified_base 17: mod_base = OTHER; note = 2'-O-methylcytidine-3'-phosphate
  modified_base 18: mod_base = OTHER; note = 2'-O-methyladenosine-3'-phosphate
  modified_base 19: mod_base = OTHER; note = 2'-O-methyluridine-3'-phosphate
  modified_base 20: mod_base = OTHER; note = 2'-O-methyladenosine-3'-phosphate
  modified_base 21: mod_base = OTHER; note = 2'-O-methyluridine-3'-phosphorothioate
  modified_base 22: mod_base = OTHER; note = 2'-O-methyladenosine-3'-phosphorothioate
  modified_base 23: mod_base = OTHER; note = 2'-O-methyluridine-3'-phosphate
  misc_feature 1: note = RNA
  misc_feature 2: note = DNA
  misc_feature 3..4: note = RNA
  misc_feature 5: note = DNA
  misc_feature 6: note = RNA
  misc_feature 7: note = DNA
  misc_feature 8..11: note = RNA
  misc_feature 12: note = DNA
  misc_feature 13..23: note = RNA
agctcactgtgcatgccatatat

SEQ ID NO: 2400 - DNA, 23 bp, synthetic construct
  source 1..23: mol_type = other DNA
  modified_base 1: mod_base = OTHER; note = 2'-O-methyladenosine-3'-phosphorothioate
  modified_base 2: mod_base = OTHER; note = 2'-deoxyadenosine-3'-phosphorothioate
  modified_base 3: mod_base = OTHER; note = 2'-O-methylguanosine-3'-phosphate
  modified_base 4: mod_base = OTHER; note = 2'-O-methylcytidine-3'-phosphate
  modified_base 6: mod_base = OTHER; note = 2'-O-methylcytidine-3'-phosphate
  modified_base 8: mod_base = OTHER; note = 2'-O-methylcytidine-3'-phosphate
  modified_base 9: mod_base = OTHER; note = 2'-O-methyluridine-3'-phosphate
  modified_base 10: mod_base = OTHER; note = 2'-O-methylguanosine-3'-phosphate
  modified_base 11: mod_base = OTHER; note = 2'-O-methyluridine-3'-phosphate
  modified_base 13: mod_base = OTHER; note = 2'-O-methylcytidine-3'-phosphate
  modified_base 14: mod_base = OTHER; note = 2'-fluoroadenosine-3'-phosphate
  modified_base 15: mod_base = OTHER; note = 2'-O-methyluridine-3'-phosphate
  modified_base 16: mod_base = OTHER; note = 2'-O-methylguanosine-3'-phosphate
  modified_base 17: mod_base = OTHER; note = 2'-O-methylcytidine-3'-phosphate
  modified_base 18: mod_base = OTHER; note = 2'-O-methylcytidine-3'-phosphate
  modified_base 19: mod_base = OTHER; note = 2'-O-methyladenosine-3'-phosphate
  modified_base 20: mod_base = OTHER; note = 2'-O-methyluridine-3'-phosphate
  modified_base 21: mod_base = OTHER; note = 2'-O-methyladenosine-3'-phosphorothioate
  modified_base 22: mod_base = OTHER; note = 2'-O-methyluridine-3'-phosphorothioate
  modified_base 23: mod_base = OTHER; note = 2'-O-methyladenosine-3'-phosphate
  misc_feature 1: note = RNA
  misc_feature 2: note = DNA
  misc_feature 3..4: note = RNA
  misc_feature 5: note = DNA
  misc_feature 6: note = RNA
  misc_feature 7: note = DNA
  misc_feature 8..11: note = RNA
  misc_feature 12: note = DNA
  misc_feature 13..23: note = RNA
aagctcactgtgcatgccatata

SEQ ID NO: 2401 - DNA, 23 bp, synthetic construct
  source 1..23: mol_type = other DNA
  modified_base 1: mod_base = OTHER; note = 2'-O-methyladenosine-3'-phosphorothioate
  modified_base 2: mod_base = OTHER; note = 2'-deoxythimidine-3'-phosphorothioate
  modified_base 3: mod_base = OTHER; note = 2'-O-methyladenosine-3'-phosphate
  modified_base 4: mod_base = OTHER; note = 2'-O-methylguanosine-3'-phosphate
  modified_base 6: mod_base = OTHER; note = 2'-O-methyluridine-3'-phosphate
  modified_base 8: mod_base = OTHER; note = 2'-O-methyladenosine-3'-phosphate
  modified_base 9: mod_base = OTHER; note = 2'-O-methylcytidine-3'-phosphate
  modified_base 10: mod_base = OTHER; note = 2'-O-methyluridine-3'-phosphate
  modified_base 11: mod_base = OTHER; note = 2'-O-methylguanosine-3'-phosphate
  modified_base 13: mod_base = OTHER; note = 2'-O-methylguanosine-3'-phosphate
  modified_base 14: mod_base = OTHER; note = 2'-fluorocytidine-3'-phosphate
  modified_base 15: mod_base = OTHER; note = 2'-O-methyladenosine-3'-phosphate
  modified_base 16: mod_base = OTHER; note = 2'-O-methyluridine-3'-phosphate
  modified_base 17: mod_base = OTHER; note = 2'-O-methylguanosine-3'-phosphate
  modified_base 18: mod_base = OTHER; note = 2'-O-methylcytidine-3'-phosphate
  modified_base 19: mod_base = OTHER; note = 2'-O-methylcytidine-3'-phosphate
  modified_base 20: mod_base = OTHER; note = 2'-O-methyladenosine-3'-phosphate
  modified_base 21: mod_base = OTHER; note = 2'-O-methyluridine-3'-phosphorothioate
  modified_base 22: mod_base = OTHER; note = 2'-O-methyladenosine-3'-phosphorothioate
  modified_base 23: mod_base = OTHER; note = 2'-O-methyluridine-3'-phosphate
  misc_feature 1: note = RNA
  misc_feature 2: note = DNA
  misc_feature 3..4: note = RNA
  misc_feature 5: note = DNA
  misc_feature 6: note = RNA
  misc_feature 7: note = DNA
  misc_feature 8..11: note = RNA
  misc_feature 12: note = DNA
  misc_feature 13..23: note = RNA
atagctcactgtgcatgccatat

SEQ ID NO: 2402 - DNA, 23 bp, synthetic construct
  source 1..23: mol_type = other DNA
  modified_base 1: mod_base = OTHER; note = 2'-O-methyladenosine-3'-phosphorothioate
  modified_base 2: mod_base = OTHER; note = 2'-deoxyadenosine-3'-phosphorothioate
  modified_base 3: mod_base = OTHER; note = 2'-O-methyluridine-3'-phosphate
  modified_base 4: mod_base = OTHER; note = 2'-O-methyladenosine-3'-phosphate
  modified_base 6: mod_base = OTHER; note = 2'-O-methylcytidine-3'-phosphate
  modified_base 8: mod_base = OTHER; note = 2'-O-methylcytidine-3'-phosphate
  modified_base 9: mod_base = OTHER; note = 2'-O-methyladenosine-3'-phosphate
  modified_base 10: mod_base = OTHER; note = 2'-O-methylcytidine-3'-phosphate
  modified_base 11: mod_base = OTHER; note = 2'-O-methyluridine-3'-phosphate
  modified_base 13: mod_base = OTHER; note = 2'-O-methyluridine-3'-phosphate
  modified_base 14: mod_base = OTHER; note = 2'-fluoroguanosine-3'-phosphate
  modified_base 15: mod_base = OTHER; note = 2'-O-methylcytidine-3'-phosphate
  modified_base 16: mod_base = OTHER; note = 2'-O-methyladenosine-3'-phosphate
  modified_base 17: mod_base = OTHER; note = 2'-O-methyluridine-3'-phosphate
  modified_base 18: mod_base = OTHER; note = 2'-O-methylguanosine-3'-phosphate
  modified_base 19: mod_base = OTHER; note = 2'-O-methylcytidine-3'-phosphate
  modified_base 20: mod_base = OTHER; note = 2'-O-methylcytidine-3'-phosphate
  modified_base 21: mod_base = OTHER; note = 2'-O-methyladenosine-3'-phosphorothioate
  modified_base 22: mod_base = OTHER; note = 2'-O-methyluridine-3'-phosphorothioate
  modified_base 23: mod_base = OTHER; note = 2'-O-methyladenosine-3'-phosphate
  misc_feature 1: note = RNA
  misc_feature 2: note = DNA
  misc_feature 3..4: note = RNA
  misc_feature 5: note = DNA
  misc_feature 6: note = RNA
  misc_feature 7: note = DNA
  misc_feature 8..11: note = RNA
  misc_feature 12: note = DNA
  misc_feature 13..23: note = RNA
aatagctcactgtgcatgccata

SEQ ID NO: 2403 - DNA, 23 bp, synthetic construct
  source 1..23: mol_type = other DNA
  modified_base 1: mod_base = OTHER; note = 2'-O-methyladenosine-3'-phosphorothioate
  modified_base 2: mod_base = OTHER; note = 2'-deoxycytidine-3'-phosphorothioate
  modified_base 3: mod_base = OTHER; note = 2'-O-methyladenosine-3'-phosphate
  modified_base 4: mod_base = OTHER; note = 2'-O-methyluridine-3'-phosphate
  modified_base 6: mod_base = OTHER; note = 2'-O-methylguanosine-3'-phosphate
  modified_base 8: mod_base = OTHER; note = 2'-O-methyluridine-3'-phosphate
  modified_base 9: mod_base = OTHER; note = 2'-O-methylcytidine-3'-phosphate
  modified_base 10: mod_base = OTHER; note = 2'-O-methyladenosine-3'-phosphate
  modified_base 11: mod_base = OTHER; note = 2'-O-methylcytidine-3'-phosphate
  modified_base 13: mod_base = OTHER; note = 2'-O-methylguanosine-3'-phosphate
  modified_base 14: mod_base = OTHER; note = 2'-fluorouridine-3'-phosphate
  modified_base 15: mod_base = OTHER; note = 2'-O-methylguanosine-3'-phosphate
  modified_base 16: mod_base = OTHER; note = 2'-O-methylcytidine-3'-phosphate
  modified_base 17: mod_base = OTHER; note = 2'-O-methyladenosine-3'-phosphate
  modified_base 18: mod_base = OTHER; note = 2'-O-methyluridine-3'-phosphate
  modified_base 19: mod_base = OTHER; note = 2'-O-methylguanosine-3'-phosphate
  modified_base 20: mod_base = OTHER; note = 2'-O-methylcytidine-3'-phosphate
  modified_base 21: mod_base = OTHER; note = 2'-O-methylcytidine-3'-phosphorothioate
  modified_base 22: mod_base = OTHER; note = 2'-O-methyladenosine-3'-phosphorothioate
  modified_base 23: mod_base = OTHER; note = 2'-O-methyluridine-3'-phosphate
  misc_feature 1: note = RNA
  misc_feature 2: note = DNA
  misc_feature 3..4: note = RNA
  misc_feature 5: note = DNA
  misc_feature 6: note = RNA
  misc_feature 7: note = DNA
  misc_feature 8..11: note = RNA
  misc_feature 12: note = DNA
  misc_feature 13..23: note = RNA
acatagctcactgtgcatgccat

SEQ ID NO: 2404 - DNA, 23 bp, synthetic construct
  source 1..23: mol_type = other DNA
  modified_base 1: mod_base = OTHER; note = 2'-O-methyladenosine-3'-phosphorothioate
  modified_base 2: mod_base = OTHER; note = 2'-deoxycytidine-3'-phosphorothioate
  modified_base 3: mod_base = OTHER; note = 2'-O-methylcytidine-3'-phosphate
  modified_base 4: mod_base = OTHER; note = 2'-O-methyladenosine-3'-phosphate
  modified_base 6: mod_base = OTHER; note = 2'-O-methyladenosine-3'-phosphate
  modified_base 8: mod_base = OTHER; note = 2'-O-methylcytidine-3'-phosphate
  modified_base 9: mod_base = OTHER; note = 2'-O-methyluridine-3'-phosphate
  modified_base 10: mod_base = OTHER; note = 2'-O-methylcytidine-3'-phosphate
  modified_base 11: mod_base = OTHER; note = 2'-O-methyladenosine-3'-phosphate
  modified_base 13: mod_base = OTHER; note = 2'-O-methyluridine-3'-phosphate
  modified_base 14: mod_base = OTHER; note = 2'-fluoroguanosine-3'-phosphate
  modified_base 15: mod_base = OTHER; note = 2'-O-methyluridine-3'-phosphate
  modified_base 16: mod_base = OTHER; note = 2'-O-methylguanosine-3'-phosphate
  modified_base 17: mod_base = OTHER; note = 2'-O-methylcytidine-3'-phosphate
  modified_base 18: mod_base = OTHER; note = 2'-O-methyladenosine-3'-phosphate
  modified_base 19: mod_base = OTHER; note = 2'-O-methyluridine-3'-phosphate
  modified_base 20: mod_base = OTHER; note = 2'-O-methylguanosine-3'-phosphate
  modified_base 21: mod_base = OTHER; note = 2'-O-methylcytidine-3'-phosphorothioate
  modified_base 22: mod_base = OTHER; note = 2'-O-methylcytidine-3'-phosphorothioate
  modified_base 23: mod_base = OTHER; note = 2'-O-methyladenosine-3'-phosphate
  misc_feature 1: note = RNA
  misc_feature 2: note = DNA
  misc_feature 3..4: note = RNA
  misc_feature 5: note = DNA
  misc_feature 6: note = RNA
  misc_feature 7: note = DNA
  misc_feature 8..11: note = RNA
  misc_feature 12: note = DNA
  misc_feature 13..23: note = RNA
accatagctcactgtgcatgcca

SEQ ID NO: 2405 - DNA, 23 bp, synthetic construct
  source 1..23: mol_type = other DNA
  modified_base 1: mod_base = OTHER; note = 2'-O-methyladenosine-3'-phosphorothioate
  modified_base 2: mod_base = OTHER; note = 2'-deoxyadenosine-3'-phosphorothioate
  modified_base 3: mod_base = OTHER; note = 2'-O-methylguanosine-3'-phosphate
  modified_base 4: mod_base = OTHER; note = 2'-O-methyladenosine-3'-phosphate
  modified_base 6: mod_base = OTHER; note = 2'-O-methyladenosine-3'-phosphate
  modified_base 8: mod_base = OTHER; note = 2'-O-methyladenosine-3'-phosphate
  modified_base 9: mod_base = OTHER; note = 2'-O-methylguanosine-3'-phosphate
  modified_base 10: mod_base = OTHER; note = 2'-O-methylguanosine-3'-phosphate
  modified_base 11: mod_base = OTHER; note = 2'-O-methylcytidine-3'-phosphate
  modified_base 13: mod_base = OTHER; note = 2'-O-methyladenosine-3'-phosphate
  modified_base 14: mod_base = OTHER; note = 2'-fluoroguanosine-3'-phosphate
  modified_base 15: mod_base = OTHER; note = 2'-O-methylguanosine-3'-phosphate
  modified_base 16: mod_base = OTHER; note = 2'-O-methylguanosine-3'-phosphate
  modified_base 17: mod_base = OTHER; note = 2'-O-methyluridine-3'-phosphate
  modified_base 18: mod_base = OTHER; note = 2'-O-methylguanosine-3'-phosphate
  modified_base 19: mod_base = OTHER; note = 2'-O-methylcytidine-3'-phosphate
  modified_base 20: mod_base = OTHER; note = 2'-O-methylcytidine-3'-phosphate
  modified_base 21: mod_base = OTHER; note = 2'-O-methyladenosine-3'-phosphorothioate
  modified_base 22: mod_base = OTHER; note = 2'-O-methyladenosine-3'-phosphorothioate
  modified_base 23: mod_base = OTHER; note = 2'-O-methyladenosine-3'-phosphate
  misc_feature 1: note = RNA
  misc_feature 2: note = DNA
  misc_feature 3..4: note = RNA
  misc_feature 5: note = DNA
  misc_feature 6: note = RNA
  misc_feature 7: note = DNA
  misc_feature 8..11: note = RNA
  misc_feature 12: note = DNA
  misc_feature 13..23: note = RNA
aagagagaggccagggtgccaaa

SEQ ID NO: 2406 - DNA, 23 bp, synthetic construct
  source 1..23: mol_type = other DNA
  modified_base 1: mod_base = OTHER; note = 2'-O-methyladenosine-3'-phosphorothioate
  modified_base 2: mod_base = OTHER; note = 2'-deoxythimidine-3'-phosphorothioate
  modified_base 3: mod_base = OTHER; note = 2'-O-methyladenosine-3'-phosphate
  modified_base 4: mod_base = OTHER; note = 2'-O-methylguanosine-3'-phosphate
  modified_base 6: mod_base = OTHER; note = 2'-O-methylguanosine-3'-phosphate
  modified_base 8: mod_base = OTHER; note = 2'-O-methylguanosine-3'-phosphate
  modified_base 9: mod_base = OTHER; note = 2'-O-methyladenosine-3'-phosphate
  modified_base 10: mod_base = OTHER; note = 2'-O-methylguanosine-3'-phosphate
  modified_base 11: mod_base = OTHER; note = 2'-O-methylguanosine-3'-phosphate
  modified_base 13: mod_base = OTHER; note = 2'-O-methylcytidine-3'-phosphate
  modified_base 14: mod_base = OTHER; note = 2'-fluoroadenosine-3'-phosphate
  modified_base 15: mod_base = OTHER; note = 2'-O-methylguanosine-3'-phosphate
  modified_base 16: mod_base = OTHER; note = 2'-O-methylguanosine-3'-phosphate
  modified_base 17: mod_base = OTHER; note = 2'-O-methylguanosine-3'-phosphate
  modified_base 18: mod_base = OTHER; note = 2'-O-methyluridine-3'-phosphate
  modified_base 19: mod_base = OTHER; note = 2'-O-methylguanosine-3'-phosphate
  modified_base 20: mod_base = OTHER; note = 2'-O-methylcytidine-3'-phosphate
  modified_base 21: mod_base = OTHER; note = 2'-O-methylcytidine-3'-phosphorothioate
  modified_base 22: mod_base = OTHER; note = 2'-O-methyladenosine-3'-phosphorothioate
  modified_base 23: mod_base = OTHER; note = 2'-O-methyladenosine-3'-phosphate
  misc_feature 1: note = RNA
  misc_feature 2: note = DNA
  misc_feature 3..4: note = RNA
  misc_feature 5: note = DNA
  misc_feature 6: note = RNA
  misc_feature 7: note = DNA
  misc_feature 8..11: note = RNA
  misc_feature 12: note = DNA
  misc_feature 13..23: note = RNA
atagagagaggccagggtgccaa

SEQ ID NO: 2407 - DNA, 23 bp, synthetic construct
  source 1..23: mol_type = other DNA
  modified_base 1: mod_base = OTHER; note = 2'-O-methyladenosine-3'-phosphorothioate
  modified_base 2: mod_base = OTHER; note = 2'-deoxyadenosine-3'-phosphorothioate
  modified_base 3: mod_base = OTHER; note = 2'-O-methylguanosine-3'-phosphate
  modified_base 4: mod_base = OTHER; note = 2'-O-methylguanosine-3'-phosphate
  modified_base 6: mod_base = OTHER; note = 2'-O-methyluridine-3'-phosphate
  modified_base 8: mod_base = OTHER; note = 2'-O-methylguanosine-3'-phosphate
  modified_base 9: mod_base = OTHER; note = 2'-O-methylcytidine-3'-phosphate
  modified_base 10: mod_base = OTHER; note = 2'-O-methylcytidine-3'-phosphate
  modified_base 11: mod_base = OTHER; note = 2'-O-methyluridine-3'-phosphate
  modified_base 13: mod_base = OTHER; note = 2'-O-methyluridine-3'-phosphate
  modified_base 14: mod_base = OTHER; note = 2'-fluoroadenosine-3'-phosphate
  modified_base 15: mod_base = OTHER; note = 2'-O-methylguanosine-3'-phosphate
  modified_base 16: mod_base = OTHER; note = 2'-O-methylcytidine-3'-phosphate
  modified_base 17: mod_base = OTHER; note = 2'-O-methylcytidine-3'-phosphate
  modified_base 18: mod_base = OTHER; note = 2'-O-methyluridine-3'-phosphate
  modified_base 19: mod_base = OTHER; note = 2'-O-methylguanosine-3'-phosphate
  modified_base 20: mod_base = OTHER; note = 2'-O-methyluridine-3'-phosphate
  modified_base 21: mod_base = OTHER; note = 2'-O-methylcytidine-3'-phosphorothioate
  modified_base 22: mod_base = OTHER; note = 2'-O-methyladenosine-3'-phosphorothioate
  modified_base 23: mod_base = OTHER; note = 2'-O-methylguanosine-3'-phosphate
  misc_feature 1: note = RNA
  misc_feature 2: note = DNA
  misc_feature 3..4: note = RNA
  misc_feature 5: note = DNA
  misc_feature 6: note = RNA
  misc_feature 7: note = DNA
  misc_feature 8..11: note = RNA
  misc_feature 12: note = DNA
  misc_feature 13..23: note = RNA
aaggattgcctgtagcctgtcag

SEQ ID NO: 2408 - DNA, 23 bp, synthetic construct
  source 1..23: mol_type = other DNA
  modified_base 1: mod_base = OTHER; note = 2'-O-methyladenosine-3'-phosphorothioate
  modified_base 2: mod_base = OTHER; note = 2'-deoxycytidine-3'-phosphorothioate
  modified_base 3: mod_base = OTHER; note = 2'-O-methyladenosine-3'-phosphate
  modified_base 4: mod_base = OTHER; note = 2'-O-methylguanosine-3'-phosphate
  modified_base 6: mod_base = OTHER; note = 2'-O-methyladenosine-3'-phosphate
  modified_base 8: mod_base = OTHER; note = 2'-O-methyluridine-3'-phosphate
  modified_base 9: mod_base = OTHER; note = 2'-O-methylguanosine-3'-phosphate
  modified_base 10: mod_base = OTHER; note = 2'-O-methylcytidine-3'-phosphate
  modified_base 11: mod_base = OTHER; note = 2'-O-methylcytidine-3'-phosphate
  modified_base 13: mod_base = OTHER; note = 2'-O-methylguanosine-3'-phosphate
  modified_base 14: mod_base = OTHER; note = 2'-fluorouridine-3'-phosphate
  modified_base 15: mod_base = OTHER; note = 2'-O-methyladenosine-3'-phosphate
  modified_base 16: mod_base = OTHER; note = 2'-O-methylguanosine-3'-phosphate
  modified_base 17: mod_base = OTHER; note = 2'-O-methylcytidine-3'-phosphate
  modified_base 18: mod_base = OTHER; note = 2'-O-methylcytidine-3'-phosphate
  modified_base 19: mod_base = OTHER; note = 2'-O-methyluridine-3'-phosphate
  modified_base 20: mod_base = OTHER; note = 2'-O-methylguanosine-3'-phosphate
  modified_base 21: mod_base = OTHER; note = 2'-O-methyluridine-3'-phosphorothioate
  modified_base 22: mod_base = OTHER; note = 2'-O-methylcytidine-3'-phosphorothioate
  modified_base 23: mod_base = OTHER; note = 2'-O-methyladenosine-3'-phosphate
  misc_feature 1: note = RNA
  misc_feature 2: note = DNA
  misc_feature 3..4: note = RNA
  misc_feature 5: note = DNA
  misc_feature 6: note = RNA
  misc_feature 7: note = DNA
  misc_feature 8..11: note = RNA
  misc_feature 12: note = DNA
  misc_feature 13..23: note = RNA
acaggattgcctgtagcctgtca

SEQ ID NO: 2409 - DNA, 23 bp, synthetic construct
  source 1..23: mol_type = other DNA
  modified_base 1: mod_base = OTHER; note = 2'-O-methyladenosine-3'-phosphorothioate
  modified_base 2: mod_base = OTHER; note = 2'-deoxyguanosine-3'-phosphorothioate
  modified_base 3: mod_base = OTHER; note = 2'-O-methyluridine-3'-phosphate
  modified_base 4: mod_base = OTHER; note = 2'-O-methyluridine-3'-phosphate
  modified_base 6: mod_base = OTHER; note = 2'-O-methyluridine-3'-phosphate
  modified_base 8: mod_base = OTHER; note = 2'-O-methylguanosine-3'-phosphate
  modified_base 9: mod_base = OTHER; note = 2'-O-methyluridine-3'-phosphate
  modified_base 10: mod_base = OTHER; note = 2'-O-methylcytidine-3'-phosphate
  modified_base 11: mod_base = OTHER; note = 2'-O-methylcytidine-3'-phosphate
  modified_base 13: mod_base = OTHER; note = 2'-O-methyluridine-3'-phosphate
  modified_base 14: mod_base = OTHER; note = 2'-fluorocytidine-3'-phosphate
  modified_base 15: mod_base = OTHER; note = 2'-O-methylcytidine-3'-phosphate
  modified_base 16: mod_base = OTHER; note = 2'-O-methyladenosine-3'-phosphate
  modified_base 17: mod_base = OTHER; note = 2'-O-methyladenosine-3'-phosphate
  modified_base 18: mod_base = OTHER; note = 2'-O-methylguanosine-3'-phosphate
  modified_base 19: mod_base = OTHER; note = 2'-O-methylguanosine-3'-phosphate
  modified_base 20: mod_base = OTHER; note = 2'-O-methyladenosine-3'-phosphate
  modified_base 21: mod_base = OTHER; note = 2'-O-methyladenosine-3'-phosphorothioate
  modified_base 22: mod_base = OTHER; note = 2'-O-methylcytidine-3'-phosphorothioate
  modified_base 23: mod_base = OTHER; note = 2'-O-methyladenosine-3'-phosphate
  misc_feature 1: note = RNA
  misc_feature 2: note = DNA
  misc_feature 3..4: note = RNA
  misc_feature 5: note = DNA
  misc_feature 6: note = RNA
  misc_feature 7: note = DNA
  misc_feature 8..11: note = RNA
  misc_feature 12: note = DNA
  misc_feature 13..23: note = RNA
agttcttgtccttccaaggaaca

SEQ ID NO: 2410 - DNA, 23 bp, synthetic construct
  source 1..23: mol_type = other DNA
  modified_base 1: mod_base = OTHER; note = 2'-O-methyladenosine-3'-phosphorothioate
  modified_base 2: mod_base = OTHER; note = 2'-deoxycytidine-3'-phosphorothioate
  modified_base 3: mod_base = OTHER; note = 2'-O-methyladenosine-3'-phosphate
  modified_base 4: mod_base = OTHER; note = 2'-O-methylguanosine-3'-phosphate
  modified_base 6: mod_base = OTHER; note = 2'-O-methyluridine-3'-phosphate
  modified_base 8: mod_base = OTHER; note = 2'-O-methyluridine-3'-phosphate
  modified_base 9: mod_base = OTHER; note = 2'-O-methyluridine-3'-phosphate
  modified_base 10: mod_base = OTHER; note = 2'-O-methylguanosine-3'-phosphate
  modified_base 11: mod_base = OTHER; note = 2'-O-methyluridine-3'-phosphate
  modified_base 13: mod_base = OTHER; note = 2'-O-methylcytidine-3'-phosphate
  modified_base 14: mod_base = OTHER; note = 2'-fluorouridine-3'-phosphate
  modified_base 15: mod_base = OTHER; note = 2'-O-methyluridine-3'-phosphate
  modified_base 16: mod_base = OTHER; note = 2'-O-methylcytidine-3'-phosphate
  modified_base 17: mod_base = OTHER; note = 2'-O-methylcytidine-3'-phosphate
  modified_base 18: mod_base = OTHER; note = 2'-O-methyladenosine-3'-phosphate
  modified_base 19: mod_base = OTHER; note = 2'-O-methyladenosine-3'-phosphate
  modified_base 20: mod_base = OTHER; note = 2'-O-methylguanosine-3'-phosphate
  modified_base 21: mod_base = OTHER; note = 2'-O-methylguanosine-3'-phosphorothioate
  modified_base 22: mod_base = OTHER; note = 2'-O-methyladenosine-3'-phosphorothioate
  modified_base 23: mod_base = OTHER; note = 2'-O-methyladenosine-3'-phosphate
  misc_feature 1: note = RNA
  misc_feature 2: note = DNA
  misc_feature 3..4: note = RNA
  misc_feature 5: note = DNA
  misc_feature 6: note = RNA
  misc_feature 7: note = DNA
  misc_feature 8..11: note = RNA
  misc_feature 12: note = DNA
  misc_feature 13..23: note = RNA
acagttcttgtccttccaaggaa

SEQ ID NO: 2411 - DNA, 23 bp, synthetic construct
  source 1..23: mol_type = other DNA
  modified_base 1: mod_base = OTHER; note = 2'-O-methyladenosine-3'-phosphorothioate
  modified_base 2: mod_base = OTHER; note = 2'-deoxyguanosine-3'-phosphorothioate
  modified_base 3: mod_base = OTHER; note = 2'-O-methylcytidine-3'-phosphate
  modified_base 4: mod_base = OTHER; note = 2'-O-methyladenosine-3'-phosphate
  modified_base 6: mod_base = OTHER; note = 2'-O-methyluridine-3'-phosphate
  modified_base 8: mod_base = OTHER; note = 2'-O-methylcytidine-3'-phosphate
  modified_base 9: mod_base = OTHER; note = 2'-O-methyluridine-3'-phosphate
  modified_base 10: mod_base = OTHER; note = 2'-O-methyluridine-3'-phosphate
  modified_base 11: mod_base = OTHER; note = 2'-O-methylguanosine-3'-phosphate
  modified_base 13: mod_base = OTHER; note = 2'-O-methylcytidine-3'-phosphate
  modified_base 14: mod_base = OTHER; note = 2'-fluorocytidine-3'-phosphate
  modified_base 15: mod_base = OTHER; note = 2'-O-methyluridine-3'-phosphate
  modified_base 16: mod_base = OTHER; note = 2'-O-methyluridine-3'-phosphate
  modified_base 17: mod_base = OTHER; note = 2'-O-methylcytidine-3'-phosphate
  modified_base 18: mod_base = OTHER; note = 2'-O-methylcytidine-3'-phosphate
  modified_base 19: mod_base = OTHER; note = 2'-O-methyladenosine-3'-phosphate
  modified_base 20: mod_base = OTHER; note = 2'-O-methyladenosine-3'-phosphate
  modified_base 21: mod_base = OTHER; note = 2'-O-methylguanosine-3'-phosphorothioate
  modified_base 22: mod_base = OTHER; note = 2'-O-methylguanosine-3'-phosphorothioate
  modified_base 23: mod_base = OTHER; note = 2'-O-methyladenosine-3'-phosphate
  misc_feature 1: note = RNA
  misc_feature 2: note = DNA
  misc_feature 3..4: note = RNA
  misc_feature 5: note = DNA
  misc_feature 6: note = RNA
  misc_feature 7: note = DNA
  misc_feature 8..11: note = RNA
  misc_feature 12: note = DNA
  misc_feature 13..23: note = RNA
agcagttcttgtccttccaagga

SEQ ID NO: 2412 - DNA, 23 bp, synthetic construct
  source 1..23: mol_type = other DNA
  modified_base 1: mod_base = OTHER; note = 2'-O-methyladenosine-3'-phosphorothioate
  modified_base 2: mod_base = OTHER; note = 2'-deoxyadenosine-3'-phosphorothioate
  modified_base 3: mod_base = OTHER; note = 2'-O-methylcytidine-3'-phosphate
  modified_base 4: mod_base = OTHER; note = 2'-O-methyladenosine-3'-phosphate
  modified_base 6: mod_base = OTHER; note = 2'-O-methyladenosine-3'-phosphate
  modified_base 8: mod_base = OTHER; note = 2'-O-methylguanosine-3'-phosphate
  modified_base 9: mod_base = OTHER; note = 2'-O-methylguanosine-3'-phosphate
  modified_base 10: mod_base = OTHER; note = 2'-O-methylcytidine-3'-phosphate
  modified_base 11: mod_base = OTHER; note = 2'-O-methyluridine-3'-phosphate
  modified_base 13: mod_base = OTHER; note = 2'-O-methylcytidine-3'-phosphate
  modified_base 14: mod_base = OTHER; note = 2'-fluorouridine-3'-phosphate
  modified_base 15: mod_base = OTHER; note = 2'-O-methyluridine-3'-phosphate
  modified_base 16: mod_base = OTHER; note = 2'-O-methylcytidine-3'-phosphate
  modified_base 17: mod_base = OTHER; note = 2'-O-methyladenosine-3'-phosphate
  modified_base 18: mod_base = OTHER; note = 2'-O-methylguanosine-3'-phosphate
  modified_base 19: mod_base = OTHER; note = 2'-O-methylguanosine-3'-phosphate
  modified_base 20: mod_base = OTHER; note = 2'-O-methyluridine-3'-phosphate
  modified_base 21: mod_base = OTHER; note = 2'-O-methylguanosine-3'-phosphorothioate
  modified_base 22: mod_base = OTHER; note = 2'-O-methylcytidine-3'-phosphorothioate
  modified_base 23: mod_base = OTHER; note = 2'-O-methyladenosine-3'-phosphate
  misc_feature 1: note = RNA
  misc_feature 2: note = DNA
  misc_feature 3..4: note = RNA
  misc_feature 5: note = DNA
  misc_feature 6: note = RNA
  misc_feature 7: note = DNA
  misc_feature 8..11: note = RNA
  misc_feature 12: note = DNA
  misc_feature 13..23: note = RNA
aacaaacggctgcttcaggtgca

SEQ ID NO: 2413 - DNA, 23 bp, synthetic construct
  source 1..23: mol_type = other DNA
  modified_base 1: mod_base = OTHER; note = 2'-O-methyladenosine-3'-phosphorothioate
  modified_base 2: mod_base = OTHER; note = 2'-deoxythimidine-3'-phosphorothioate
  modified_base 3: mod_base = OTHER; note = 2'-O-methylguanosine-3'-phosphate
  modified_base 4: mod_base = OTHER; note = 2'-O-methylcytidine-3'-phosphate
  modified_base 6: mod_base = OTHER; note = 2'-O-methylcytidine-3'-phosphate
  modified_base 8: mod_base = OTHER; note = 2'-O-methyladenosine-3'-phosphate
  modified_base 9: mod_base = OTHER; note = 2'-O-methyladenosine-3'-phosphate
  modified_base 10: mod_base = OTHER; note = 2'-O-methylcytidine-3'-phosphate
  modified_base 11: mod_base = OTHER; note = 2'-O-methylguanosine-3'-phosphate
  modified_base 13: mod_base = OTHER; note = 2'-O-methylcytidine-3'-phosphate
  modified_base 14: mod_base = OTHER; note = 2'-fluorouridine-3'-phosphate
  modified_base 15: mod_base = OTHER; note = 2'-O-methylguanosine-3'-phosphate
  modified_base 16: mod_base = OTHER; note = 2'-O-methylcytidine-3'-phosphate
  modified_base 17: mod_base = OTHER; note = 2'-O-methyluridine-3'-phosphate
  modified_base 18: mod_base = OTHER; note = 2'-O-methyluridine-3'-phosphate
  modified_base 19: mod_base = OTHER; note = 2'-O-methylcytidine-3'-phosphate
  modified_base 20: mod_base = OTHER; note = 2'-O-methyladenosine-3'-phosphate
  modified_base 21: mod_base = OTHER; note = 2'-O-methylguanosine-3'-phosphorothioate
  modified_base 22: mod_base = OTHER; note = 2'-O-methylguanosine-3'-phosphorothioate
  modified_base 23: mod_base = OTHER; note = 2'-O-methyluridine-3'-phosphate
  misc_feature 1: note = RNA
  misc_feature 2: note = DNA
  misc_feature 3..4: note = RNA
  misc_feature 5: note = DNA
  misc_feature 6: note = RNA
  misc_feature 7: note = DNA
  misc_feature 8..11: note = RNA
  misc_feature 12: note = DNA
  misc_feature 13..23: note = RNA
atgcacaaacggctgcttcaggt

SEQ ID NO: 2414 - DNA, 23 bp, synthetic construct
  source 1..23: mol_type = other DNA
  modified_base 1: mod_base = OTHER; note = 2'-O-methyladenosine-3'-phosphorothioate
  modified_base 2: mod_base = OTHER; note = 2'-deoxyadenosine-3'-phosphorothioate
  modified_base 3: mod_base = OTHER; note = 2'-O-methylguanosine-3'-phosphate
  modified_base 4: mod_base = OTHER; note = 2'-O-methyladenosine-3'-phosphate
  modified_base 6: mod_base = OTHER; note = 2'-O-methylcytidine-3'-phosphate
  modified_base 8: mod_base = OTHER; note = 2'-O-methyladenosine-3'-phosphate
  modified_base 9: mod_base = OTHER; note = 2'-O-methylguanosine-3'-phosphate
  modified_base 10: mod_base = OTHER; note = 2'-O-methylguanosine-3'-phosphate
  modified_base 11: mod_base = OTHER; note = 2'-O-methylcytidine-3'-phosphate
  modified_base 13: mod_base = OTHER; note = 2'-O-methylcytidine-3'-phosphate
  modified_base 14: mod_base = OTHER; note = 2'-fluorouridine-3'-phosphate
  modified_base 15: mod_base = OTHER; note = 2'-O-methylguanosine-3'-phosphate
  modified_base 16: mod_base = OTHER; note = 2'-O-methylcytidine-3'-phosphate
  modified_base 17: mod_base = OTHER; note = 2'-O-methyladenosine-3'-phosphate
  modified_base 18: mod_base = OTHER; note = 2'-O-methylcytidine-3'-phosphate
  modified_base 19: mod_base = OTHER; note = 2'-O-methyladenosine-3'-phosphate
  modified_base 20: mod_base = OTHER; note = 2'-O-methyladenosine-3'-phosphate
  modified_base 21: mod_base = OTHER; note = 2'-O-methyladenosine-3'-phosphorothioate
  modified_base 22: mod_base = OTHER; note = 2'-O-methylcytidine-3'-phosphorothioate
  modified_base 23: mod_base = OTHER; note = 2'-O-methylguanosine-3'-phosphate
  misc_feature 1: note = RNA
  misc_feature 2: note = DNA
  misc_feature 3..4: note = RNA
  misc_feature 5: note = DNA
  misc_feature 6: note = RNA
  misc_feature 7: note = DNA
  misc_feature 8..11: note = RNA
  misc_feature 12: note = DNA
  misc_feature 13..23: note = RNA
aagagccaggccctgcacaaacg

SEQ ID NO: 2415 - DNA, 23 bp, synthetic construct
  source 1..23: mol_type = other DNA
  modified_base 1: mod_base = OTHER; note = 2'-O-methyladenosine-3'-phosphorothioate
  modified_base 2: mod_base = OTHER; note = 2'-deoxyguanosine-3'-phosphorothioate
  modified_base 3: mod_base = OTHER; note = 2'-O-methyladenosine-3'-phosphate
  modified_base 4: mod_base = OTHER; note = 2'-O-methylguanosine-3'-phosphate
  modified_base 6: mod_base = OTHER; note = 2'-O-methylguanosine-3'-phosphate
  modified_base 8: mod_base = OTHER; note = 2'-O-methylcytidine-3'-phosphate
  modified_base 9: mod_base = OTHER; note = 2'-O-methyladenosine-3'-phosphate
  modified_base 10: mod_base = OTHER; note = 2'-O-methylguanosine-3'-phosphate
  modified_base 11: mod_base = OTHER; note = 2'-O-methylguanosine-3'-phosphate
  modified_base 13: mod_base = OTHER; note = 2'-O-methylcytidine-3'-phosphate
  modified_base 14: mod_base = OTHER; note = 2'-fluorocytidine-3'-phosphate
  modified_base 15: mod_base = OTHER; note = 2'-O-methyluridine-3'-phosphate
  modified_base 16: mod_base = OTHER; note = 2'-O-methylguanosine-3'-phosphate
  modified_base 17: mod_base = OTHER; note = 2'-O-methylcytidine-3'-phosphate
  modified_base 18: mod_base = OTHER; note = 2'-O-methyladenosine-3'-phosphate
  modified_base 19: mod_base = OTHER; note = 2'-O-methylcytidine-3'-phosphate
  modified_base 20: mod_base = OTHER; note = 2'-O-methyladenosine-3'-phosphate
  modified_base 21: mod_base = OTHER; note = 2'-O-methyladenosine-3'-phosphorothioate
  modified_base 22: mod_base = OTHER; note = 2'-O-methyladenosine-3'-phosphorothioate
  modified_base 23: mod_base = OTHER; note = 2'-O-methylcytidine-3'-phosphate
  misc_feature 1: note = RNA
  misc_feature 2: note = DNA
  misc_feature 3..4: note = RNA
  misc_feature 5: note = DNA
  misc_feature 6: note = RNA
  misc_feature 7: note = DNA
  misc_feature 8..11: note = RNA
  misc_feature 12: note = DNA
  misc_feature 13..23: note = RNA
agagagccaggccctgcacaaac

SEQ ID NO: 2416 - DNA, 23 bp, synthetic construct
  source 1..23: mol_type = other DNA
  modified_base 1: mod_base = OTHER; note = 2'-O-methyladenosine-3'-phosphorothioate
  modified_base 2: mod_base = OTHER; note = 2'-deoxyadenosine-3'-phosphorothioate
  modified_base 3: mod_base = OTHER; note = 2'-O-methylguanosine-3'-phosphate
  modified_base 4: mod_base = OTHER; note = 2'-O-methyladenosine-3'-phosphate
  modified_base 6: mod_base = OTHER; note = 2'-O-methyladenosine-3'-phosphate
  modified_base 8: mod_base = OTHER; note = 2'-O-methylcytidine-3'-phosphate
  modified_base 9: mod_base = OTHER; note = 2'-O-methylcytidine-3'-phosphate
  modified_base 10: mod_base = OTHER; note = 2'-O-methyladenosine-3'-phosphate
  modified_base 11: mod_base = OTHER; note = 2'-O-methylguanosine-3'-phosphate
  modified_base 13: mod_base = OTHER; note = 2'-O-methylcytidine-3'-phosphate
  modified_base 14: mod_base = OTHER; note = 2'-fluorocytidine-3'-phosphate
  modified_base 15: mod_base = OTHER; note = 2'-O-methylcytidine-3'-phosphate
  modified_base 16: mod_base = OTHER; note = 2'-O-methyluridine-3'-phosphate
  modified_base 17: mod_base = OTHER; note = 2'-O-methylguanosine-3'-phosphate
  modified_base 18: mod_base = OTHER; note = 2'-O-methylcytidine-3'-phosphate
  modified_base 19: mod_base = OTHER; note = 2'-O-methyladenosine-3'-phosphate
  modified_base 20: mod_base = OTHER; note = 2'-O-methylcytidine-3'-phosphate
  modified_base 21: mod_base = OTHER; note = 2'-O-methyladenosine-3'-phosphorothioate
  modified_base 22: mod_base = OTHER; note = 2'-O-methyladenosine-3'-phosphorothioate
  modified_base 23: mod_base = OTHER; note = 2'-O-methyladenosine-3'-phosphate
  misc_feature 1: note = RNA
  misc_feature 2: note = DNA
  misc_feature 3..4: note = RNA
  misc_feature 5: note = DNA
  misc_feature 6: note = RNA
  misc_feature 7: note = DNA
  misc_feature 8..11: note = RNA
  misc_feature 12: note = DNA
  misc_feature 13..23: note = RNA
aagagagccaggccctgcacaaa

SEQ ID NO: 2417 - DNA, 23 bp, synthetic construct
  source 1..23: mol_type = other DNA
  modified_base 1: mod_base = OTHER; note = 2'-O-methyladenosine-3'-phosphorothioate
  modified_base 2: mod_base = OTHER; note = 2'-deoxythimidine-3'-phosphorothioate
  modified_base 3: mod_base = OTHER; note = 2'-O-methyladenosine-3'-phosphate
  modified_base 4: mod_base = OTHER; note = 2'-O-methylguanosine-3'-phosphate
  modified_base 6: mod_base = OTHER; note = 2'-O-methylguanosine-3'-phosphate
  modified_base 8: mod_base = OTHER; note = 2'-O-methylguanosine-3'-phosphate
  modified_base 9: mod_base = OTHER; note = 2'-O-methylcytidine-3'-phosphate
  modified_base 10: mod_base = OTHER; note = 2'-O-methylcytidine-3'-phosphate
  modified_base 11: mod_base = OTHER; note = 2'-O-methyladenosine-3'-phosphate
  modified_base 13: mod_base = OTHER; note = 2'-O-methylguanosine-3'-phosphate
  modified_base 14: mod_base = OTHER; note = 2'-fluorocytidine-3'-phosphate
  modified_base 15: mod_base = OTHER; note = 2'-O-methylcytidine-3'-phosphate
  modified_base 16: mod_base = OTHER; note = 2'-O-methylcytidine-3'-phosphate
  modified_base 17: mod_base = OTHER; note = 2'-O-methyluridine-3'-phosphate
  modified_base 18: mod_base = OTHER; note = 2'-O-methylguanosine-3'-phosphate
  modified_base 19: mod_base = OTHER; note = 2'-O-methylcytidine-3'-phosphate
  modified_base 20: mod_base = OTHER; note = 2'-O-methyladenosine-3'-phosphate
  modified_base 21: mod_base = OTHER; note = 2'-O-methylcytidine-3'-phosphorothioate
  modified_base 22: mod_base = OTHER; note = 2'-O-methyladenosine-3'-phosphorothioate
  modified_base 23: mod_base = OTHER; note = 2'-O-methyladenosine-3'-phosphate
  misc_feature 1: note = RNA
  misc_feature 2: note = DNA
  misc_feature 3..4: note = RNA
  misc_feature 5: note = DNA
  misc_feature 6: note = RNA
  misc_feature 7: note = DNA
  misc_feature 8..11: note = RNA
  misc_feature 12: note = DNA
  misc_feature 13..23: note = RNA
atagagagccaggccctgcacaa

SEQ ID NO: 2418 - DNA, 23 bp, synthetic construct
  source 1..23: mol_type = other DNA
  modified_base 1: mod_base = OTHER; note = 2'-O-methyladenosine-3'-phosphorothioate
  modified_base 2: mod_base = OTHER; note = 2'-deoxyadenosine-3'-phosphorothioate
  modified_base 3: mod_base = OTHER; note = 2'-O-methyluridine-3'-phosphate
  modified_base 4: mod_base = OTHER; note = 2'-O-methyladenosine-3'-phosphate
  modified_base 6: mod_base = OTHER; note = 2'-O-methyladenosine-3'-phosphate
  modified_base 8: mod_base = OTHER; note = 2'-O-methyladenosine-3'-phosphate
  modified_base 9: mod_base = OTHER; note = 2'-O-methylguanosine-3'-phosphate
  modified_base 10: mod_base = OTHER; note = 2'-O-methylcytidine-3'-phosphate
  modified_base 11: mod_base = OTHER; note = 2'-O-methylcytidine-3'-phosphate
  modified_base 13: mod_base = OTHER; note = 2'-O-methylguanosine-3'-phosphate
  modified_base 14: mod_base = OTHER; note = 2'-fluoroguanosine-3'-phosphate
  modified_base 15: mod_base = OTHER; note = 2'-O-methylcytidine-3'-phosphate
  modified_base 16: mod_base = OTHER; note = 2'-O-methylcytidine-3'-phosphate
  modified_base 17: mod_base = OTHER; note = 2'-O-methylcytidine-3'-phosphate
  modified_base 18: mod_base = OTHER; note = 2'-O-methyluridine-3'-phosphate
  modified_base 19: mod_base = OTHER; note = 2'-O-methylguanosine-3'-phosphate
  modified_base 20: mod_base = OTHER; note = 2'-O-methylcytidine-3'-phosphate
  modified_base 21: mod_base = OTHER; note = 2'-O-methyladenosine-3'-phosphorothioate
  modified_base 22: mod_base = OTHER; note = 2'-O-methylcytidine-3'-phosphorothioate
  modified_base 23: mod_base = OTHER; note = 2'-O-methyladenosine-3'-phosphate
  misc_feature 1: note = RNA
  misc_feature 2: note = DNA
  misc_feature 3..4: note = RNA
  misc_feature 5: note = DNA
  misc_feature 6: note = RNA
  misc_feature 7: note = DNA
  misc_feature 8..11: note = RNA
  misc_feature 12: note = DNA
  misc_feature 13..23: note = RNA
aatagagagccaggccctgcaca

SEQ ID NO: 2419 - DNA, 23 bp, synthetic construct
  source 1..23: mol_type = other DNA
  modified_base 1: mod_base = OTHER; note = 2'-O-methyladenosine-3'-phosphorothioate
  modified_base 2: mod_base = OTHER; note = 2'-deoxycytidine-3'-phosphorothioate
  modified_base 3: mod_base = OTHER; note = 2'-O-methyluridine-3'-phosphate
  modified_base 4: mod_base = OTHER; note = 2'-O-methylguanosine-3'-phosphate
  modified_base 6: mod_base = OTHER; note = 2'-O-methylguanosine-3'-phosphate
  modified_base 8: mod_base = OTHER; note = 2'-O-methyladenosine-3'-phosphate
  modified_base 9: mod_base = OTHER; note = 2'-O-methylguanosine-3'-phosphate
  modified_base 10: mod_base = OTHER; note = 2'-O-methyluridine-3'-phosphate
  modified_base 11: mod_base = OTHER; note = 2'-O-methylcytidine-3'-phosphate
  modified_base 13: mod_base = OTHER; note = 2'-O-methyladenosine-3'-phosphate
  modified_base 14: mod_base = OTHER; note = 2'-fluoroguanosine-3'-phosphate
  modified_base 15: mod_base = OTHER; note = 2'-O-methyladenosine-3'-phosphate
  modified_base 16: mod_base = OTHER; note = 2'-O-methylguanosine-3'-phosphate
  modified_base 17: mod_base = OTHER; note = 2'-O-methyladenosine-3'-phosphate
  modified_base 18: mod_base = OTHER; note = 2'-O-methylguanosine-3'-phosphate
  modified_base 19: mod_base = OTHER; note = 2'-O-methylcytidine-3'-phosphate
  modified_base 20: mod_base = OTHER; note = 2'-O-methylguanosine-3'-phosphate
  modified_base 21: mod_base = OTHER; note = 2'-O-methyluridine-3'-phosphorothioate
  modified_base 22: mod_base = OTHER; note = 2'-O-methylguanosine-3'-phosphorothioate
  modified_base 23: mod_base = OTHER; note = 2'-O-methylguanosine-3'-phosphate
  misc_feature 1: note = RNA
  misc_feature 2: note = DNA
  misc_feature 3..4: note = RNA
  misc_feature 5: note = DNA
  misc_feature 6: note = RNA
  misc_feature 7: note = DNA
  misc_feature 8..11: note = RNA
  misc_feature 12: note = DNA
  misc_feature 13..23: note = RNA
actgtgaagtccagagagcgtgg

SEQ ID NO: 2420 - DNA, 23 bp, synthetic construct
  source 1..23: mol_type = other DNA
  modified_base 1: mod_base = OTHER; note = 2'-O-methyladenosine-3'-phosphorothioate
  modified_base 2: mod_base = OTHER; note = 2'-deoxythimidine-3'-phosphorothioate
  modified_base 3: mod_base = OTHER; note = 2'-O-methylcytidine-3'-phosphate
  modified_base 4: mod_base = OTHER; note = 2'-O-methyluridine-3'-phosphate
  modified_base 6: mod_base = OTHER; note = 2'-O-methyluridine-3'-phosphate
  modified_base 8: mod_base = OTHER; note = 2'-O-methyladenosine-3'-phosphate
  modified_base 9: mod_base = OTHER; note = 2'-O-methyladenosine-3'-phosphate
  modified_base 10: mod_base = OTHER; note = 2'-O-methylguanosine-3'-phosphate
  modified_base 11: mod_base = OTHER; note = 2'-O-methyluridine-3'-phosphate
  modified_base 13: mod_base = OTHER; note = 2'-O-methylcytidine-3'-phosphate
  modified_base 14: mod_base = OTHER; note = 2'-fluoroadenosine-3'-phosphate
  modified_base 15: mod_base = OTHER; note = 2'-O-methylguanosine-3'-phosphate
  modified_base 16: mod_base = OTHER; note = 2'-O-methyladenosine-3'-phosphate
  modified_base 17: mod_base = OTHER; note = 2'-O-methylguanosine-3'-phosphate
  modified_base 18: mod_base = OTHER; note = 2'-O-methyladenosine-3'-phosphate
  modified_base 19: mod_base = OTHER; note = 2'-O-methylguanosine-3'-phosphate
  modified_base 20: mod_base = OTHER; note = 2'-O-methylcytidine-3'-phosphate
  modified_base 21: mod_base = OTHER; note = 2'-O-methylguanosine-3'-phosphorothioate
  modified_base 22: mod_base = OTHER; note = 2'-O-methyluridine-3'-phosphorothioate
  modified_base 23: mod_base = OTHER; note = 2'-O-methylguanosine-3'-phosphate
  misc_feature 1: note = RNA
  misc_feature 2: note = DNA
  misc_feature 3..4: note = RNA
  misc_feature 5: note = DNA
  misc_feature 6: note = RNA
  misc_feature 7: note = DNA
  misc_feature 8..11: note = RNA
  misc_feature 12: note = DNA
  misc_feature 13..23: note = RNA
atctgtgaagtccagagagcgtg

SEQ ID NO: 2421 - DNA, 23 bp, synthetic construct
  source 1..23: mol_type = other DNA
  modified_base 1: mod_base = OTHER; note = 2'-O-methyladenosine-3'-phosphorothioate
  modified_base 2: mod_base = OTHER; note = 2'-deoxyguanosine-3'-phosphorothioate
  modified_base 3: mod_base = OTHER; note = 2'-O-methyladenosine-3'-phosphate
  modified_base 4: mod_base = OTHER; note = 2'-O-methyladenosine-3'-phosphate
  modified_base 6: mod_base = OTHER; note = 2'-O-methylcytidine-3'-phosphate
  modified_base 8: mod_base = OTHER; note = 2'-O-methylguanosine-3'-phosphate
  modified_base 9: mod_base = OTHER; note = 2'-O-methyluridine-3'-phosphate
  modified_base 10: mod_base = OTHER; note = 2'-O-methylcytidine-3'-phosphate
  modified_base 11: mod_base = OTHER; note = 2'-O-methyladenosine-3'-phosphate
  modified_base 13: mod_base = OTHER; note = 2'-O-methyluridine-3'-phosphate
  modified_base 14: mod_base = OTHER; note = 2'-fluorocytidine-3'-phosphate
  modified_base 15: mod_base = OTHER; note = 2'-O-methyluridine-3'-phosphate
  modified_base 16: mod_base = OTHER; note = 2'-O-methyluridine-3'-phosphate
  modified_base 17: mod_base = OTHER; note = 2'-O-methylcytidine-3'-phosphate
  modified_base 18: mod_base = OTHER; note = 2'-O-methyluridine-3'-phosphate
  modified_base 19: mod_base = OTHER; note = 2'-O-methylcytidine-3'-phosphate
  modified_base 20: mod_base = OTHER; note = 2'-O-methyladenosine-3'-phosphate
  modified_base 21: mod_base = OTHER; note = 2'-O-methylguanosine-3'-phosphorothioate
  modified_base 22: mod_base = OTHER; note = 2'-O-methylcytidine-3'-phosphorothioate
  modified_base 23: mod_base = OTHER; note = 2'-O-methyladenosine-3'-phosphate
  misc_feature 1: note = RNA
  misc_feature 2: note = DNA
  misc_feature 3..4: note = RNA
  misc_feature 5: note = DNA
  misc_feature 6: note = RNA
  misc_feature 7: note = DNA
  misc_feature 8..11: note = RNA
  misc_feature 12: note = DNA
  misc_feature 13..23: note = RNA
agaacctgtcaatcttctcagca

SEQ ID NO: 2422 - DNA, 23 bp, synthetic construct
  source 1..23: mol_type = other DNA
  modified_base 1: mod_base = OTHER; note = 2'-O-methyladenosine-3'-phosphorothioate
  modified_base 2: mod_base = OTHER; note = 2'-deoxythimidine-3'-phosphorothioate
  modified_base 3: mod_base = OTHER; note = 2'-O-methylguanosine-3'-phosphate
  modified_base 4: mod_base = OTHER; note = 2'-O-methyladenosine-3'-phosphate
  modified_base 6: mod_base = OTHER; note = 2'-O-methylcytidine-3'-phosphate
  modified_base 8: mod_base = OTHER; note = 2'-O-methyluridine-3'-phosphate
  modified_base 9: mod_base = OTHER; note = 2'-O-methylguanosine-3'-phosphate
  modified_base 10: mod_base = OTHER; note = 2'-O-methyluridine-3'-phosphate
  modified_base 11: mod_base = OTHER; note = 2'-O-methylcytidine-3'-phosphate
  modified_base 13: mod_base = OTHER; note = 2'-O-methyladenosine-3'-phosphate
  modified_base 14: mod_base = OTHER; note = 2'-fluorouridine-3'-phosphate
  modified_base 15: mod_base = OTHER; note = 2'-O-methylcytidine-3'-phosphate
  modified_base 16: mod_base = OTHER; note = 2'-O-methyluridine-3'-phosphate
  modified_base 17: mod_base = OTHER; note = 2'-O-methyluridine-3'-phosphate
  modified_base 18: mod_base = OTHER; note = 2'-O-methylcytidine-3'-phosphate
  modified_base 19: mod_base = OTHER; note = 2'-O-methyluridine-3'-phosphate
  modified_base 20: mod_base = OTHER; note = 2'-O-methylcytidine-3'-phosphate
  modified_base 21: mod_base = OTHER; note = 2'-O-methyladenosine-3'-phosphorothioate
  modified_base 22: mod_base = OTHER; note = 2'-O-methylguanosine-3'-phosphorothioate
  modified_base 23: mod_base = OTHER; note = 2'-O-methylcytidine-3'-phosphate
  misc_feature 1: note = RNA
  misc_feature 2: note = DNA
  misc_feature 3..4: note = RNA
  misc_feature 5: note = DNA
  misc_feature 6: note = RNA
  misc_feature 7: note = DNA
  misc_feature 8..11: note = RNA
  misc_feature 12: note = DNA
  misc_feature 13..23: note = RNA
atgaacctgtcaatcttctcagc

SEQ ID NO: 2423 - DNA, 23 bp, synthetic construct
  source 1..23: mol_type = other DNA
  modified_base 1: mod_base = OTHER; note = 2'-O-methyladenosine-3'-phosphorothioate
  modified_base 2: mod_base = OTHER; note = 2'-deoxyadenosine-3'-phosphorothioate
  modified_base 3: mod_base = OTHER; note = 2'-O-methyluridine-3'-phosphate
  modified_base 4: mod_base = OTHER; note = 2'-O-methylguanosine-3'-phosphate
  modified_base 6: mod_base = OTHER; note = 2'-O-methyladenosine-3'-phosphate
  modified_base 8: mod_base = OTHER; note = 2'-O-methylcytidine-3'-phosphate
  modified_base 9: mod_base = OTHER; note = 2'-O-methyluridine-3'-phosphate
  modified_base 10: mod_base = OTHER; note = 2'-O-methylguanosine-3'-phosphate
  modified_base 11: mod_base = OTHER; note = 2'-O-methyluridine-3'-phosphate
  modified_base 13: mod_base = OTHER; note = 2'-O-methyladenosine-3'-phosphate
  modified_base 14: mod_base = OTHER; note = 2'-fluoroadenosine-3'-phosphate
  modified_base 15: mod_base = OTHER; note = 2'-O-methyluridine-3'-phosphate
  modified_base 16: mod_base = OTHER; note = 2'-O-methylcytidine-3'-phosphate
  modified_base 17: mod_base = OTHER; note = 2'-O-methyluridine-3'-phosphate
  modified_base 18: mod_base = OTHER; note = 2'-O-methyluridine-3'-phosphate
  modified_base 19: mod_base = OTHER; note = 2'-O-methylcytidine-3'-phosphate
  modified_base 20: mod_base = OTHER; note = 2'-O-methyluridine-3'-phosphate
  modified_base 21: mod_base = OTHER; note = 2'-O-methylcytidine-3'-phosphorothioate
  modified_base 22: mod_base = OTHER; note = 2'-O-methyladenosine-3'-phosphorothioate
  modified_base 23: mod_base = OTHER; note = 2'-O-methylguanosine-3'-phosphate
  misc_feature 1: note = RNA
  misc_feature 2: note = DNA
  misc_feature 3..4: note = RNA
  misc_feature 5: note = DNA
  misc_feature 6: note = RNA
  misc_feature 7: note = DNA
  misc_feature 8..11: note = RNA
  misc_feature 12: note = DNA
  misc_feature 13..23: note = RNA
aatgaacctgtcaatcttctcag

SEQ ID NO: 2424 - DNA, 23 bp, synthetic construct
  source 1..23: mol_type = other DNA
  modified_base 1: mod_base = OTHER; note = 2'-O-methyladenosine-3'-phosphorothioate
  modified_base 2: mod_base = OTHER; note = 2'-deoxycytidine-3'-phosphorothioate
  modified_base 3: mod_base = OTHER; note = 2'-O-methyladenosine-3'-phosphate
  modified_base 4: mod_base = OTHER; note = 2'-O-methyluridine-3'-phosphate
  modified_base 6: mod_base = OTHER; note = 2'-O-methyladenosine-3'-phosphate
  modified_base 8: mod_base = OTHER; note = 2'-O-methylcytidine-3'-phosphate
  modified_base 9: mod_base = OTHER; note = 2'-O-methylcytidine-3'-phosphate
  modified_base 10: mod_base = OTHER; note = 2'-O-methyluridine-3'-phosphate
  modified_base 11: mod_base = OTHER; note = 2'-O-methylguanosine-3'-phosphate
  modified_base 13: mod_base = OTHER; note = 2'-O-methylcytidine-3'-phosphate
  modified_base 14: mod_base = OTHER; note = 2'-fluoroadenosine-3'-phosphate
  modified_base 15: mod_base = OTHER; note = 2'-O-methyladenosine-3'-phosphate
  modified_base 16: mod_base = OTHER; note = 2'-O-methyluridine-3'-phosphate
  modified_base 17: mod_base = OTHER; note = 2'-O-methylcytidine-3'-phosphate
  modified_base 18: mod_base = OTHER; note = 2'-O-methyluridine-3'-phosphate
  modified_base 19: mod_base = OTHER; note = 2'-O-methyluridine-3'-phosphate
  modified_base 20: mod_base = OTHER; note = 2'-O-methylcytidine-3'-phosphate
  modified_base 21: mod_base = OTHER; note = 2'-O-methyluridine-3'-phosphorothioate
  modified_base 22: mod_base = OTHER; note = 2'-O-methylcytidine-3'-phosphorothioate
  modified_base 23: mod_base = OTHER; note = 2'-O-methyladenosine-3'-phosphate
  misc_feature 1: note = RNA
  misc_feature 2: note = DNA
  misc_feature 3..4: note = RNA
  misc_feature 5: note = DNA
  misc_feature 6: note = RNA
  misc_feature 7: note = DNA
  misc_feature 8..11: note = RNA
  misc_feature 12: note = DNA
  misc_feature 13..23: note = RNA
acatgaacctgtcaatcttctca

SEQ ID NO: 2425 - DNA, 23 bp, synthetic construct
  source 1..23: mol_type = other DNA
  modified_base 1: mod_base = OTHER; note = 2'-O-methyladenosine-3'-phosphorothioate
  modified_base 2: mod_base = OTHER; note = 2'-deoxyguanosine-3'-phosphorothioate
  modified_base 3: mod_base = OTHER; note = 2'-O-methylcytidine-3'-phosphate
  modified_base 4: mod_base = OTHER; note = 2'-O-methyladenosine-3'-phosphate
  modified_base 6: mod_base = OTHER; note = 2'-O-methylguanosine-3'-phosphate
  modified_base 8: mod_base = OTHER; note = 2'-O-methyladenosine-3'-phosphate
  modified_base 9: mod_base = OTHER; note = 2'-O-methylcytidine-3'-phosphate
  modified_base 10: mod_base = OTHER; note = 2'-O-methylcytidine-3'-phosphate
  modified_base 11: mod_base = OTHER; note = 2'-O-methyluridine-3'-phosphate
  modified_base 13: mod_base = OTHER; note = 2'-O-methyluridine-3'-phosphate
  modified_base 14: mod_base = OTHER; note = 2'-fluorocytidine-3'-phosphate
  modified_base 15: mod_base = OTHER; note = 2'-O-methyladenosine-3'-phosphate
  modified_base 16: mod_base = OTHER; note = 2'-O-methyladenosine-3'-phosphate
  modified_base 17: mod_base = OTHER; note = 2'-O-methyluridine-3'-phosphate
  modified_base 18: mod_base = OTHER; note = 2'-O-methylcytidine-3'-phosphate
  modified_base 19: mod_base = OTHER; note = 2'-O-methyluridine-3'-phosphate
  modified_base 20: mod_base = OTHER; note = 2'-O-methyluridine-3'-phosphate
  modified_base 21: mod_base = OTHER; note = 2'-O-methylcytidine-3'-phosphorothioate
  modified_base 22: mod_base = OTHER; note = 2'-O-methyluridine-3'-phosphorothioate
  modified_base 23: mod_base = OTHER; note = 2'-O-methylcytidine-3'-phosphate
  misc_feature 1: note = RNA
  misc_feature 2: note = DNA
  misc_feature 3..4: note = RNA
  misc_feature 5: note = DNA
  misc_feature 6: note = RNA
  misc_feature 7: note = DNA
  misc_feature 8..11: note = RNA
  misc_feature 12: note = DNA
  misc_feature 13..23: note = RNA
agcatgaacctgtcaatcttctc

SEQ ID NO: 2426 - DNA, 23 bp, synthetic construct
  source 1..23: mol_type = other DNA
  modified_base 1: mod_base = OTHER; note = 2'-O-methyladenosine-3'-phosphorothioate
  modified_base 2: mod_base = OTHER; note = 2'-deoxythimidine-3'-phosphorothioate
  modified_base 3: mod_base = OTHER; note = 2'-O-methylguanosine-3'-phosphate
  modified_base 4: mod_base = OTHER; note = 2'-O-methylcytidine-3'-phosphate
  modified_base 6: mod_base = OTHER; note = 2'-O-methyluridine-3'-phosphate
  modified_base 8: mod_base = OTHER; note = 2'-O-methyladenosine-3'-phosphate
  modified_base 9: mod_base = OTHER; note = 2'-O-methyladenosine-3'-phosphate
  modified_base 10: mod_base = OTHER; note = 2'-O-methylcytidine-3'-phosphate
  modified_base 11: mod_base = OTHER; note = 2'-O-methylcytidine-3'-phosphate
  modified_base 13: mod_base = OTHER; note = 2'-O-methylguanosine-3'-phosphate
  modified_base 14: mod_base = OTHER; note = 2'-fluorouridine-3'-phosphate
  modified_base 15: mod_base = OTHER; note = 2'-O-methylcytidine-3'-phosphate
  modified_base 16: mod_base = OTHER; note = 2'-O-methyladenosine-3'-phosphate
  modified_base 17: mod_base = OTHER; note = 2'-O-methyladenosine-3'-phosphate
  modified_base 18: mod_base = OTHER; note = 2'-O-methyluridine-3'-phosphate
  modified_base 19: mod_base = OTHER; note = 2'-O-methylcytidine-3'-phosphate
  modified_base 20: mod_base = OTHER; note = 2'-O-methyluridine-3'-phosphate
  modified_base 21: mod_base = OTHER; note = 2'-O-methyluridine-3'-phosphorothioate
  modified_base 22: mod_base = OTHER; note = 2'-O-methylcytidine-3'-phosphorothioate
  modified_base 23: mod_base = OTHER; note = 2'-O-methyluridine-3'-phosphate
  misc_feature 1: note = RNA
  misc_feature 2: note = DNA
  misc_feature 3..4: note = RNA
  misc_feature 5: note = DNA
  misc_feature 6: note = RNA
  misc_feature 7: note = DNA
  misc_feature 8..11: note = RNA
  misc_feature 12: note = DNA
  misc_feature 13..23: note = RNA
atgcatgaacctgtcaatcttct

SEQ ID NO: 2427 - DNA, 23 bp, synthetic construct
  source 1..23: mol_type = other DNA
  modified_base 1: mod_base = OTHER; note = 2'-O-methyladenosine-3'-phosphorothioate
  modified_base 2: mod_base = OTHER; note = 2'-deoxycytidine-3'-phosphorothioate
  modified_base 3: mod_base = OTHER; note = 2'-O-methyluridine-3'-phosphate
  modified_base 4: mod_base = OTHER; note = 2'-O-methylguanosine-3'-phosphate
  modified_base 6: mod_base = OTHER; note = 2'-O-methyladenosine-3'-phosphate
  modified_base 8: mod_base = OTHER; note = 2'-O-methylguanosine-3'-phosphate
  modified_base 9: mod_base = OTHER; note = 2'-O-methyladenosine-3'-phosphate
  modified_base 10: mod_base = OTHER; note = 2'-O-methyladenosine-3'-phosphate
  modified_base 11: mod_base = OTHER; note = 2'-O-methylcytidine-3'-phosphate
  modified_base 13: mod_base = OTHER; note = 2'-O-methyluridine-3'-phosphate
  modified_base 14: mod_base = OTHER; note = 2'-fluoroguanosine-3'-phosphate
  modified_base 15: mod_base = OTHER; note = 2'-O-methyluridine-3'-phosphate
  modified_base 16: mod_base = OTHER; note = 2'-O-methylcytidine-3'-phosphate
  modified_base 17: mod_base = OTHER; note = 2'-O-methyladenosine-3'-phosphate
  modified_base 18: mod_base = OTHER; note = 2'-O-methyladenosine-3'-phosphate
  modified_base 19: mod_base = OTHER; note = 2'-O-methyluridine-3'-phosphate
  modified_base 20: mod_base = OTHER; note = 2'-O-methylcytidine-3'-phosphate
  modified_base 21: mod_base = OTHER; note = 2'-O-methyluridine-3'-phosphorothioate
  modified_base 22: mod_base = OTHER; note = 2'-O-methyluridine-3'-phosphorothioate
  modified_base 23: mod_base = OTHER; note = 2'-O-methylcytidine-3'-phosphate
  misc_feature 1: note = RNA
  misc_feature 2: note = DNA
  misc_feature 3..4: note = RNA
  misc_feature 5: note = DNA
  misc_feature 6: note = RNA
  misc_feature 7: note = DNA
  misc_feature 8..11: note = RNA
  misc_feature 12: note = DNA
  misc_feature 13..23: note = RNA
actgcatgaacctgtcaatcttc

SEQ ID NO: 2428 - DNA, 23 bp, synthetic construct
  source 1..23: mol_type = other DNA
  modified_base 1: mod_base = OTHER; note = 2'-O-methyladenosine-3'-phosphorothioate
  modified_base 2: mod_base = OTHER; note = 2'-deoxycytidine-3'-phosphorothioate
  modified_base 3: mod_base = OTHER; note = 2'-O-methylcytidine-3'-phosphate
  modified_base 4: mod_base = OTHER; note = 2'-O-methyluridine-3'-phosphate
  modified_base 6: mod_base = OTHER; note = 2'-O-methylcytidine-3'-phosphate
  modified_base 8: mod_base = OTHER; note = 2'-O-methyluridine-3'-phosphate
  modified_base 9: mod_base = OTHER; note = 2'-O-methylguanosine-3'-phosphate
  modified_base 10: mod_base = OTHER; note = 2'-O-methyladenosine-3'-phosphate
  modified_base 11: mod_base = OTHER; note = 2'-O-methyladenosine-3'-phosphate
  modified_base 13: mod_base = OTHER; note = 2'-O-methylcytidine-3'-phosphate
  modified_base 14: mod_base = OTHER; note = 2'-fluorouridine-3'-phosphate
  modified_base 15: mod_base = OTHER; note = 2'-O-methylguanosine-3'-phosphate
  modified_base 16: mod_base = OTHER; note = 2'-O-methyluridine-3'-phosphate
  modified_base 17: mod_base = OTHER; note = 2'-O-methylcytidine-3'-phosphate
  modified_base 18: mod_base = OTHER; note = 2'-O-methyladenosine-3'-phosphate
  modified_base 19: mod_base = OTHER; note = 2'-O-methyladenosine-3'-phosphate
  modified_base 20: mod_base = OTHER; note = 2'-O-methyluridine-3'-phosphate
  modified_base 21: mod_base = OTHER; note = 2'-O-methylcytidine-3'-phosphorothioate
  modified_base 22: mod_base = OTHER; note = 2'-O-methyluridine-3'-phosphorothioate
  modified_base 23: mod_base = OTHER; note = 2'-O-methyluridine-3'-phosphate
  misc_feature 1: note = RNA
  misc_feature 2: note = DNA
  misc_feature 3..4: note = RNA
  misc_feature 5: note = DNA
  misc_feature 6: note = RNA
  misc_feature 7: note = DNA
  misc_feature 8..11: note = RNA
  misc_feature 12: note = DNA
  misc_feature 13..23: note = RNA
acctgcatgaacctgtcaatctt

SEQ ID NO: 2429 - DNA, 23 bp, synthetic construct
  source 1..23: mol_type = other DNA
  modified_base 1: mod_base = OTHER; note = 2'-O-methyladenosine-3'-phosphorothioate
  modified_base 2: mod_base = OTHER; note = 2'-deoxyguanosine-3'-phosphorothioate
  modified_base 3: mod_base = OTHER; note = 2'-O-methylcytidine-3'-phosphate
  modified_base 4: mod_base = OTHER; note = 2'-O-methylcytidine-3'-phosphate
  modified_base 6: mod_base = OTHER; note = 2'-O-methylguanosine-3'-phosphate
  modified_base 8: mod_base = OTHER; note = 2'-O-methyladenosine-3'-phosphate
  modified_base 9: mod_base = OTHER; note = 2'-O-methyluridine-3'-phosphate
  modified_base 10: mod_base = OTHER; note = 2'-O-methylguanosine-3'-phosphate
  modified_base 11: mod_base = OTHER; note = 2'-O-methyladenosine-3'-phosphate
  modified_base 13: mod_base = OTHER; note = 2'-O-methylcytidine-3'-phosphate
  modified_base 14: mod_base = OTHER; note = 2'-fluorocytidine-3'-phosphate
  modified_base 15: mod_base = OTHER; note = 2'-O-methyluridine-3'-phosphate
  modified_base 16: mod_base = OTHER; note = 2'-O-methylguanosine-3'-phosphate
  modified_base 17: mod_base = OTHER; note = 2'-O-methyluridine-3'-phosphate
  modified_base 18: mod_base = OTHER; note = 2'-O-methylcytidine-3'-phosphate
  modified_base 19: mod_base = OTHER; note = 2'-O-methyladenosine-3'-phosphate
  modified_base 20: mod_base = OTHER; note = 2'-O-methyladenosine-3'-phosphate
  modified_base 21: mod_base = OTHER; note = 2'-O-methyluridine-3'-phosphorothioate
  modified_base 22: mod_base = OTHER; note = 2'-O-methylcytidine-3'-phosphorothioate
  modified_base 23: mod_base = OTHER; note = 2'-O-methyluridine-3'-phosphate
  misc_feature 1: note = RNA
  misc_feature 2: note = DNA
  misc_feature 3..4: note = RNA
  misc_feature 5: note = DNA
  misc_feature 6: note = RNA
  misc_feature 7: note = DNA
  misc_feature 8..11: note = RNA
  misc_feature 12: note = DNA
  misc_feature 13..23: note = RNA
agcctgcatgaacctgtcaatct

SEQ ID NO: 2430 - DNA, 23 bp, synthetic construct
  source 1..23: mol_type = other DNA
  modified_base 1: mod_base = OTHER; note = 2'-O-methyladenosine-3'-phosphorothioate
  modified_base 2: mod_base = OTHER; note = 2'-deoxyadenosine-3'-phosphorothioate
  modified_base 3: mod_base = OTHER; note = 2'-O-methylguanosine-3'-phosphate
  modified_base 4: mod_base = OTHER; note = 2'-O-methylcytidine-3'-phosphate
  modified_base 6: mod_base = OTHER; note = 2'-O-methyluridine-3'-phosphate
  modified_base 8: mod_base = OTHER; note = 2'-O-methylcytidine-3'-phosphate
  modified_base 9: mod_base = OTHER; note = 2'-O-methyladenosine-3'-phosphate
  modified_base 10: mod_base = OTHER; note = 2'-O-methyluridine-3'-phosphate
  modified_base 11: mod_base = OTHER; note = 2'-O-methylguanosine-3'-phosphate
  modified_base 13: mod_base = OTHER; note = 2'-O-methyladenosine-3'-phosphate
  modified_base 14: mod_base = OTHER; note = 2'-fluorocytidine-3'-phosphate
  modified_base 15: mod_base = OTHER; note = 2'-O-methylcytidine-3'-phosphate
  modified_base 16: mod_base = OTHER; note = 2'-O-methyluridine-3'-phosphate
  modified_base 17: mod_base = OTHER; note = 2'-O-methylguanosine-3'-phosphate
  modified_base 18: mod_base = OTHER; note = 2'-O-methyluridine-3'-phosphate
  modified_base 19: mod_base = OTHER; note = 2'-O-methylcytidine-3'-phosphate
  modified_base 20: mod_base = OTHER; note = 2'-O-methyladenosine-3'-phosphate
  modified_base 21: mod_base = OTHER; note = 2'-O-methyladenosine-3'-phosphorothioate
  modified_base 22: mod_base = OTHER; note = 2'-O-methyluridine-3'-phosphorothioate
  modified_base 23: mod_base = OTHER; note = 2'-O-methylcytidine-3'-phosphate
  misc_feature 1: note = RNA
  misc_feature 2: note = DNA
  misc_feature 3..4: note = RNA
  misc_feature 5: note = DNA
  misc_feature 6: note = RNA
  misc_feature 7: note = DNA
  misc_feature 8..11: note = RNA
  misc_feature 12: note = DNA
  misc_feature 13..23: note = RNA
aagcctgcatgaacctgtcaatc

SEQ ID NO: 2431 - DNA, 23 bp, synthetic construct
  source 1..23: mol_type = other DNA
  modified_base 1: mod_base = OTHER; note = 2'-O-methyladenosine-3'-phosphorothioate
  modified_base 2: mod_base = OTHER; note = 2'-deoxycytidine-3'-phosphorothioate
  modified_base 3: mod_base = OTHER; note = 2'-O-methyladenosine-3'-phosphate
  modified_base 4: mod_base = OTHER; note = 2'-O-methylguanosine-3'-phosphate
  modified_base 6: mod_base = OTHER; note = 2'-O-methylcytidine-3'-phosphate
  modified_base 8: mod_base = OTHER; note = 2'-O-methylguanosine-3'-phosphate
  modified_base 9: mod_base = OTHER; note = 2'-O-methylcytidine-3'-phosphate
  modified_base 10: mod_base = OTHER; note = 2'-O-methyladenosine-3'-phosphate
  modified_base 11: mod_base = OTHER; note = 2'-O-methyluridine-3'-phosphate
  modified_base 13: mod_base = OTHER; note = 2'-O-methyladenosine-3'-phosphate
  modified_base 14: mod_base = OTHER; note = 2'-fluoroadenosine-3'-phosphate
  modified_base 15: mod_base = OTHER; note = 2'-O-methylcytidine-3'-phosphate
  modified_base 16: mod_base = OTHER; note = 2'-O-methylcytidine-3'-phosphate
  modified_base 17: mod_base = OTHER; note = 2'-O-methyluridine-3'-phosphate
  modified_base 18: mod_base = OTHER; note = 2'-O-methylguanosine-3'-phosphate
  modified_base 19: mod_base = OTHER; note = 2'-O-methyluridine-3'-phosphate
  modified_base 20: mod_base = OTHER; note = 2'-O-methylcytidine-3'-phosphate
  modified_base 21: mod_base = OTHER; note = 2'-O-methyladenosine-3'-phosphorothioate
  modified_base 22: mod_base = OTHER; note = 2'-O-methyladenosine-3'-phosphorothioate
  modified_base 23: mod_base = OTHER; note = 2'-O-methyluridine-3'-phosphate
  misc_feature 1: note = RNA
  misc_feature 2: note = DNA
  misc_feature 3..4: note = RNA
  misc_feature 5: note = DNA
  misc_feature 6: note = RNA
  misc_feature 7: note = DNA
  misc_feature 8..11: note = RNA
  misc_feature 12: note = DNA
  misc_feature 13..23: note = RNA
acagcctgcatgaacctgtcaat

SEQ ID NO: 2432 - DNA, 23 bp, synthetic construct
  source 1..23: mol_type = other DNA
  modified_base 1: mod_base = OTHER; note = 2'-O-methyladenosine-3'-phosphorothioate
  modified_base 2: mod_base = OTHER; note = 2'-deoxyadenosine-3'-phosphorothioate
  modified_base 3: mod_base = OTHER; note = 2'-O-methylcytidine-3'-phosphate
  modified_base 4: mod_base = OTHER; note = 2'-O-methyladenosine-3'-phosphate
  modified_base 6: mod_base = OTHER; note = 2'-O-methylcytidine-3'-phosphate
  modified_base 8: mod_base = OTHER; note = 2'-O-methyluridine-3'-phosphate
  modified_base 9: mod_base = OTHER; note = 2'-O-methylguanosine-3'-phosphate
  modified_base 10: mod_base = OTHER; note = 2'-O-methylcytidine-3'-phosphate
  modified_base 11: mod_base = OTHER; note = 2'-O-methyladenosine-3'-phosphate
  modified_base 13: mod_base = OTHER; note = 2'-O-methylguanosine-3'-phosphate
  modified_base 14: mod_base = OTHER; note = 2'-fluoroadenosine-3'-phosphate
  modified_base 15: mod_base = OTHER; note = 2'-O-methyladenosine-3'-phosphate
  modified_base 16: mod_base = OTHER; note = 2'-O-methylcytidine-3'-phosphate
  modified_base 17: mod_base = OTHER; note = 2'-O-methylcytidine-3'-phosphate
  modified_base 18: mod_base = OTHER; note = 2'-O-methyluridine-3'-phosphate
  modified_base 19: mod_base = OTHER; note = 2'-O-methylguanosine-3'-phosphate
  modified_base 20: mod_base = OTHER; note = 2'-O-methyluridine-3'-phosphate
  modified_base 21: mod_base = OTHER; note = 2'-O-methylcytidine-3'-phosphorothioate
  modified_base 22: mod_base = OTHER; note = 2'-O-methyladenosine-3'-phosphorothioate
  modified_base 23: mod_base = OTHER; note = 2'-O-methyladenosine-3'-phosphate
  misc_feature 1: note = RNA
  misc_feature 2: note = DNA
  misc_feature 3..4: note = RNA
  misc_feature 5: note = DNA
  misc_feature 6: note = RNA
  misc_feature 7: note = DNA
  misc_feature 8..11: note = RNA
  misc_feature 12: note = DNA
  misc_feature 13..23: note = RNA
aacagcctgcatgaacctgtcaa

SEQ ID NO: 2433 - DNA, 23 bp, synthetic construct
  source 1..23: mol_type = other DNA
  modified_base 1: mod_base = OTHER; note = 2'-O-methyladenosine-3'-phosphorothioate
  modified_base 2: mod_base = OTHER; note = 2'-deoxycytidine-3'-phosphorothioate
  modified_base 3: mod_base = OTHER; note = 2'-O-methyladenosine-3'-phosphate
  modified_base 4: mod_base = OTHER; note = 2'-O-methylcytidine-3'-phosphate
  modified_base 6: mod_base = OTHER; note = 2'-O-methylguanosine-3'-phosphate
  modified_base 8: mod_base = OTHER; note = 2'-O-methylcytidine-3'-phosphate
  modified_base 9: mod_base = OTHER; note = 2'-O-methyluridine-3'-phosphate
  modified_base 10: mod_base = OTHER; note = 2'-O-methylguanosine-3'-phosphate
  modified_base 11: mod_base = OTHER; note = 2'-O-methylcytidine-3'-phosphate
  modified_base 13: mod_base = OTHER; note = 2'-O-methyluridine-3'-phosphate
  modified_base 14: mod_base = OTHER; note = 2'-fluoroguanosine-3'-phosphate
  modified_base 15: mod_base = OTHER; note = 2'-O-methyladenosine-3'-phosphate
  modified_base 16: mod_base = OTHER; note = 2'-O-methyladenosine-3'-phosphate
  modified_base 17: mod_base = OTHER; note = 2'-O-methylcytidine-3'-phosphate
  modified_base 18: mod_base = OTHER; note = 2'-O-methylcytidine-3'-phosphate
  modified_base 19: mod_base = OTHER; note = 2'-O-methyluridine-3'-phosphate
  modified_base 20: mod_base = OTHER; note = 2'-O-methylguanosine-3'-phosphate
  modified_base 21: mod_base = OTHER; note = 2'-O-methyluridine-3'-phosphorothioate
  modified_base 22: mod_base = OTHER; note = 2'-O-methylcytidine-3'-phosphorothioate
  modified_base 23: mod_base = OTHER; note = 2'-O-methyladenosine-3'-phosphate
  misc_feature 1: note = RNA
  misc_feature 2: note = DNA
  misc_feature 3..4: note = RNA
  misc_feature 5: note = DNA
  misc_feature 6: note = RNA
  misc_feature 7: note = DNA
  misc_feature 8..11: note = RNA
  misc_feature 12: note = DNA
  misc_feature 13..23: note = RNA
acacagcctgcatgaacctgtca

SEQ ID NO: 2434 - DNA, 23 bp, synthetic construct
  source 1..23: mol_type = other DNA
  modified_base 1: mod_base = OTHER; note = 2'-O-methyladenosine-3'-phosphorothioate
  modified_base 2: mod_base = OTHER; note = 2'-deoxycytidine-3'-phosphorothioate
  modified_base 3: mod_base = OTHER; note = 2'-O-methyluridine-3'-phosphate
  modified_base 4: mod_base = OTHER; note = 2'-O-methylguanosine-3'-phosphate
  modified_base 6: mod_base = OTHER; note = 2'-O-methylcytidine-3'-phosphate
  modified_base 8: mod_base = OTHER; note = 2'-O-methylcytidine-3'-phosphate
  modified_base 9: mod_base = OTHER; note = 2'-O-methyladenosine-3'-phosphate
  modified_base 10: mod_base = OTHER; note = 2'-O-methylguanosine-3'-phosphate
  modified_base 11: mod_base = OTHER; note = 2'-O-methylcytidine-3'-phosphate
  modified_base 13: mod_base = OTHER; note = 2'-O-methyluridine-3'-phosphate
  modified_base 14: mod_base = OTHER; note = 2'-fluoroguanosine-3'-phosphate
  modified_base 15: mod_base = OTHER; note = 2'-O-methylcytidine-3'-phosphate
  modified_base 16: mod_base = OTHER; note = 2'-O-methyladenosine-3'-phosphate
  modified_base 17: mod_base = OTHER; note = 2'-O-methyluridine-3'-phosphate
  modified_base 18: mod_base = OTHER; note = 2'-O-methylguanosine-3'-phosphate
  modified_base 19: mod_base = OTHER; note = 2'-O-methyladenosine-3'-phosphate
  modified_base 20: mod_base = OTHER; note = 2'-O-methyladenosine-3'-phosphate
  modified_base 21: mod_base = OTHER; note = 2'-O-methylcytidine-3'-phosphorothioate
  modified_base 22: mod_base = OTHER; note = 2'-O-methylcytidine-3'-phosphorothioate
  modified_base 23: mod_base = OTHER; note = 2'-O-methyluridine-3'-phosphate
  misc_feature 1: note = RNA
  misc_feature 2: note = DNA
  misc_feature 3..4: note = RNA
  misc_feature 5: note = DNA
  misc_feature 6: note = RNA
  misc_feature 7: note = DNA
  misc_feature 8..11: note = RNA
  misc_feature 12: note = DNA
  misc_feature 13..23: note = RNA
actgtcacagcctgcatgaacct

SEQ ID NO: 2435 - DNA, 23 bp, synthetic construct
  source 1..23: mol_type = other DNA
  modified_base 1: mod_base = OTHER; note = 2'-O-methyladenosine-3'-phosphorothioate
  modified_base 2: mod_base = OTHER; note = 2'-deoxycytidine-3'-phosphorothioate
  modified_base 3: mod_base = OTHER; note = 2'-O-methyladenosine-3'-phosphate
  modified_base 4: mod_base = OTHER; note = 2'-O-methyluridine-3'-phosphate
  modified_base 6: mod_base = OTHER; note = 2'-O-methylcytidine-3'-phosphate
  modified_base 8: mod_base = OTHER; note = 2'-O-methylguanosine-3'-phosphate
  modified_base 9: mod_base = OTHER; note = 2'-O-methyluridine-3'-phosphate
  modified_base 10: mod_base = OTHER; note = 2'-O-methylcytidine-3'-phosphate
  modified_base 11: mod_base = OTHER; note = 2'-O-methyladenosine-3'-phosphate
  modified_base 13: mod_base = OTHER; note = 2'-O-methyladenosine-3'-phosphate
  modified_base 14: mod_base = OTHER; note = 2'-fluoroguanosine-3'-phosphate
  modified_base 15: mod_base = OTHER; note = 2'-O-methylcytidine-3'-phosphate
  modified_base 16: mod_base = OTHER; note = 2'-O-methylcytidine-3'-phosphate
  modified_base 17: mod_base = OTHER; note = 2'-O-methyluridine-3'-phosphate
  modified_base 18: mod_base = OTHER; note = 2'-O-methylguanosine-3'-phosphate
  modified_base 19: mod_base = OTHER; note = 2'-O-methylcytidine-3'-phosphate
  modified_base 20: mod_base = OTHER; note = 2'-O-methyladenosine-3'-phosphate
  modified_base 21: mod_base = OTHER; note = 2'-O-methyluridine-3'-phosphorothioate
  modified_base 22: mod_base = OTHER; note = 2'-O-methylguanosine-3'-phosphorothioate
  modified_base 23: mod_base = OTHER; note = 2'-O-methyladenosine-3'-phosphate
  misc_feature 1: note = RNA
  misc_feature 2: note = DNA
  misc_feature 3..4: note = RNA
  misc_feature 5: note = DNA
  misc_feature 6: note = RNA
  misc_feature 7: note = DNA
  misc_feature 8..11: note = RNA
  misc_feature 12: note = DNA
  misc_feature 13..23: note = RNA
acatcctgtcacagcctgcatga

SEQ ID NO: 2436 - DNA, 23 bp, synthetic construct
  source 1..23: mol_type = other DNA
  modified_base 1: mod_base = OTHER; note = 2'-O-methyladenosine-3'-phosphorothioate
  modified_base 2: mod_base = OTHER; note = 2'-deoxythimidine-3'-phosphorothioate
  modified_base 3: mod_base = OTHER; note = 2'-O-methylcytidine-3'-phosphate
  modified_base 4: mod_base = OTHER; note = 2'-O-methylcytidine-3'-phosphate
  modified_base 6: mod_base = OTHER; note = 2'-O-methyluridine-3'-phosphate
  modified_base 8: mod_base = OTHER; note = 2'-O-methylcytidine-3'-phosphate
  modified_base 9: mod_base = OTHER; note = 2'-O-methyluridine-3'-phosphate
  modified_base 10: mod_base = OTHER; note = 2'-O-methylguanosine-3'-phosphate
  modified_base 11: mod_base = OTHER; note = 2'-O-methyluridine-3'-phosphate
  modified_base 13: mod_base = OTHER; note = 2'-O-methyladenosine-3'-phosphate
  modified_base 14: mod_base = OTHER; note = 2'-fluorocytidine-3'-phosphate
  modified_base 15: mod_base = OTHER; note = 2'-O-methyladenosine-3'-phosphate
  modified_base 16: mod_base = OTHER; note = 2'-O-methylguanosine-3'-phosphate
  modified_base 17: mod_base = OTHER; note = 2'-O-methylcytidine-3'-phosphate
  modified_base 18: mod_base = OTHER; note = 2'-O-methylcytidine-3'-phosphate
  modified_base 19: mod_base = OTHER; note = 2'-O-methyluridine-3'-phosphate
  modified_base 20: mod_base = OTHER; note = 2'-O-methylguanosine-3'-phosphate
  modified_base 21: mod_base = OTHER; note = 2'-O-methylcytidine-3'-phosphorothioate
  modified_base 22: mod_base = OTHER; note = 2'-O-methyladenosine-3'-phosphorothioate
  modified_base 23: mod_base = OTHER; note = 2'-O-methyluridine-3'-phosphate
  misc_feature 1: note = RNA
  misc_feature 2: note = DNA
  misc_feature 3..4: note = RNA
  misc_feature 5: note = DNA
  misc_feature 6: note = RNA
  misc_feature 7: note = DNA
  misc_feature 8..11: note = RNA
  misc_feature 12: note = DNA
  misc_feature 13..23: note = RNA
atccatcctgtcacagcctgcat

SEQ ID NO: 2437 - DNA, 23 bp, synthetic construct
  source 1..23: mol_type = other DNA
  modified_base 1: mod_base = OTHER; note = 2'-O-methyladenosine-3'-phosphorothioate
  modified_base 2: mod_base = OTHER; note = 2'-deoxythimidine-3'-phosphorothioate
  modified_base 3: mod_base = OTHER; note = 2'-O-methyluridine-3'-phosphate
  modified_base 4: mod_base = OTHER; note = 2'-O-methylcytidine-3'-phosphate
  modified_base 6: mod_base = OTHER; note = 2'-O-methyladenosine-3'-phosphate
  modified_base 8: mod_base = OTHER; note = 2'-O-methylcytidine-3'-phosphate
  modified_base 9: mod_base = OTHER; note = 2'-O-methylcytidine-3'-phosphate
  modified_base 10: mod_base = OTHER; note = 2'-O-methyluridine-3'-phosphate
  modified_base 11: mod_base = OTHER; note = 2'-O-methylguanosine-3'-phosphate
  modified_base 13: mod_base = OTHER; note = 2'-O-methylcytidine-3'-phosphate
  modified_base 14: mod_base = OTHER; note = 2'-fluoroadenosine-3'-phosphate
  modified_base 15: mod_base = OTHER; note = 2'-O-methylcytidine-3'-phosphate
  modified_base 16: mod_base = OTHER; note = 2'-O-methyladenosine-3'-phosphate
  modified_base 17: mod_base = OTHER; note = 2'-O-methylguanosine-3'-phosphate
  modified_base 18: mod_base = OTHER; note = 2'-O-methylcytidine-3'-phosphate
  modified_base 19: mod_base = OTHER; note = 2'-O-methylcytidine-3'-phosphate
  modified_base 20: mod_base = OTHER; note = 2'-O-methyluridine-3'-phosphate
  modified_base 21: mod_base = OTHER; note = 2'-O-methylguanosine-3'-phosphorothioate
  modified_base 22: mod_base = OTHER; note = 2'-O-methylcytidine-3'-phosphorothioate
  modified_base 23: mod_base = OTHER; note = 2'-O-methyladenosine-3'-phosphate
  misc_feature 1: note = RNA
  misc_feature 2: note = DNA
  misc_feature 3..4: note = RNA
  misc_feature 5: note = DNA
  misc_feature 6: note = RNA
  misc_feature 7: note = DNA
  misc_feature 8..11: note = RNA
  misc_feature 12: note = DNA
  misc_feature 13..23: note = RNA
attccatcctgtcacagcctgca

SEQ ID NO: 2438 - DNA, 23 bp, synthetic construct
  source 1..23: mol_type = other DNA
  modified_base 1: mod_base = OTHER; note = 2'-O-methyladenosine-3'-phosphorothioate
  modified_base 2: mod_base = OTHER; note = 2'-deoxythimidine-3'-phosphorothioate
  modified_base 3: mod_base = OTHER; note = 2'-O-methylguanosine-3'-phosphate
  modified_base 4: mod_base = OTHER; note = 2'-O-methylguanosine-3'-phosphate
  modified_base 6: mod_base = OTHER; note = 2'-O-methylcytidine-3'-phosphate
  modified_base 8: mod_base = OTHER; note = 2'-O-methyluridine-3'-phosphate
  modified_base 9: mod_base = OTHER; note = 2'-O-methyladenosine-3'-phosphate
  modified_base 10: mod_base = OTHER; note = 2'-O-methylguanosine-3'-phosphate
  modified_base 11: mod_base = OTHER; note = 2'-O-methylguanosine-3'-phosphate
  modified_base 13: mod_base = OTHER; note = 2'-O-methylguanosine-3'-phosphate
  modified_base 14: mod_base = OTHER; note = 2'-fluorouridine-3'-phosphate
  modified_base 15: mod_base = OTHER; note = 2'-O-methyluridine-3'-phosphate
  modified_base 16: mod_base = OTHER; note = 2'-O-methylguanosine-3'-phosphate
  modified_base 17: mod_base = OTHER; note = 2'-O-methyladenosine-3'-phosphate
  modified_base 18: mod_base = OTHER; note = 2'-O-methyladenosine-3'-phosphate
  modified_base 19: mod_base = OTHER; note = 2'-O-methyladenosine-3'-phosphate
  modified_base 20: mod_base = OTHER; note = 2'-O-methylguanosine-3'-phosphate
  modified_base 21: mod_base = OTHER; note = 2'-O-methylcytidine-3'-phosphorothioate
  modified_base 22: mod_base = OTHER; note = 2'-O-methylcytidine-3'-phosphorothioate
  modified_base 23: mod_base = OTHER; note = 2'-O-methyladenosine-3'-phosphate
  misc_feature 1: note = RNA
  misc_feature 2: note = DNA
  misc_feature 3..4: note = RNA
  misc_feature 5: note = DNA
  misc_feature 6: note = RNA
  misc_feature 7: note = DNA
  misc_feature 8..11: note = RNA
  misc_feature 12: note = DNA
  misc_feature 13..23: note = RNA
atggacgtaggtgttgaaagcca

SEQ ID NO: 2439 - DNA, 23 bp, synthetic construct
  source 1..23: mol_type = other DNA
  modified_base 1: mod_base = OTHER; note = 2'-O-methyladenosine-3'-phosphorothioate
  modified_base 2: mod_base = OTHER; note = 2'-deoxycytidine-3'-phosphorothioate
  modified_base 3: mod_base = OTHER; note = 2'-O-methyluridine-3'-phosphate
  modified_base 4: mod_base = OTHER; note = 2'-O-methylguanosine-3'-phosphate
  modified_base 6: mod_base = OTHER; note = 2'-O-methyluridine-3'-phosphate
  modified_base 8: mod_base = OTHER; note = 2'-O-methyluridine-3'-phosphate
  modified_base 9: mod_base = OTHER; note = 2'-O-methylcytidine-3'-phosphate
  modified_base 10: mod_base = OTHER; note = 2'-O-methylcytidine-3'-phosphate
  modified_base 11: mod_base = OTHER; note = 2'-O-methyladenosine-3'-phosphate
  modified_base 13: mod_base = OTHER; note = 2'-O-methylcytidine-3'-phosphate
  modified_base 14: mod_base = OTHER; note = 2'-fluorocytidine-3'-phosphate
  modified_base 15: mod_base = OTHER; note = 2'-O-methyladenosine-3'-phosphate
  modified_base 16: mod_base = OTHER; note = 2'-O-methylguanosine-3'-phosphate
  modified_base 17: mod_base = OTHER; note = 2'-O-methyladenosine-3'-phosphate
  modified_base 18: mod_base = OTHER; note = 2'-O-methyladenosine-3'-phosphate
  modified_base 19: mod_base = OTHER; note = 2'-O-methylcytidine-3'-phosphate
  modified_base 20: mod_base = OTHER; note = 2'-O-methyluridine-3'-phosphate
  modified_base 21: mod_base = OTHER; note = 2'-O-methylcytidine-3'-phosphorothioate
  modified_base 22: mod_base = OTHER; note = 2'-O-methylcytidine-3'-phosphorothioate
  modified_base 23: mod_base = OTHER; note = 2'-O-methyluridine-3'-phosphate
  misc_feature 1: note = RNA
  misc_feature 2: note = DNA
  misc_feature 3..4: note = RNA
  misc_feature 5: note = DNA
  misc_feature 6: note = RNA
  misc_feature 7: note = DNA
  misc_feature 8..11: note = RNA
  misc_feature 12: note = DNA
  misc_feature 13..23: note = RNA
actgttgtccacccagaactcct

SEQ ID NO: 2440 - DNA, 23 bp, synthetic construct
  source 1..23: mol_type = other DNA
  modified_base 1: mod_base = OTHER; note = 2'-O-methyladenosine-3'-phosphorothioate
  modified_base 2: mod_base = OTHER; note = 2'-deoxyadenosine-3'-phosphorothioate
  modified_base 3: mod_base = OTHER; note = 2'-O-methylcytidine-3'-phosphate
  modified_base 4: mod_base = OTHER; note = 2'-O-methyladenosine-3'-phosphate
  modified_base 6: mod_base = OTHER; note = 2'-O-methyluridine-3'-phosphate
  modified_base 8: mod_base = OTHER; note = 2'-O-methyladenosine-3'-phosphate
  modified_base 9: mod_base = OTHER; note = 2'-O-methylguanosine-3'-phosphate
  modified_base 10: mod_base = OTHER; note = 2'-O-methylguanosine-3'-phosphate
  modified_base 11: mod_base = OTHER; note = 2'-O-methyluridine-3'-phosphate
  modified_base 13: mod_base = OTHER; note = 2'-O-methylcytidine-3'-phosphate
  modified_base 14: mod_base = OTHER; note = 2'-fluorouridine-3'-phosphate
  modified_base 15: mod_base = OTHER; note = 2'-O-methylguanosine-3'-phosphate
  modified_base 16: mod_base = OTHER; note = 2'-O-methyluridine-3'-phosphate
  modified_base 17: mod_base = OTHER; note = 2'-O-methyluridine-3'-phosphate
  modified_base 18: mod_base = OTHER; note = 2'-O-methylguanosine-3'-phosphate
  modified_base 19: mod_base = OTHER; note = 2'-O-methyluridine-3'-phosphate
  modified_base 20: mod_base = OTHER; note = 2'-O-methylcytidine-3'-phosphate
  modified_base 21: mod_base = OTHER; note = 2'-O-methylcytidine-3'-phosphorothioate
  modified_base 22: mod_base = OTHER; note = 2'-O-methyladenosine-3'-phosphorothioate
  modified_base 23: mod_base = OTHER; note = 2'-O-methylcytidine-3'-phosphate
  misc_feature 1: note = RNA
  misc_feature 2: note = DNA
  misc_feature 3..4: note = RNA
  misc_feature 5: note = DNA
  misc_feature 6: note = RNA
  misc_feature 7: note = DNA
  misc_feature 8..11: note = RNA
  misc_feature 12: note = DNA
  misc_feature 13..23: note = RNA
aacactgaggtgctgttgtccac

SEQ ID NO: 2441 - DNA, 23 bp, synthetic construct
  source 1..23: mol_type = other DNA
  modified_base 1: mod_base = OTHER; note = 2'-O-methyladenosine-3'-phosphorothioate
  modified_base 2: mod_base = OTHER; note = 2'-deoxyguanosine-3'-phosphorothioate
  modified_base 3: mod_base = OTHER; note = 2'-O-methyladenosine-3'-phosphate
  modified_base 4: mod_base = OTHER; note = 2'-O-methylcytidine-3'-phosphate
  modified_base 6: mod_base = OTHER; note = 2'-O-methylcytidine-3'-phosphate
  modified_base 8: mod_base = OTHER; note = 2'-O-methylguanosine-3'-phosphate
  modified_base 9: mod_base = OTHER; note = 2'-O-methyladenosine-3'-phosphate
  modified_base 10: mod_base = OTHER; note = 2'-O-methylguanosine-3'-phosphate
  modified_base 11: mod_base = OTHER; note = 2'-O-methylguanosine-3'-phosphate
  modified_base 13: mod_base = OTHER; note = 2'-O-methylguanosine-3'-phosphate
  modified_base 14: mod_base = OTHER; note = 2'-fluorocytidine-3'-phosphate
  modified_base 15: mod_base = OTHER; note = 2'-O-methyluridine-3'-phosphate
  modified_base 16: mod_base = OTHER; note = 2'-O-methylguanosine-3'-phosphate
  modified_base 17: mod_base = OTHER; note = 2'-O-methyluridine-3'-phosphate
  modified_base 18: mod_base = OTHER; note = 2'-O-methyluridine-3'-phosphate
  modified_base 19: mod_base = OTHER; note = 2'-O-methylguanosine-3'-phosphate
  modified_base 20: mod_base = OTHER; note = 2'-O-methyluridine-3'-phosphate
  modified_base 21: mod_base = OTHER; note = 2'-O-methylcytidine-3'-phosphorothioate
  modified_base 22: mod_base = OTHER; note = 2'-O-methylcytidine-3'-phosphorothioate
  modified_base 23: mod_base = OTHER; note = 2'-O-methyladenosine-3'-phosphate
  misc_feature 1: note = RNA
  misc_feature 2: note = DNA
  misc_feature 3..4: note = RNA
  misc_feature 5: note = DNA
  misc_feature 6: note = RNA
  misc_feature 7: note = DNA
  misc_feature 8..11: note = RNA
  misc_feature 12: note = DNA
  misc_feature 13..23: note = RNA
agacactgaggtgctgttgtcca

SEQ ID NO: 2442 - DNA, 23 bp, synthetic construct
  source 1..23: mol_type = other DNA
  modified_base 1: mod_base = OTHER; note = 2'-O-methyladenosine-3'-phosphorothioate
  modified_base 2: mod_base = OTHER; note = 2'-deoxyadenosine-3'-phosphorothioate
  modified_base 3: mod_base = OTHER; note = 2'-O-methylguanosine-3'-phosphate
  modified_base 4: mod_base = OTHER; note = 2'-O-methyladenosine-3'-phosphate
  modified_base 6: mod_base = OTHER; note = 2'-O-methyladenosine-3'-phosphate
  modified_base 8: mod_base = OTHER; note = 2'-O-methyluridine-3'-phosphate
  modified_base 9: mod_base = OTHER; note = 2'-O-methylguanosine-3'-phosphate
  modified_base 10: mod_base = OTHER; note = 2'-O-methyladenosine-3'-phosphate
  modified_base 11: mod_base = OTHER; note = 2'-O-methylguanosine-3'-phosphate
  modified_base 13: mod_base = OTHER; note = 2'-O-methyluridine-3'-phosphate
  modified_base 14: mod_base = OTHER; note = 2'-fluoroguanosine-3'-phosphate
  modified_base 15: mod_base = OTHER; note = 2'-O-methylcytidine-3'-phosphate
  modified_base 16: mod_base = OTHER; note = 2'-O-methyluridine-3'-phosphate
  modified_base 17: mod_base = OTHER; note = 2'-O-methylguanosine-3'-phosphate
  modified_base 18: mod_base = OTHER; note = 2'-O-methyluridine-3'-phosphate
  modified_base 19: mod_base = OTHER; note = 2'-O-methyluridine-3'-phosphate
  modified_base 20: mod_base = OTHER; note = 2'-O-methylguanosine-3'-phosphate
  modified_base 21: mod_base = OTHER; note = 2'-O-methyluridine-3'-phosphorothioate
  modified_base 22: mod_base = OTHER; note = 2'-O-methylcytidine-3'-phosphorothioate
  modified_base 23: mod_base = OTHER; note = 2'-O-methylcytidine-3'-phosphate
  misc_feature 1: note = RNA
  misc_feature 2: note = DNA
  misc_feature 3..4: note = RNA
  misc_feature 5: note = DNA
  misc_feature 6: note = RNA
  misc_feature 7: note = DNA
  misc_feature 8..11: note = RNA
  misc_feature 12: note = DNA
  misc_feature 13..23: note = RNA
aagacactgaggtgctgttgtcc

SEQ ID NO: 2443 - DNA, 23 bp, synthetic construct
  source 1..23: mol_type = other DNA
  modified_base 1: mod_base = OTHER; note = 2'-O-methyladenosine-3'-phosphorothioate
  modified_base 2: mod_base = OTHER; note = 2'-deoxycytidine-3'-phosphorothioate
  modified_base 3: mod_base = OTHER; note = 2'-O-methyladenosine-3'-phosphate
  modified_base 4: mod_base = OTHER; note = 2'-O-methylguanosine-3'-phosphate
  modified_base 6: mod_base = OTHER; note = 2'-O-methylcytidine-3'-phosphate
  modified_base 8: mod_base = OTHER; note = 2'-O-methylcytidine-3'-phosphate
  modified_base 9: mod_base = OTHER; note = 2'-O-methyluridine-3'-phosphate
  modified_base 10: mod_base = OTHER; note = 2'-O-methylguanosine-3'-phosphate
  modified_base 11: mod_base = OTHER; note = 2'-O-methyladenosine-3'-phosphate
  modified_base 13: mod_base = OTHER; note = 2'-O-methylguanosine-3'-phosphate
  modified_base 14: mod_base = OTHER; note = 2'-fluorouridine-3'-phosphate
  modified_base 15: mod_base = OTHER; note = 2'-O-methylguanosine-3'-phosphate
  modified_base 16: mod_base = OTHER; note = 2'-O-methylcytidine-3'-phosphate
  modified_base 17: mod_base = OTHER; note = 2'-O-methyluridine-3'-phosphate
  modified_base 18: mod_base = OTHER; note = 2'-O-methylguanosine-3'-phosphate
  modified_base 19: mod_base = OTHER; note = 2'-O-methyluridine-3'-phosphate
  modified_base 20: mod_base = OTHER; note = 2'-O-methyluridine-3'-phosphate
  modified_base 21: mod_base = OTHER; note = 2'-O-methylguanosine-3'-phosphorothioate
  modified_base 22: mod_base = OTHER; note = 2'-O-methyluridine-3'-phosphorothioate
  modified_base 23: mod_base = OTHER; note = 2'-O-methylcytidine-3'-phosphate
  misc_feature 1: note = RNA
  misc_feature 2: note = DNA
  misc_feature 3..4: note = RNA
  misc_feature 5: note = DNA
  misc_feature 6: note = RNA
  misc_feature 7: note = DNA
  misc_feature 8..11: note = RNA
  misc_feature 12: note = DNA
  misc_feature 13..23: note = RNA
acagacactgaggtgctgttgtc

SEQ ID NO: 2444 - DNA, 23 bp, synthetic construct
  source 1..23: mol_type = other DNA
  modified_base 1: mod_base = OTHER; note = 2'-O-methyladenosine-3'-phosphorothioate
  modified_base 2: mod_base = OTHER; note = 2'-deoxyadenosine-3'-phosphorothioate
  modified_base 3: mod_base = OTHER; note = 2'-O-methylcytidine-3'-phosphate
  modified_base 4: mod_base = OTHER; note = 2'-O-methyladenosine-3'-phosphate
  modified_base 6: mod_base = OTHER; note = 2'-O-methyladenosine-3'-phosphate
  modified_base 8: mod_base = OTHER; note = 2'-O-methyladenosine-3'-phosphate
  modified_base 9: mod_base = OTHER; note = 2'-O-methylcytidine-3'-phosphate
  modified_base 10: mod_base = OTHER; note = 2'-O-methyluridine-3'-phosphate
  modified_base 11: mod_base = OTHER; note = 2'-O-methylguanosine-3'-phosphate
  modified_base 13: mod_base = OTHER; note = 2'-O-methylguanosine-3'-phosphate
  modified_base 14: mod_base = OTHER; note = 2'-fluoroguanosine-3'-phosphate
  modified_base 15: mod_base = OTHER; note = 2'-O-methyluridine-3'-phosphate
  modified_base 16: mod_base = OTHER; note = 2'-O-methylguanosine-3'-phosphate
  modified_base 17: mod_base = OTHER; note = 2'-O-methylcytidine-3'-phosphate
  modified_base 18: mod_base = OTHER; note = 2'-O-methyluridine-3'-phosphate
  modified_base 19: mod_base = OTHER; note = 2'-O-methylguanosine-3'-phosphate
  modified_base 20: mod_base = OTHER; note = 2'-O-methyluridine-3'-phosphate
  modified_base 21: mod_base = OTHER; note = 2'-O-methyluridine-3'-phosphorothioate
  modified_base 22: mod_base = OTHER; note = 2'-O-methylguanosine-3'-phosphorothioate
  modified_base 23: mod_base = OTHER; note = 2'-O-methyluridine-3'-phosphate
  misc_feature 1: note = RNA
  misc_feature 2: note = DNA
  misc_feature 3..4: note = RNA
  misc_feature 5: note = DNA
  misc_feature 6: note = RNA
  misc_feature 7: note = DNA
  misc_feature 8..11: note = RNA
  misc_feature 12: note = DNA
  misc_feature 13..23: note = RNA
aacagacactgaggtgctgttgt

SEQ ID NO: 2445 - DNA, 23 bp, synthetic construct
  source 1..23: mol_type = other DNA
  modified_base 1: mod_base = OTHER; note = 2'-O-methyladenosine-3'-phosphorothioate
  modified_base 2: mod_base = OTHER; note = 2'-deoxycytidine-3'-phosphorothioate
  modified_base 3: mod_base = OTHER; note = 2'-O-methyluridine-3'-phosphate
  modified_base 4: mod_base = OTHER; note = 2'-O-methyluridine-3'-phosphate
  modified_base 6: mod_base = OTHER; note = 2'-O-methyluridine-3'-phosphate
  modified_base 8: mod_base = OTHER; note = 2'-O-methylcytidine-3'-phosphate
  modified_base 9: mod_base = OTHER; note = 2'-O-methyladenosine-3'-phosphate
  modified_base 10: mod_base = OTHER; note = 2'-O-methylguanosine-3'-phosphate
  modified_base 11: mod_base = OTHER; note = 2'-O-methylguanosine-3'-phosphate
  modified_base 13: mod_base = OTHER; note = 2'-O-methylcytidine-3'-phosphate
  modified_base 14: mod_base = OTHER; note = 2'-fluoroadenosine-3'-phosphate
  modified_base 15: mod_base = OTHER; note = 2'-O-methylguanosine-3'-phosphate
  modified_base 16: mod_base = OTHER; note = 2'-O-methyladenosine-3'-phosphate
  modified_base 17: mod_base = OTHER; note = 2'-O-methylguanosine-3'-phosphate
  modified_base 18: mod_base = OTHER; note = 2'-O-methylguanosine-3'-phosphate
  modified_base 19: mod_base = OTHER; note = 2'-O-methylcytidine-3'-phosphate
  modified_base 20: mod_base = OTHER; note = 2'-O-methyladenosine-3'-phosphate
  modified_base 21: mod_base = OTHER; note = 2'-O-methyluridine-3'-phosphorothioate
  modified_base 22: mod_base = OTHER; note = 2'-O-methyladenosine-3'-phosphorothioate
  modified_base 23: mod_base = OTHER; note = 2'-O-methylguanosine-3'-phosphate
  misc_feature 1: note = RNA
  misc_feature 2: note = DNA
  misc_feature 3..4: note = RNA
  misc_feature 5: note = DNA
  misc_feature 6: note = RNA
  misc_feature 7: note = DNA
  misc_feature 8..11: note = RNA
  misc_feature 12: note = DNA
  misc_feature 13..23: note = RNA
acttgtccaggtcagaggcatag

SEQ ID NO: 2446 - DNA, 23 bp, synthetic construct
  source 1..23: mol_type = other DNA
  modified_base 1: mod_base = OTHER; note = 2'-O-methyladenosine-3'-phosphorothioate
  modified_base 2: mod_base = OTHER; note = 2'-deoxycytidine-3'-phosphorothioate
  modified_base 3: mod_base = OTHER; note = 2'-O-methylcytidine-3'-phosphate
  modified_base 4: mod_base = OTHER; note = 2'-O-methyluridine-3'-phosphate
  modified_base 6: mod_base = OTHER; note = 2'-O-methylguanosine-3'-phosphate
  modified_base 8: mod_base = OTHER; note = 2'-O-methylcytidine-3'-phosphate
  modified_base 9: mod_base = OTHER; note = 2'-O-methylcytidine-3'-phosphate
  modified_base 10: mod_base = OTHER; note = 2'-O-methyladenosine-3'-phosphate
  modified_base 11: mod_base = OTHER; note = 2'-O-methylguanosine-3'-phosphate
  modified_base 13: mod_base = OTHER; note = 2'-O-methyluridine-3'-phosphate
  modified_base 14: mod_base = OTHER; note = 2'-fluorocytidine-3'-phosphate
  modified_base 15: mod_base = OTHER; note = 2'-O-methyladenosine-3'-phosphate
  modified_base 16: mod_base = OTHER; note = 2'-O-methylguanosine-3'-phosphate
  modified_base 17: mod_base = OTHER; note = 2'-O-methyladenosine-3'-phosphate
  modified_base 18: mod_base = OTHER; note = 2'-O-methylguanosine-3'-phosphate
  modified_base 19: mod_base = OTHER; note = 2'-O-methylguanosine-3'-phosphate
  modified_base 20: mod_base = OTHER; note = 2'-O-methylcytidine-3'-phosphate
  modified_base 21: mod_base = OTHER; note = 2'-O-methyladenosine-3'-phosphorothioate
  modified_base 22: mod_base = OTHER; note = 2'-O-methyluridine-3'-phosphorothioate
  modified_base 23: mod_base = OTHER; note = 2'-O-methyladenosine-3'-phosphate
  misc_feature 1: note = RNA
  misc_feature 2: note = DNA
  misc_feature 3..4: note = RNA
  misc_feature 5: note = DNA
  misc_feature 6: note = RNA
  misc_feature 7: note = DNA
  misc_feature 8..11: note = RNA
  misc_feature 12: note = DNA
  misc_feature 13..23: note = RNA
accttgtccaggtcagaggcata

SEQ ID NO: 2447 - DNA, 23 bp, synthetic construct
  source 1..23: mol_type = other DNA
  modified_base 1: mod_base = OTHER; note = 2'-O-methyladenosine-3'-phosphorothioate
  modified_base 2: mod_base = OTHER; note = 2'-deoxyadenosine-3'-phosphorothioate
  modified_base 3: mod_base = OTHER; note = 2'-O-methyladenosine-3'-phosphate
  modified_base 4: mod_base = OTHER; note = 2'-O-methyladenosine-3'-phosphate
  modified_base 6: mod_base = OTHER; note = 2'-O-methyluridine-3'-phosphate
  modified_base 8: mod_base = OTHER; note = 2'-O-methyladenosine-3'-phosphate
  modified_base 9: mod_base = OTHER; note = 2'-O-methylguanosine-3'-phosphate
  modified_base 10: mod_base = OTHER; note = 2'-O-methyladenosine-3'-phosphate
  modified_base 11: mod_base = OTHER; note = 2'-O-methylcytidine-3'-phosphate
  modified_base 13: mod_base = OTHER; note = 2'-O-methylcytidine-3'-phosphate
  modified_base 14: mod_base = OTHER; note = 2'-fluorouridine-3'-phosphate
  modified_base 15: mod_base = OTHER; note = 2'-O-methylcytidine-3'-phosphate
  modified_base 16: mod_base = OTHER; note = 2'-O-methylcytidine-3'-phosphate
  modified_base 17: mod_base = OTHER; note = 2'-O-methyladenosine-3'-phosphate
  modified_base 18: mod_base = OTHER; note = 2'-O-methylcytidine-3'-phosphate
  modified_base 19: mod_base = OTHER; note = 2'-O-methylcytidine-3'-phosphate
  modified_base 20: mod_base = OTHER; note = 2'-O-methyluridine-3'-phosphate
  modified_base 21: mod_base = OTHER; note = 2'-O-methyluridine-3'-phosphorothioate
  modified_base 22: mod_base = OTHER; note = 2'-O-methylguanosine-3'-phosphorothioate
  modified_base 23: mod_base = OTHER; note = 2'-O-methyluridine-3'-phosphate
  misc_feature 1: note = RNA
  misc_feature 2: note = DNA
  misc_feature 3..4: note = RNA
  misc_feature 5: note = DNA
  misc_feature 6: note = RNA
  misc_feature 7: note = DNA
  misc_feature 8..11: note = RNA
  misc_feature 12: note = DNA
  misc_feature 13..23: note = RNA
aaaagtgagaccctccaccttgt

SEQ ID NO: 2448 - DNA, 23 bp, synthetic construct
  source 1..23: mol_type = other DNA
  modified_base 1: mod_base = OTHER; note = 2'-O-methyladenosine-3'-phosphorothioate
  modified_base 2: mod_base = OTHER; note = 2'-deoxyguanosine-3'-phosphorothioate
  modified_base 3: mod_base = OTHER; note = 2'-O-methyladenosine-3'-phosphate
  modified_base 4: mod_base = OTHER; note = 2'-O-methyladenosine-3'-phosphate
  modified_base 6: mod_base = OTHER; note = 2'-O-methylguanosine-3'-phosphate
  modified_base 8: mod_base = OTHER; note = 2'-O-methylguanosine-3'-phosphate
  modified_base 9: mod_base = OTHER; note = 2'-O-methyladenosine-3'-phosphate
  modified_base 10: mod_base = OTHER; note = 2'-O-methylguanosine-3'-phosphate
  modified_base 11: mod_base = OTHER; note = 2'-O-methyladenosine-3'-phosphate
  modified_base 13: mod_base = OTHER; note = 2'-O-methylcytidine-3'-phosphate
  modified_base 14: mod_base = OTHER; note = 2'-fluorocytidine-3'-phosphate
  modified_base 15: mod_base = OTHER; note = 2'-O-methyluridine-3'-phosphate
  modified_base 16: mod_base = OTHER; note = 2'-O-methylcytidine-3'-phosphate
  modified_base 17: mod_base = OTHER; note = 2'-O-methylcytidine-3'-phosphate
  modified_base 18: mod_base = OTHER; note = 2'-O-methyladenosine-3'-phosphate
  modified_base 19: mod_base = OTHER; note = 2'-O-methylcytidine-3'-phosphate
  modified_base 20: mod_base = OTHER; note = 2'-O-methylcytidine-3'-phosphate
  modified_base 21: mod_base = OTHER; note = 2'-O-methyluridine-3'-phosphorothioate
  modified_base 22: mod_base = OTHER; note = 2'-O-methyluridine-3'-phosphorothioate
  modified_base 23: mod_base = OTHER; note = 2'-O-methylguanosine-3'-phosphate
  misc_feature 1: note = RNA
  misc_feature 2: note = DNA
  misc_feature 3..4: note = RNA
  misc_feature 5: note = DNA
  misc_feature 6: note = RNA
  misc_feature 7: note = DNA
  misc_feature 8..11: note = RNA
  misc_feature 12: note = DNA
  misc_feature 13..23: note = RNA
agaaagtgagaccctccaccttg

SEQ ID NO: 2449 - DNA, 23 bp, synthetic construct
  source 1..23: mol_type = other DNA
  modified_base 1: mod_base = OTHER; note = 2'-O-methyladenosine-3'-phosphorothioate
  modified_base 2: mod_base = OTHER; note = 2'-deoxyguanosine-3'-phosphorothioate
  modified_base 3: mod_base = OTHER; note = 2'-O-methylguanosine-3'-phosphate
  modified_base 4: mod_base = OTHER; note = 2'-O-methyladenosine-3'-phosphate
  modified_base 6: mod_base = OTHER; note = 2'-O-methyladenosine-3'-phosphate
  modified_base 8: mod_base = OTHER; note = 2'-O-methyluridine-3'-phosphate
  modified_base 9: mod_base = OTHER; note = 2'-O-methylguanosine-3'-phosphate
  modified_base 10: mod_base = OTHER; note = 2'-O-methyladenosine-3'-phosphate
  modified_base 11: mod_base = OTHER; note = 2'-O-methylguanosine-3'-phosphate
  modified_base 13: mod_base = OTHER; note = 2'-O-methylcytidine-3'-phosphate
  modified_base 14: mod_base = OTHER; note = 2'-fluorocytidine-3'-phosphate
  modified_base 15: mod_base = OTHER; note = 2'-O-methylcytidine-3'-phosphate
  modified_base 16: mod_base = OTHER; note = 2'-O-methyluridine-3'-phosphate
  modified_base 17: mod_base = OTHER; note = 2'-O-methylcytidine-3'-phosphate
  modified_base 18: mod_base = OTHER; note = 2'-O-methylcytidine-3'-phosphate
  modified_base 19: mod_base = OTHER; note = 2'-O-methyladenosine-3'-phosphate
  modified_base 20: mod_base = OTHER; note = 2'-O-methylcytidine-3'-phosphate
  modified_base 21: mod_base = OTHER; note = 2'-O-methylcytidine-3'-phosphorothioate
  modified_base 22: mod_base = OTHER; note = 2'-O-methyluridine-3'-phosphorothioate
  modified_base 23: mod_base = OTHER; note = 2'-O-methyluridine-3'-phosphate
  misc_feature 1: note = RNA
  misc_feature 2: note = DNA
  misc_feature 3..4: note = RNA
  misc_feature 5: note = DNA
  misc_feature 6: note = RNA
  misc_feature 7: note = DNA
  misc_feature 8..11: note = RNA
  misc_feature 12: note = DNA
  misc_feature 13..23: note = RNA
aggaaagtgagaccctccacctt

SEQ ID NO: 2450 - DNA, 23 bp, synthetic construct
  source 1..23: mol_type = other DNA
  modified_base 1: mod_base = OTHER; note = 2'-O-methyladenosine-3'-phosphorothioate
  modified_base 2: mod_base = OTHER; note = 2'-deoxythimidine-3'-phosphorothioate
  modified_base 3: mod_base = OTHER; note = 2'-O-methylguanosine-3'-phosphate
  modified_base 4: mod_base = OTHER; note = 2'-O-methylguanosine-3'-phosphate
  modified_base 6: mod_base = OTHER; note = 2'-O-methyladenosine-3'-phosphate
  modified_base 8: mod_base = OTHER; note = 2'-O-methylguanosine-3'-phosphate
  modified_base 9: mod_base = OTHER; note = 2'-O-methyluridine-3'-phosphate
  modified_base 10: mod_base = OTHER; note = 2'-O-methylguanosine-3'-phosphate
  modified_base 11: mod_base = OTHER; note = 2'-O-methyladenosine-3'-phosphate
  modified_base 13: mod_base = OTHER; note = 2'-O-methyladenosine-3'-phosphate
  modified_base 14: mod_base = OTHER; note = 2'-fluorocytidine-3'-phosphate
  modified_base 15: mod_base = OTHER; note = 2'-O-methylcytidine-3'-phosphate
  modified_base 16: mod_base = OTHER; note = 2'-O-methylcytidine-3'-phosphate
  modified_base 17: mod_base = OTHER; note = 2'-O-methyluridine-3'-phosphate
  modified_base 18: mod_base = OTHER; note = 2'-O-methylcytidine-3'-phosphate
  modified_base 19: mod_base = OTHER; note = 2'-O-methylcytidine-3'-phosphate
  modified_base 20: mod_base = OTHER; note = 2'-O-methyladenosine-3'-phosphate
  modified_base 21: mod_base = OTHER; note = 2'-O-methylcytidine-3'-phosphorothioate
  modified_base 22: mod_base = OTHER; note = 2'-O-methylcytidine-3'-phosphorothioate
  modified_base 23: mod_base = OTHER; note = 2'-O-methyluridine-3'-phosphate
  misc_feature 1: note = RNA
  misc_feature 2: note = DNA
  misc_feature 3..4: note = RNA
  misc_feature 5: note = DNA
  misc_feature 6: note = RNA
  misc_feature 7: note = DNA
  misc_feature 8..11: note = RNA
  misc_feature 12: note = DNA
  misc_feature 13..23: note = RNA
atggaaagtgagaccctccacct

SEQ ID NO: 2451 - DNA, 23 bp, synthetic construct
  source 1..23: mol_type = other DNA
  modified_base 1: mod_base = OTHER; note = 2'-O-methyladenosine-3'-phosphorothioate
  modified_base 2: mod_base = OTHER; note = 2'-deoxythimidine-3'-phosphorothioate
  modified_base 3: mod_base = OTHER; note = 2'-O-methylguanosine-3'-phosphate
  modified_base 4: mod_base = OTHER; note = 2'-O-methylcytidine-3'-phosphate
  modified_base 6: mod_base = OTHER; note = 2'-O-methylguanosine-3'-phosphate
  modified_base 8: mod_base = OTHER; note = 2'-O-methyladenosine-3'-phosphate
  modified_base 9: mod_base = OTHER; note = 2'-O-methyladenosine-3'-phosphate
  modified_base 10: mod_base = OTHER; note = 2'-O-methyladenosine-3'-phosphate
  modified_base 11: mod_base = OTHER; note = 2'-O-methylguanosine-3'-phosphate
  modified_base 13: mod_base = OTHER; note = 2'-O-methylguanosine-3'-phosphate
  modified_base 14: mod_base = OTHER; note = 2'-fluoroadenosine-3'-phosphate
  modified_base 15: mod_base = OTHER; note = 2'-O-methylguanosine-3'-phosphate
  modified_base 16: mod_base = OTHER; note = 2'-O-methyladenosine-3'-phosphate
  modified_base 17: mod_base = OTHER; note = 2'-O-methylcytidine-3'-phosphate
  modified_base 18: mod_base = OTHER; note = 2'-O-methylcytidine-3'-phosphate
  modified_base 19: mod_base = OTHER; note = 2'-O-methylcytidine-3'-phosphate
  modified_base 20: mod_base = OTHER; note = 2'-O-methyluridine-3'-phosphate
  modified_base 21: mod_base = OTHER; note = 2'-O-methylcytidine-3'-phosphorothioate
  modified_base 22: mod_base = OTHER; note = 2'-O-methylcytidine-3'-phosphorothioate
  modified_base 23: mod_base = OTHER; note = 2'-O-methyladenosine-3'-phosphate
  misc_feature 1: note = RNA
  misc_feature 2: note = DNA
  misc_feature 3..4: note = RNA
  misc_feature 5: note = DNA
  misc_feature 6: note = RNA
  misc_feature 7: note = DNA
  misc_feature 8..11: note = RNA
  misc_feature 12: note = DNA
  misc_feature 13..23: note = RNA
atgctggaaagtgagaccctcca

SEQ ID NO: 2452 - DNA, 23 bp, synthetic construct
  source 1..23: mol_type = other DNA
  modified_base 1: mod_base = OTHER; note = 2'-O-methyladenosine-3'-phosphorothioate
  modified_base 2: mod_base = OTHER; note = 2'-deoxythimidine-3'-phosphorothioate
  modified_base 3: mod_base = OTHER; note = 2'-O-methyluridine-3'-phosphate
  modified_base 4: mod_base = OTHER; note = 2'-O-methylguanosine-3'-phosphate
  modified_base 6: mod_base = OTHER; note = 2'-O-methyluridine-3'-phosphate
  modified_base 8: mod_base = OTHER; note = 2'-O-methylguanosine-3'-phosphate
  modified_base 9: mod_base = OTHER; note = 2'-O-methyladenosine-3'-phosphate
  modified_base 10: mod_base = OTHER; note = 2'-O-methyladenosine-3'-phosphate
  modified_base 11: mod_base = OTHER; note = 2'-O-methyladenosine-3'-phosphate
  modified_base 13: mod_base = OTHER; note = 2'-O-methyluridine-3'-phosphate
  modified_base 14: mod_base = OTHER; note = 2'-fluoroguanosine-3'-phosphate
  modified_base 15: mod_base = OTHER; note = 2'-O-methyladenosine-3'-phosphate
  modified_base 16: mod_base = OTHER; note = 2'-O-methylguanosine-3'-phosphate
  modified_base 17: mod_base = OTHER; note = 2'-O-methyladenosine-3'-phosphate
  modified_base 18: mod_base = OTHER; note = 2'-O-methylcytidine-3'-phosphate
  modified_base 19: mod_base = OTHER; note = 2'-O-methylcytidine-3'-phosphate
  modified_base 20: mod_base = OTHER; note = 2'-O-methylcytidine-3'-phosphate
  modified_base 21: mod_base = OTHER; note = 2'-O-methyluridine-3'-phosphorothioate
  modified_base 22: mod_base = OTHER; note = 2'-O-methylcytidine-3'-phosphorothioate
  modified_base 23: mod_base = OTHER; note = 2'-O-methylcytidine-3'-phosphate
  misc_feature 1: note = RNA
  misc_feature 2: note = DNA
  misc_feature 3..4: note = RNA
  misc_feature 5: note = DNA
  misc_feature 6: note = RNA
  misc_feature 7: note = DNA
  misc_feature 8..11: note = RNA
  misc_feature 12: note = DNA
  misc_feature 13..23: note = RNA
attgctggaaagtgagaccctcc

SEQ ID NO: 2453 - DNA, 23 bp, synthetic construct
  source 1..23: mol_type = other DNA
  modified_base 1: mod_base = OTHER; note = 2'-O-methyladenosine-3'-phosphorothioate
  modified_base 2: mod_base = OTHER; note = 2'-deoxythimidine-3'-phosphorothioate
  modified_base 3: mod_base = OTHER; note = 2'-O-methyluridine-3'-phosphate
  modified_base 4: mod_base = OTHER; note = 2'-O-methyluridine-3'-phosphate
  modified_base 6: mod_base = OTHER; note = 2'-O-methylcytidine-3'-phosphate
  modified_base 8: mod_base = OTHER; note = 2'-O-methylguanosine-3'-phosphate
  modified_base 9: mod_base = OTHER; note = 2'-O-methylguanosine-3'-phosphate
  modified_base 10: mod_base = OTHER; note = 2'-O-methyladenosine-3'-phosphate
  modified_base 11: mod_base = OTHER; note = 2'-O-methyladenosine-3'-phosphate
  modified_base 13: mod_base = OTHER; note = 2'-O-methylguanosine-3'-phosphate
  modified_base 14: mod_base = OTHER; note = 2'-fluorouridine-3'-phosphate
  modified_base 15: mod_base = OTHER; note = 2'-O-methylguanosine-3'-phosphate
  modified_base 16: mod_base = OTHER; note = 2'-O-methyladenosine-3'-phosphate
  modified_base 17: mod_base = OTHER; note = 2'-O-methylguanosine-3'-phosphate
  modified_base 18: mod_base = OTHER; note = 2'-O-methyladenosine-3'-phosphate
  modified_base 19: mod_base = OTHER; note = 2'-O-methylcytidine-3'-phosphate
  modified_base 20: mod_base = OTHER; note = 2'-O-methylcytidine-3'-phosphate
  modified_base 21: mod_base = OTHER; note = 2'-O-methylcytidine-3'-phosphorothioate
  modified_base 22: mod_base = OTHER; note = 2'-O-methyluridine-3'-phosphorothioate
  modified_base 23: mod_base = OTHER; note = 2'-O-methylcytidine-3'-phosphate
  misc_feature 1: note = RNA
  misc_feature 2: note = DNA
  misc_feature 3..4: note = RNA
  misc_feature 5: note = DNA
  misc_feature 6: note = RNA
  misc_feature 7: note = DNA
  misc_feature 8..11: note = RNA
  misc_feature 12: note = DNA
  misc_feature 13..23: note = RNA
atttgctggaaagtgagaccctc

SEQ ID NO: 2454 - DNA, 23 bp, synthetic construct
  source 1..23: mol_type = other DNA
  modified_base 1: mod_base = OTHER; note = 2'-O-methyladenosine-3'-phosphorothioate
  modified_base 2: mod_base = OTHER; note = 2'-deoxythimidine-3'-phosphorothioate
  modified_base 3: mod_base = OTHER; note = 2'-O-methyluridine-3'-phosphate
  modified_base 4: mod_base = OTHER; note = 2'-O-methyluridine-3'-phosphate
  modified_base 6: mod_base = OTHER; note = 2'-O-methylguanosine-3'-phosphate
  modified_base 8: mod_base = OTHER; note = 2'-O-methyluridine-3'-phosphate
  modified_base 9: mod_base = OTHER; note = 2'-O-methylguanosine-3'-phosphate
  modified_base 10: mod_base = OTHER; note = 2'-O-methylguanosine-3'-phosphate
  modified_base 11: mod_base = OTHER; note = 2'-O-methyladenosine-3'-phosphate
  modified_base 13: mod_base = OTHER; note = 2'-O-methyladenosine-3'-phosphate
  modified_base 14: mod_base = OTHER; note = 2'-fluoroguanosine-3'-phosphate
  modified_base 15: mod_base = OTHER; note = 2'-O-methyluridine-3'-phosphate
  modified_base 16: mod_base = OTHER; note = 2'-O-methylguanosine-3'-phosphate
  modified_base 17: mod_base = OTHER; note = 2'-O-methyladenosine-3'-phosphate
  modified_base 18: mod_base = OTHER; note = 2'-O-methylguanosine-3'-phosphate
  modified_base 19: mod_base = OTHER; note = 2'-O-methyladenosine-3'-phosphate
  modified_base 20: mod_base = OTHER; note = 2'-O-methylcytidine-3'-phosphate
  modified_base 21: mod_base = OTHER; note = 2'-O-methylcytidine-3'-phosphorothioate
  modified_base 22: mod_base = OTHER; note = 2'-O-methylcytidine-3'-phosphorothioate
  modified_base 23: mod_base = OTHER; note = 2'-O-methyluridine-3'-phosphate
  misc_feature 1: note = RNA
  misc_feature 2: note = DNA
  misc_feature 3..4: note = RNA
  misc_feature 5: note = DNA
  misc_feature 6: note = RNA
  misc_feature 7: note = DNA
  misc_feature 8..11: note = RNA
  misc_feature 12: note = DNA
  misc_feature 13..23: note = RNA
attttgctggaaagtgagaccct

SEQ ID NO: 2455 - DNA, 23 bp, synthetic construct
  source 1..23: mol_type = other DNA
  modified_base 1: mod_base = OTHER; note = 2'-O-methyladenosine-3'-phosphorothioate
  modified_base 2: mod_base = OTHER; note = 2'-deoxyguanosine-3'-phosphorothioate
  modified_base 3: mod_base = OTHER; note = 2'-O-methyluridine-3'-phosphate
  modified_base 4: mod_base = OTHER; note = 2'-O-methyluridine-3'-phosphate
  modified_base 6: mod_base = OTHER; note = 2'-O-methyluridine-3'-phosphate
  modified_base 8: mod_base = OTHER; note = 2'-O-methylcytidine-3'-phosphate
  modified_base 9: mod_base = OTHER; note = 2'-O-methyluridine-3'-phosphate
  modified_base 10: mod_base = OTHER; note = 2'-O-methylguanosine-3'-phosphate
  modified_base 11: mod_base = OTHER; note = 2'-O-methylguanosine-3'-phosphate
  modified_base 13: mod_base = OTHER; note = 2'-O-methyladenosine-3'-phosphate
  modified_base 14: mod_base = OTHER; note = 2'-fluoroadenosine-3'-phosphate
  modified_base 15: mod_base = OTHER; note = 2'-O-methylguanosine-3'-phosphate
  modified_base 16: mod_base = OTHER; note = 2'-O-methyluridine-3'-phosphate
  modified_base 17: mod_base = OTHER; note = 2'-O-methylguanosine-3'-phosphate
  modified_base 18: mod_base = OTHER; note = 2'-O-methyladenosine-3'-phosphate
  modified_base 19: mod_base = OTHER; note = 2'-O-methylguanosine-3'-phosphate
  modified_base 20: mod_base = OTHER; note = 2'-O-methyladenosine-3'-phosphate
  modified_base 21: mod_base = OTHER; note = 2'-O-methylcytidine-3'-phosphorothioate
  modified_base 22: mod_base = OTHER; note = 2'-O-methylcytidine-3'-phosphorothioate
  modified_base 23: mod_base = OTHER; note = 2'-O-methylcytidine-3'-phosphate
  misc_feature 1: note = RNA
  misc_feature 2: note = DNA
  misc_feature 3..4: note = RNA
  misc_feature 5: note = DNA
  misc_feature 6: note = RNA
  misc_feature 7: note = DNA
  misc_feature 8..11: note = RNA
  misc_feature 12: note = DNA
  misc_feature 13..23: note = RNA
agttttgctggaaagtgagaccc

SEQ ID NO: 2456 - DNA, 23 bp, synthetic construct
  source 1..23: mol_type = other DNA
  modified_base 1: mod_base = OTHER; note = 2'-O-methyladenosine-3'-phosphorothioate
  modified_base 2: mod_base = OTHER; note = 2'-deoxyadenosine-3'-phosphorothioate
  modified_base 3: mod_base = OTHER; note = 2'-O-methylguanosine-3'-phosphate
  modified_base 4: mod_base = OTHER; note = 2'-O-methyluridine-3'-phosphate
  modified_base 6: mod_base = OTHER; note = 2'-O-methyluridine-3'-phosphate
  modified_base 8: mod_base = OTHER; note = 2'-O-methylguanosine-3'-phosphate
  modified_base 9: mod_base = OTHER; note = 2'-O-methylcytidine-3'-phosphate
  modified_base 10: mod_base = OTHER; note = 2'-O-methyluridine-3'-phosphate
  modified_base 11: mod_base = OTHER; note = 2'-O-methylguanosine-3'-phosphate
  modified_base 13: mod_base = OTHER; note = 2'-O-methyladenosine-3'-phosphate
  modified_base 14: mod_base = OTHER; note = 2'-fluoroadenosine-3'-phosphate
  modified_base 15: mod_base = OTHER; note = 2'-O-methyladenosine-3'-phosphate
  modified_base 16: mod_base = OTHER; note = 2'-O-methylguanosine-3'-phosphate
  modified_base 17: mod_base = OTHER; note = 2'-O-methyluridine-3'-phosphate
  modified_base 18: mod_base = OTHER; note = 2'-O-methylguanosine-3'-phosphate
  modified_base 19: mod_base = OTHER; note = 2'-O-methyladenosine-3'-phosphate
  modified_base 20: mod_base = OTHER; note = 2'-O-methylguanosine-3'-phosphate
  modified_base 21: mod_base = OTHER; note = 2'-O-methyladenosine-3'-phosphorothioate
  modified_base 22: mod_base = OTHER; note = 2'-O-methylcytidine-3'-phosphorothioate
  modified_base 23: mod_base = OTHER; note = 2'-O-methylcytidine-3'-phosphate
  misc_feature 1: note = RNA
  misc_feature 2: note = DNA
  misc_feature 3..4: note = RNA
  misc_feature 5: note = DNA
  misc_feature 6: note = RNA
  misc_feature 7: note = DNA
  misc_feature 8..11: note = RNA
  misc_feature 12: note = DNA
  misc_feature 13..23: note = RNA
aagttttgctggaaagtgagacc

SEQ ID NO: 2457 - DNA, 23 bp, synthetic construct
  source 1..23: mol_type = other DNA
  modified_base 1: mod_base = OTHER; note = 2'-O-methyladenosine-3'-phosphorothioate
  modified_base 2: mod_base = OTHER; note = 2'-deoxyguanosine-3'-phosphorothioate
  modified_base 3: mod_base = OTHER; note = 2'-O-methyladenosine-3'-phosphate
  modified_base 4: mod_base = OTHER; note = 2'-O-methylguanosine-3'-phosphate
  modified_base 6: mod_base = OTHER; note = 2'-O-methyluridine-3'-phosphate
  modified_base 8: mod_base = OTHER; note = 2'-O-methyluridine-3'-phosphate
  modified_base 9: mod_base = OTHER; note = 2'-O-methylguanosine-3'-phosphate
  modified_base 10: mod_base = OTHER; note = 2'-O-methylcytidine-3'-phosphate
  modified_base 11: mod_base = OTHER; note = 2'-O-methyluridine-3'-phosphate
  modified_base 13: mod_base = OTHER; note = 2'-O-methylguanosine-3'-phosphate
  modified_base 14: mod_base = OTHER; note = 2'-fluoroadenosine-3'-phosphate
  modified_base 15: mod_base = OTHER; note = 2'-O-methyladenosine-3'-phosphate
  modified_base 16: mod_base = OTHER; note = 2'-O-methyladenosine-3'-phosphate
  modified_base 17: mod_base = OTHER; note = 2'-O-methylguanosine-3'-phosphate
  modified_base 18: mod_base = OTHER; note = 2'-O-methyluridine-3'-phosphate
  modified_base 19: mod_base = OTHER; note = 2'-O-methylguanosine-3'-phosphate
  modified_base 20: mod_base = OTHER; note = 2'-O-methyladenosine-3'-phosphate
  modified_base 21: mod_base = OTHER; note = 2'-O-methylguanosine-3'-phosphorothioate
  modified_base 22: mod_base = OTHER; note = 2'-O-methyladenosine-3'-phosphorothioate
  modified_base 23: mod_base = OTHER; note = 2'-O-methylcytidine-3'-phosphate
  misc_feature 1: note = RNA
  misc_feature 2: note = DNA
  misc_feature 3..4: note = RNA
  misc_feature 5: note = DNA
  misc_feature 6: note = RNA
  misc_feature 7: note = DNA
  misc_feature 8..11: note = RNA
  misc_feature 12: note = DNA
  misc_feature 13..23: note = RNA
agagttttgctggaaagtgagac

SEQ ID NO: 2458 - DNA, 23 bp, synthetic construct
  source 1..23: mol_type = other DNA
  modified_base 1: mod_base = OTHER; note = 2'-O-methyladenosine-3'-phosphorothioate
  modified_base 2: mod_base = OTHER; note = 2'-deoxyguanosine-3'-phosphorothioate
  modified_base 3: mod_base = OTHER; note = 2'-O-methylguanosine-3'-phosphate
  modified_base 4: mod_base = OTHER; note = 2'-O-methyladenosine-3'-phosphate
  modified_base 6: mod_base = OTHER; note = 2'-O-methyluridine-3'-phosphate
  modified_base 8: mod_base = OTHER; note = 2'-O-methyluridine-3'-phosphate
  modified_base 9: mod_base = OTHER; note = 2'-O-methyluridine-3'-phosphate
  modified_base 10: mod_base = OTHER; note = 2'-O-methylguanosine-3'-phosphate
  modified_base 11: mod_base = OTHER; note = 2'-O-methylcytidine-3'-phosphate
  modified_base 13: mod_base = OTHER; note = 2'-O-methylguanosine-3'-phosphate
  modified_base 14: mod_base = OTHER; note = 2'-fluoroguanosine-3'-phosphate
  modified_base 15: mod_base = OTHER; note = 2'-O-methyladenosine-3'-phosphate
  modified_base 16: mod_base = OTHER; note = 2'-O-methyladenosine-3'-phosphate
  modified_base 17: mod_base = OTHER; note = 2'-O-methyladenosine-3'-phosphate
  modified_base 18: mod_base = OTHER; note = 2'-O-methylguanosine-3'-phosphate
  modified_base 19: mod_base = OTHER; note = 2'-O-methyluridine-3'-phosphate
  modified_base 20: mod_base = OTHER; note = 2'-O-methylguanosine-3'-phosphate
  modified_base 21: mod_base = OTHER; note = 2'-O-methyladenosine-3'-phosphorothioate
  modified_base 22: mod_base = OTHER; note = 2'-O-methylguanosine-3'-phosphorothioate
  modified_base 23: mod_base = OTHER; note = 2'-O-methyladenosine-3'-phosphate
  misc_feature 1: note = RNA
  misc_feature 2: note = DNA
  misc_feature 3..4: note = RNA
  misc_feature 5: note = DNA
  misc_feature 6: note = RNA
  misc_feature 7: note = DNA
  misc_feature 8..11: note = RNA
  misc_feature 12: note = DNA
  misc_feature 13..23: note = RNA
aggagttttgctggaaagtgaga

SEQ ID NO: 2459 - DNA, 23 bp, synthetic construct
  source 1..23: mol_type = other DNA
  modified_base 1: mod_base = OTHER; note = 2'-O-methyladenosine-3'-phosphorothioate
  modified_base 2: mod_base = OTHER; note = 2'-deoxyguanosine-3'-phosphorothioate
  modified_base 3: mod_base = OTHER; note = 2'-O-methylguanosine-3'-phosphate
  modified_base 4: mod_base = OTHER; note = 2'-O-methylguanosine-3'-phosphate
  modified_base 6: mod_base = OTHER; note = 2'-O-methylguanosine-3'-phosphate
  modified_base 8: mod_base = OTHER; note = 2'-O-methyluridine-3'-phosphate
  modified_base 9: mod_base = OTHER; note = 2'-O-methyluridine-3'-phosphate
  modified_base 10: mod_base = OTHER; note = 2'-O-methyluridine-3'-phosphate
  modified_base 11: mod_base = OTHER; note = 2'-O-methylguanosine-3'-phosphate
  modified_base 13: mod_base = OTHER; note = 2'-O-methyluridine-3'-phosphate
  modified_base 14: mod_base = OTHER; note = 2'-fluoroguanosine-3'-phosphate
  modified_base 15: mod_base = OTHER; note = 2'-O-methylguanosine-3'-phosphate
  modified_base 16: mod_base = OTHER; note = 2'-O-methyladenosine-3'-phosphate
  modified_base 17: mod_base = OTHER; note = 2'-O-methyladenosine-3'-phosphate
  modified_base 18: mod_base = OTHER; note = 2'-O-methyladenosine-3'-phosphate
  modified_base 19: mod_base = OTHER; note = 2'-O-methylguanosine-3'-phosphate
  modified_base 20: mod_base = OTHER; note = 2'-O-methyluridine-3'-phosphate
  modified_base 21: mod_base = OTHER; note = 2'-O-methylguanosine-3'-phosphorothioate
  modified_base 22: mod_base = OTHER; note = 2'-O-methyladenosine-3'-phosphorothioate
  modified_base 23: mod_base = OTHER; note = 2'-O-methylguanosine-3'-phosphate
  misc_feature 1: note = RNA
  misc_feature 2: note = DNA
  misc_feature 3..4: note = RNA
  misc_feature 5: note = DNA
  misc_feature 6: note = RNA
  misc_feature 7: note = DNA
  misc_feature 8..11: note = RNA
  misc_feature 12: note = DNA
  misc_feature 13..23: note = RNA
agggagttttgctggaaagtgag

SEQ ID NO: 2460 - DNA, 23 bp, synthetic construct
  source 1..23: mol_type = other DNA
  modified_base 1: mod_base = OTHER; note = 2'-O-methyladenosine-3'-phosphorothioate
  modified_base 2: mod_base = OTHER; note = 2'-deoxyadenosine-3'-phosphorothioate
  modified_base 3: mod_base = OTHER; note = 2'-O-methylguanosine-3'-phosphate
  modified_base 4: mod_base = OTHER; note = 2'-O-methylguanosine-3'-phosphate
  modified_base 6: mod_base = OTHER; note = 2'-O-methyladenosine-3'-phosphate
  modified_base 8: mod_base = OTHER; note = 2'-O-methyluridine-3'-phosphate
  modified_base 9: mod_base = OTHER; note = 2'-O-methyluridine-3'-phosphate
  modified_base 10: mod_base = OTHER; note = 2'-O-methyluridine-3'-phosphate
  modified_base 11: mod_base = OTHER; note = 2'-O-methyluridine-3'-phosphate
  modified_base 13: mod_base = OTHER; note = 2'-O-methylcytidine-3'-phosphate
  modified_base 14: mod_base = OTHER; note = 2'-fluorouridine-3'-phosphate
  modified_base 15: mod_base = OTHER; note = 2'-O-methylguanosine-3'-phosphate
  modified_base 16: mod_base = OTHER; note = 2'-O-methylguanosine-3'-phosphate
  modified_base 17: mod_base = OTHER; note = 2'-O-methyladenosine-3'-phosphate
  modified_base 18: mod_base = OTHER; note = 2'-O-methyladenosine-3'-phosphate
  modified_base 19: mod_base = OTHER; note = 2'-O-methyladenosine-3'-phosphate
  modified_base 20: mod_base = OTHER; note = 2'-O-methylguanosine-3'-phosphate
  modified_base 21: mod_base = OTHER; note = 2'-O-methyluridine-3'-phosphorothioate
  modified_base 22: mod_base = OTHER; note = 2'-O-methylguanosine-3'-phosphorothioate
  modified_base 23: mod_base = OTHER; note = 2'-O-methyladenosine-3'-phosphate
  misc_feature 1: note = RNA
  misc_feature 2: note = DNA
  misc_feature 3..4: note = RNA
  misc_feature 5: note = DNA
  misc_feature 6: note = RNA
  misc_feature 7: note = DNA
  misc_feature 8..11: note = RNA
  misc_feature 12: note = DNA
  misc_feature 13..23: note = RNA
aagggagttttgctggaaagtga

SEQ ID NO: 2461 - DNA, 23 bp, synthetic construct
  source 1..23: mol_type = other DNA
  modified_base 1: mod_base = OTHER; note = 2'-O-methyladenosine-3'-phosphorothioate
  modified_base 2: mod_base = OTHER; note = 2'-deoxyguanosine-3'-phosphorothioate
  modified_base 3: mod_base = OTHER; note = 2'-O-methyladenosine-3'-phosphate
  modified_base 4: mod_base = OTHER; note = 2'-O-methylguanosine-3'-phosphate
  modified_base 6: mod_base = OTHER; note = 2'-O-methylguanosine-3'-phosphate
  modified_base 8: mod_base = OTHER; note = 2'-O-methylguanosine-3'-phosphate
  modified_base 9: mod_base = OTHER; note = 2'-O-methyluridine-3'-phosphate
  modified_base 10: mod_base = OTHER; note = 2'-O-methyluridine-3'-phosphate
  modified_base 11: mod_base = OTHER; note = 2'-O-methyluridine-3'-phosphate
  modified_base 13: mod_base = OTHER; note = 2'-O-methylguanosine-3'-phosphate
  modified_base 14: mod_base = OTHER; note = 2'-fluorocytidine-3'-phosphate
  modified_base 15: mod_base = OTHER; note = 2'-O-methyluridine-3'-phosphate
  modified_base 16: mod_base = OTHER; note = 2'-O-methylguanosine-3'-phosphate
  modified_base 17: mod_base = OTHER; note = 2'-O-methylguanosine-3'-phosphate
  modified_base 18: mod_base = OTHER; note = 2'-O-methyladenosine-3'-phosphate
  modified_base 19: mod_base = OTHER; note = 2'-O-methyladenosine-3'-phosphate
  modified_base 20: mod_base = OTHER; note = 2'-O-methyladenosine-3'-phosphate
  modified_base 21: mod_base = OTHER; note = 2'-O-methylguanosine-3'-phosphorothioate
  modified_base 22: mod_base = OTHER; note = 2'-O-methyluridine-3'-phosphorothioate
  modified_base 23: mod_base = OTHER; note = 2'-O-methylguanosine-3'-phosphate
  misc_feature 1: note = RNA
  misc_feature 2: note = DNA
  misc_feature 3..4: note = RNA
  misc_feature 5: note = DNA
  misc_feature 6: note = RNA
  misc_feature 7: note = DNA
  misc_feature 8..11: note = RNA
  misc_feature 12: note = DNA
  misc_feature 13..23: note = RNA
agagggagttttgctggaaagtg

SEQ ID NO: 2462 - DNA, 23 bp, synthetic construct
  source 1..23: mol_type = other DNA
  modified_base 1: mod_base = OTHER; note = 2'-O-methyladenosine-3'-phosphorothioate
  modified_base 2: mod_base = OTHER; note = 2'-deoxythimidine-3'-phosphorothioate
  modified_base 3: mod_base = OTHER; note = 2'-O-methylguanosine-3'-phosphate
  modified_base 4: mod_base = OTHER; note = 2'-O-methyladenosine-3'-phosphate
  modified_base 6: mod_base = OTHER; note = 2'-O-methylguanosine-3'-phosphate
  modified_base 8: mod_base = OTHER; note = 2'-O-methyladenosine-3'-phosphate
  modified_base 9: mod_base = OTHER; note = 2'-O-methylguanosine-3'-phosphate
  modified_base 10: mod_base = OTHER; note = 2'-O-methyluridine-3'-phosphate
  modified_base 11: mod_base = OTHER; note = 2'-O-methyluridine-3'-phosphate
  modified_base 13: mod_base = OTHER; note = 2'-O-methyluridine-3'-phosphate
  modified_base 14: mod_base = OTHER; note = 2'-fluoroguanosine-3'-phosphate
  modified_base 15: mod_base = OTHER; note = 2'-O-methylcytidine-3'-phosphate
  modified_base 16: mod_base = OTHER; note = 2'-O-methyluridine-3'-phosphate
  modified_base 17: mod_base = OTHER; note = 2'-O-methylguanosine-3'-phosphate
  modified_base 18: mod_base = OTHER; note = 2'-O-methylguanosine-3'-phosphate
  modified_base 19: mod_base = OTHER; note = 2'-O-methyladenosine-3'-phosphate
  modified_base 20: mod_base = OTHER; note = 2'-O-methyladenosine-3'-phosphate
  modified_base 21: mod_base = OTHER; note = 2'-O-methyladenosine-3'-phosphorothioate
  modified_base 22: mod_base = OTHER; note = 2'-O-methylguanosine-3'-phosphorothioate
  modified_base 23: mod_base = OTHER; note = 2'-O-methyluridine-3'-phosphate
  misc_feature 1: note = RNA
  misc_feature 2: note = DNA
  misc_feature 3..4: note = RNA
  misc_feature 5: note = DNA
  misc_feature 6: note = RNA
  misc_feature 7: note = DNA
  misc_feature 8..11: note = RNA
  misc_feature 12: note = DNA
  misc_feature 13..23: note = RNA
atgagggagttttgctggaaagt

SEQ ID NO: 2463 - DNA, 23 bp, synthetic construct
  source 1..23: mol_type = other DNA
  modified_base 1: mod_base = OTHER; note = 2'-O-methyladenosine-3'-phosphorothioate
  modified_base 2: mod_base = OTHER; note = 2'-deoxythimidine-3'-phosphorothioate
  modified_base 3: mod_base = OTHER; note = 2'-O-methyluridine-3'-phosphate
  modified_base 4: mod_base = OTHER; note = 2'-O-methylguanosine-3'-phosphate
  modified_base 6: mod_base = OTHER; note = 2'-O-methylguanosine-3'-phosphate
  modified_base 8: mod_base = OTHER; note = 2'-O-methylguanosine-3'-phosphate
  modified_base 9: mod_base = OTHER; note = 2'-O-methyladenosine-3'-phosphate
  modified_base 10: mod_base = OTHER; note = 2'-O-methylguanosine-3'-phosphate
  modified_base 11: mod_base = OTHER; note = 2'-O-methyluridine-3'-phosphate
  modified_base 13: mod_base = OTHER; note = 2'-O-methyluridine-3'-phosphate
  modified_base 14: mod_base = OTHER; note = 2'-fluorouridine-3'-phosphate
  modified_base 15: mod_base = OTHER; note = 2'-O-methylguanosine-3'-phosphate
  modified_base 16: mod_base = OTHER; note = 2'-O-methylcytidine-3'-phosphate
  modified_base 17: mod_base = OTHER; note = 2'-O-methyluridine-3'-phosphate
  modified_base 18: mod_base = OTHER; note = 2'-O-methylguanosine-3'-phosphate
  modified_base 19: mod_base = OTHER; note = 2'-O-methylguanosine-3'-phosphate
  modified_base 20: mod_base = OTHER; note = 2'-O-methyladenosine-3'-phosphate
  modified_base 21: mod_base = OTHER; note = 2'-O-methyladenosine-3'-phosphorothioate
  modified_base 22: mod_base = OTHER; note = 2'-O-methyladenosine-3'-phosphorothioate
  modified_base 23: mod_base = OTHER; note = 2'-O-methylguanosine-3'-phosphate
  misc_feature 1: note = RNA
  misc_feature 2: note = DNA
  misc_feature 3..4: note = RNA
  misc_feature 5: note = DNA
  misc_feature 6: note = RNA
  misc_feature 7: note = DNA
  misc_feature 8..11: note = RNA
  misc_feature 12: note = DNA
  misc_feature 13..23: note = RNA
attgagggagttttgctggaaag

SEQ ID NO: 2464 - DNA, 23 bp, synthetic construct
  source 1..23: mol_type = other DNA
  modified_base 1: mod_base = OTHER; note = 2'-O-methyladenosine-3'-phosphorothioate
  modified_base 2: mod_base = OTHER; note = 2'-deoxyguanosine-3'-phosphorothioate
  modified_base 3: mod_base = OTHER; note = 2'-O-methyluridine-3'-phosphate
  modified_base 4: mod_base = OTHER; note = 2'-O-methyluridine-3'-phosphate
  modified_base 6: mod_base = OTHER; note = 2'-O-methyladenosine-3'-phosphate
  modified_base 8: mod_base = OTHER; note = 2'-O-methylguanosine-3'-phosphate
  modified_base 9: mod_base = OTHER; note = 2'-O-methylguanosine-3'-phosphate
  modified_base 10: mod_base = OTHER; note = 2'-O-methyladenosine-3'-phosphate
  modified_base 11: mod_base = OTHER; note = 2'-O-methylguanosine-3'-phosphate
  modified_base 13: mod_base = OTHER; note = 2'-O-methyluridine-3'-phosphate
  modified_base 14: mod_base = OTHER; note = 2'-fluorouridine-3'-phosphate
  modified_base 15: mod_base = OTHER; note = 2'-O-methyluridine-3'-phosphate
  modified_base 16: mod_base = OTHER; note = 2'-O-methylguanosine-3'-phosphate
  modified_base 17: mod_base = OTHER; note = 2'-O-methylcytidine-3'-phosphate
  modified_base 18: mod_base = OTHER; note = 2'-O-methyluridine-3'-phosphate
  modified_base 19: mod_base = OTHER; note = 2'-O-methylguanosine-3'-phosphate
  modified_base 20: mod_base = OTHER; note = 2'-O-methylguanosine-3'-phosphate
  modified_base 21: mod_base = OTHER; note = 2'-O-methyladenosine-3'-phosphorothioate
  modified_base 22: mod_base = OTHER; note = 2'-O-methyladenosine-3'-phosphorothioate
  modified_base 23: mod_base = OTHER; note = 2'-O-methyladenosine-3'-phosphate
  misc_feature 1: note = RNA
  misc_feature 2: note = DNA
  misc_feature 3..4: note = RNA
  misc_feature 5: note = DNA
  misc_feature 6: note = RNA
  misc_feature 7: note = DNA
  misc_feature 8..11: note = RNA
  misc_feature 12: note = DNA
  misc_feature 13..23: note = RNA
agttgagggagttttgctggaaa

SEQ ID NO: 2465 - DNA, 23 bp, synthetic construct
  source 1..23: mol_type = other DNA
  modified_base 1: mod_base = OTHER; note = 2'-O-methyladenosine-3'-phosphorothioate
  modified_base 2: mod_base = OTHER; note = 2'-deoxyadenosine-3'-phosphorothioate
  modified_base 3: mod_base = OTHER; note = 2'-O-methylguanosine-3'-phosphate
  modified_base 4: mod_base = OTHER; note = 2'-O-methyluridine-3'-phosphate
  modified_base 6: mod_base = OTHER; note = 2'-O-methylguanosine-3'-phosphate
  modified_base 8: mod_base = OTHER; note = 2'-O-methylguanosine-3'-phosphate
  modified_base 9: mod_base = OTHER; note = 2'-O-methylguanosine-3'-phosphate
  modified_base 10: mod_base = OTHER; note = 2'-O-methylguanosine-3'-phosphate
  modified_base 11: mod_base = OTHER; note = 2'-O-methyladenosine-3'-phosphate
  modified_base 13: mod_base = OTHER; note = 2'-O-methyluridine-3'-phosphate
  modified_base 14: mod_base = OTHER; note = 2'-fluorouridine-3'-phosphate
  modified_base 15: mod_base = OTHER; note = 2'-O-methyluridine-3'-phosphate
  modified_base 16: mod_base = OTHER; note = 2'-O-methyluridine-3'-phosphate
  modified_base 17: mod_base = OTHER; note = 2'-O-methylguanosine-3'-phosphate
  modified_base 18: mod_base = OTHER; note = 2'-O-methylcytidine-3'-phosphate
  modified_base 19: mod_base = OTHER; note = 2'-O-methyluridine-3'-phosphate
  modified_base 20: mod_base = OTHER; note = 2'-O-methylguanosine-3'-phosphate
  modified_base 21: mod_base = OTHER; note = 2'-O-methylguanosine-3'-phosphorothioate
  modified_base 22: mod_base = OTHER; note = 2'-O-methyladenosine-3'-phosphorothioate
  modified_base 23: mod_base = OTHER; note = 2'-O-methyladenosine-3'-phosphate
  misc_feature 1: note = RNA
  misc_feature 2: note = DNA
  misc_feature 3..4: note = RNA
  misc_feature 5: note = DNA
  misc_feature 6: note = RNA
  misc_feature 7: note = DNA
  misc_feature 8..11: note = RNA
  misc_feature 12: note = DNA
  misc_feature 13..23: note = RNA
aagttgagggagttttgctggaa

SEQ ID NO: 2466 - DNA, 23 bp, synthetic construct
  source 1..23: mol_type = other DNA
  modified_base 1: mod_base = OTHER; note = 2'-O-methyladenosine-3'-phosphorothioate
  modified_base 2: mod_base = OTHER; note = 2'-deoxycytidine-3'-phosphorothioate
  modified_base 3: mod_base = OTHER; note = 2'-O-methyladenosine-3'-phosphate
  modified_base 4: mod_base = OTHER; note = 2'-O-methylguanosine-3'-phosphate
  modified_base 6: mod_base = OTHER; note = 2'-O-methyluridine-3'-phosphate
  modified_base 8: mod_base = OTHER; note = 2'-O-methyladenosine-3'-phosphate
  modified_base 9: mod_base = OTHER; note = 2'-O-methylguanosine-3'-phosphate
  modified_base 10: mod_base = OTHER; note = 2'-O-methylguanosine-3'-phosphate
  modified_base 11: mod_base = OTHER; note = 2'-O-methylguanosine-3'-phosphate
  modified_base 13: mod_base = OTHER; note = 2'-O-methylguanosine-3'-phosphate
  modified_base 14: mod_base = OTHER; note = 2'-fluorouridine-3'-phosphate
  modified_base 15: mod_base = OTHER; note = 2'-O-methyluridine-3'-phosphate
  modified_base 16: mod_base = OTHER; note = 2'-O-methyluridine-3'-phosphate
  modified_base 17: mod_base = OTHER; note = 2'-O-methyluridine-3'-phosphate
  modified_base 18: mod_base = OTHER; note = 2'-O-methylguanosine-3'-phosphate
  modified_base 19: mod_base = OTHER; note = 2'-O-methylcytidine-3'-phosphate
  modified_base 20: mod_base = OTHER; note = 2'-O-methyluridine-3'-phosphate
  modified_base 21: mod_base = OTHER; note = 2'-O-methylguanosine-3'-phosphorothioate
  modified_base 22: mod_base = OTHER; note = 2'-O-methylguanosine-3'-phosphorothioate
  modified_base 23: mod_base = OTHER; note = 2'-O-methyladenosine-3'-phosphate
  misc_feature 1: note = RNA
  misc_feature 2: note = DNA
  misc_feature 3..4: note = RNA
  misc_feature 5: note = DNA
  misc_feature 6: note = RNA
  misc_feature 7: note = DNA
  misc_feature 8..11: note = RNA
  misc_feature 12: note = DNA
  misc_feature 13..23: note = RNA
acagttgagggagttttgctgga

SEQ ID NO: 2467 - DNA, 23 bp, synthetic construct
  source 1..23: mol_type = other DNA
  modified_base 1: mod_base = OTHER; note = 2'-O-methyladenosine-3'-phosphorothioate
  modified_base 2: mod_base = OTHER; note = 2'-deoxycytidine-3'-phosphorothioate
  modified_base 3: mod_base = OTHER; note = 2'-O-methylcytidine-3'-phosphate
  modified_base 4: mod_base = OTHER; note = 2'-O-methyladenosine-3'-phosphate
  modified_base 6: mod_base = OTHER; note = 2'-O-methyluridine-3'-phosphate
  modified_base 8: mod_base = OTHER; note = 2'-O-methylguanosine-3'-phosphate
  modified_base 9: mod_base = OTHER; note = 2'-O-methyladenosine-3'-phosphate
  modified_base 10: mod_base = OTHER; note = 2'-O-methylguanosine-3'-phosphate
  modified_base 11: mod_base = OTHER; note = 2'-O-methylguanosine-3'-phosphate
  modified_base 13: mod_base = OTHER; note = 2'-O-methyladenosine-3'-phosphate
  modified_base 14: mod_base = OTHER; note = 2'-fluoroguanosine-3'-phosphate
  modified_base 15: mod_base = OTHER; note = 2'-O-methyluridine-3'-phosphate
  modified_base 16: mod_base = OTHER; note = 2'-O-methyluridine-3'-phosphate
  modified_base 17: mod_base = OTHER; note = 2'-O-methyluridine-3'-phosphate
  modified_base 18: mod_base = OTHER; note = 2'-O-methyluridine-3'-phosphate
  modified_base 19: mod_base = OTHER; note = 2'-O-methylguanosine-3'-phosphate
  modified_base 20: mod_base = OTHER; note = 2'-O-methylcytidine-3'-phosphate
  modified_base 21: mod_base = OTHER; note = 2'-O-methyluridine-3'-phosphorothioate
  modified_base 22: mod_base = OTHER; note = 2'-O-methylguanosine-3'-phosphorothioate
  modified_base 23: mod_base = OTHER; note = 2'-O-methylguanosine-3'-phosphate
  misc_feature 1: note = RNA
  misc_feature 2: note = DNA
  misc_feature 3..4: note = RNA
  misc_feature 5: note = DNA
  misc_feature 6: note = RNA
  misc_feature 7: note = DNA
  misc_feature 8..11: note = RNA
  misc_feature 12: note = DNA
  misc_feature 13..23: note = RNA
accagttgagggagttttgctgg

SEQ ID NO: 2468 - DNA, 23 bp, synthetic construct
  source 1..23: mol_type = other DNA
  modified_base 1: mod_base = OTHER; note = 2'-O-methyladenosine-3'-phosphorothioate
  modified_base 2: mod_base = OTHER; note = 2'-deoxythimidine-3'-phosphorothioate
  modified_base 3: mod_base = OTHER; note = 2'-O-methylcytidine-3'-phosphate
  modified_base 4: mod_base = OTHER; note = 2'-O-methylcytidine-3'-phosphate
  modified_base 6: mod_base = OTHER; note = 2'-O-methylguanosine-3'-phosphate
  modified_base 8: mod_base = OTHER; note = 2'-O-methyluridine-3'-phosphate
  modified_base 9: mod_base = OTHER; note = 2'-O-methylguanosine-3'-phosphate
  modified_base 10: mod_base = OTHER; note = 2'-O-methyladenosine-3'-phosphate
  modified_base 11: mod_base = OTHER; note = 2'-O-methylguanosine-3'-phosphate
  modified_base 13: mod_base = OTHER; note = 2'-O-methylguanosine-3'-phosphate
  modified_base 14: mod_base = OTHER; note = 2'-fluoroadenosine-3'-phosphate
  modified_base 15: mod_base = OTHER; note = 2'-O-methylguanosine-3'-phosphate
  modified_base 16: mod_base = OTHER; note = 2'-O-methyluridine-3'-phosphate
  modified_base 17: mod_base = OTHER; note = 2'-O-methyluridine-3'-phosphate
  modified_base 18: mod_base = OTHER; note = 2'-O-methyluridine-3'-phosphate
  modified_base 19: mod_base = OTHER; note = 2'-O-methyluridine-3'-phosphate
  modified_base 20: mod_base = OTHER; note = 2'-O-methylguanosine-3'-phosphate
  modified_base 21: mod_base = OTHER; note = 2'-O-methylcytidine-3'-phosphorothioate
  modified_base 22: mod_base = OTHER; note = 2'-O-methyluridine-3'-phosphorothioate
  modified_base 23: mod_base = OTHER; note = 2'-O-methylguanosine-3'-phosphate
  misc_feature 1: note = RNA
  misc_feature 2: note = DNA
  misc_feature 3..4: note = RNA
  misc_feature 5: note = DNA
  misc_feature 6: note = RNA
  misc_feature 7: note = DNA
  misc_feature 8..11: note = RNA
  misc_feature 12: note = DNA
  misc_feature 13..23: note = RNA
atccagttgagggagttttgctg

SEQ ID NO: 2469 - DNA, 23 bp, synthetic construct
  source 1..23: mol_type = other DNA
  modified_base 1: mod_base = OTHER; note = 2'-O-methyladenosine-3'-phosphorothioate
  modified_base 2: mod_base = OTHER; note = 2'-deoxyadenosine-3'-phosphorothioate
  modified_base 3: mod_base = OTHER; note = 2'-O-methyluridine-3'-phosphate
  modified_base 4: mod_base = OTHER; note = 2'-O-methylcytidine-3'-phosphate
  modified_base 6: mod_base = OTHER; note = 2'-O-methyladenosine-3'-phosphate
  modified_base 8: mod_base = OTHER; note = 2'-O-methyluridine-3'-phosphate
  modified_base 9: mod_base = OTHER; note = 2'-O-methyluridine-3'-phosphate
  modified_base 10: mod_base = OTHER; note = 2'-O-methylguanosine-3'-phosphate
  modified_base 11: mod_base = OTHER; note = 2'-O-methyladenosine-3'-phosphate
  modified_base 13: mod_base = OTHER; note = 2'-O-methylguanosine-3'-phosphate
  modified_base 14: mod_base = OTHER; note = 2'-fluoroguanosine-3'-phosphate
  modified_base 15: mod_base = OTHER; note = 2'-O-methyladenosine-3'-phosphate
  modified_base 16: mod_base = OTHER; note = 2'-O-methylguanosine-3'-phosphate
  modified_base 17: mod_base = OTHER; note = 2'-O-methyluridine-3'-phosphate
  modified_base 18: mod_base = OTHER; note = 2'-O-methyluridine-3'-phosphate
  modified_base 19: mod_base = OTHER; note = 2'-O-methyluridine-3'-phosphate
  modified_base 20: mod_base = OTHER; note = 2'-O-methyluridine-3'-phosphate
  modified_base 21: mod_base = OTHER; note = 2'-O-methylguanosine-3'-phosphorothioate
  modified_base 22: mod_base = OTHER; note = 2'-O-methylcytidine-3'-phosphorothioate
  modified_base 23: mod_base = OTHER; note = 2'-O-methyluridine-3'-phosphate
  misc_feature 1: note = RNA
  misc_feature 2: note = DNA
  misc_feature 3..4: note = RNA
  misc_feature 5: note = DNA
  misc_feature 6: note = RNA
  misc_feature 7: note = DNA
  misc_feature 8..11: note = RNA
  misc_feature 12: note = DNA
  misc_feature 13..23: note = RNA
aatccagttgagggagttttgct

SEQ ID NO: 2470 - DNA, 23 bp, synthetic construct
  source 1..23: mol_type = other DNA
  modified_base 1: mod_base = OTHER; note = 2'-O-methyladenosine-3'-phosphorothioate
  modified_base 2: mod_base = OTHER; note = 2'-deoxycytidine-3'-phosphorothioate
  modified_base 3: mod_base = OTHER; note = 2'-O-methyladenosine-3'-phosphate
  modified_base 4: mod_base = OTHER; note = 2'-O-methyluridine-3'-phosphate
  modified_base 6: mod_base = OTHER; note = 2'-O-methylcytidine-3'-phosphate
  modified_base 8: mod_base = OTHER; note = 2'-O-methylguanosine-3'-phosphate
  modified_base 9: mod_base = OTHER; note = 2'-O-methyluridine-3'-phosphate
  modified_base 10: mod_base = OTHER; note = 2'-O-methyluridine-3'-phosphate
  modified_base 11: mod_base = OTHER; note = 2'-O-methylguanosine-3'-phosphate
  modified_base 13: mod_base = OTHER; note = 2'-O-methylguanosine-3'-phosphate
  modified_base 14: mod_base = OTHER; note = 2'-fluoroguanosine-3'-phosphate
  modified_base 15: mod_base = OTHER; note = 2'-O-methylguanosine-3'-phosphate
  modified_base 16: mod_base = OTHER; note = 2'-O-methyladenosine-3'-phosphate
  modified_base 17: mod_base = OTHER; note = 2'-O-methylguanosine-3'-phosphate
  modified_base 18: mod_base = OTHER; note = 2'-O-methyluridine-3'-phosphate
  modified_base 19: mod_base = OTHER; note = 2'-O-methyluridine-3'-phosphate
  modified_base 20: mod_base = OTHER; note = 2'-O-methyluridine-3'-phosphate
  modified_base 21: mod_base = OTHER; note = 2'-O-methyluridine-3'-phosphorothioate
  modified_base 22: mod_base = OTHER; note = 2'-O-methylguanosine-3'-phosphorothioate
  modified_base 23: mod_base = OTHER; note = 2'-O-methylcytidine-3'-phosphate
  misc_feature 1: note = RNA
  misc_feature 2: note = DNA
  misc_feature 3..4: note = RNA
  misc_feature 5: note = DNA
  misc_feature 6: note = RNA
  misc_feature 7: note = DNA
  misc_feature 8..11: note = RNA
  misc_feature 12: note = DNA
  misc_feature 13..23: note = RNA
acatccagttgagggagttttgc

SEQ ID NO: 2471 - DNA, 23 bp, synthetic construct
  source 1..23: mol_type = other DNA
  modified_base 1: mod_base = OTHER; note = 2'-O-methyladenosine-3'-phosphorothioate
  modified_base 2: mod_base = OTHER; note = 2'-deoxythimidine-3'-phosphorothioate
  modified_base 3: mod_base = OTHER; note = 2'-O-methylcytidine-3'-phosphate
  modified_base 4: mod_base = OTHER; note = 2'-O-methyladenosine-3'-phosphate
  modified_base 6: mod_base = OTHER; note = 2'-O-methylcytidine-3'-phosphate
  modified_base 8: mod_base = OTHER; note = 2'-O-methyladenosine-3'-phosphate
  modified_base 9: mod_base = OTHER; note = 2'-O-methylguanosine-3'-phosphate
  modified_base 10: mod_base = OTHER; note = 2'-O-methyluridine-3'-phosphate
  modified_base 11: mod_base = OTHER; note = 2'-O-methyluridine-3'-phosphate
  modified_base 13: mod_base = OTHER; note = 2'-O-methyladenosine-3'-phosphate
  modified_base 14: mod_base = OTHER; note = 2'-fluoroguanosine-3'-phosphate
  modified_base 15: mod_base = OTHER; note = 2'-O-methylguanosine-3'-phosphate
  modified_base 16: mod_base = OTHER; note = 2'-O-methylguanosine-3'-phosphate
  modified_base 17: mod_base = OTHER; note = 2'-O-methyladenosine-3'-phosphate
  modified_base 18: mod_base = OTHER; note = 2'-O-methylguanosine-3'-phosphate
  modified_base 19: mod_base = OTHER; note = 2'-O-methyluridine-3'-phosphate
  modified_base 20: mod_base = OTHER; note = 2'-O-methyluridine-3'-phosphate
  modified_base 21: mod_base = OTHER; note = 2'-O-methyluridine-3'-phosphorothioate
  modified_base 22: mod_base = OTHER; note = 2'-O-methyluridine-3'-phosphorothioate
  modified_base 23: mod_base = OTHER; note = 2'-O-methylguanosine-3'-phosphate
  misc_feature 1: note = RNA
  misc_feature 2: note = DNA
  misc_feature 3..4: note = RNA
  misc_feature 5: note = DNA
  misc_feature 6: note = RNA
  misc_feature 7: note = DNA
  misc_feature 8..11: note = RNA
  misc_feature 12: note = DNA
  misc_feature 13..23: note = RNA
atcatccagttgagggagttttg

SEQ ID NO: 2472 - DNA, 23 bp, synthetic construct
  source 1..23: mol_type = other DNA
  modified_base 1: mod_base = OTHER; note = 2'-O-methyladenosine-3'-phosphorothioate
  modified_base 2: mod_base = OTHER; note = 2'-deoxythimidine-3'-phosphorothioate
  modified_base 3: mod_base = OTHER; note = 2'-O-methyluridine-3'-phosphate
  modified_base 4: mod_base = OTHER; note = 2'-O-methylcytidine-3'-phosphate
  modified_base 6: mod_base = OTHER; note = 2'-O-methyluridine-3'-phosphate
  modified_base 8: mod_base = OTHER; note = 2'-O-methylcytidine-3'-phosphate
  modified_base 9: mod_base = OTHER; note = 2'-O-methyladenosine-3'-phosphate
  modified_base 10: mod_base = OTHER; note = 2'-O-methylguanosine-3'-phosphate
  modified_base 11: mod_base = OTHER; note = 2'-O-methyluridine-3'-phosphate
  modified_base 13: mod_base = OTHER; note = 2'-O-methylguanosine-3'-phosphate
  modified_base 14: mod_base = OTHER; note = 2'-fluoroadenosine-3'-phosphate
  modified_base 15: mod_base = OTHER; note = 2'-O-methylguanosine-3'-phosphate
  modified_base 16: mod_base = OTHER; note = 2'-O-methylguanosine-3'-phosphate
  modified_base 17: mod_base = OTHER; note = 2'-O-methylguanosine-3'-phosphate
  modified_base 18: mod_base = OTHER; note = 2'-O-methyladenosine-3'-phosphate
  modified_base 19: mod_base = OTHER; note = 2'-O-methylguanosine-3'-phosphate
  modified_base 20: mod_base = OTHER; note = 2'-O-methyluridine-3'-phosphate
  modified_base 21: mod_base = OTHER; note = 2'-O-methyluridine-3'-phosphorothioate
  modified_base 22: mod_base = OTHER; note = 2'-O-methyluridine-3'-phosphorothioate
  modified_base 23: mod_base = OTHER; note = 2'-O-methyluridine-3'-phosphate
  misc_feature 1: note = RNA
  misc_feature 2: note = DNA
  misc_feature 3..4: note = RNA
  misc_feature 5: note = DNA
  misc_feature 6: note = RNA
  misc_feature 7: note = DNA
  misc_feature 8..11: note = RNA
  misc_feature 12: note = DNA
  misc_feature 13..23: note = RNA
attcatccagttgagggagtttt

SEQ ID NO: 2473 - DNA, 23 bp, synthetic construct
  source 1..23: mol_type = other DNA
  modified_base 1: mod_base = OTHER; note = 2'-O-methyladenosine-3'-phosphorothioate
  modified_base 2: mod_base = OTHER; note = 2'-deoxycytidine-3'-phosphorothioate
  modified_base 3: mod_base = OTHER; note = 2'-O-methyluridine-3'-phosphate
  modified_base 4: mod_base = OTHER; note = 2'-O-methyluridine-3'-phosphate
  modified_base 6: mod_base = OTHER; note = 2'-O-methyladenosine-3'-phosphate
  modified_base 8: mod_base = OTHER; note = 2'-O-methylcytidine-3'-phosphate
  modified_base 9: mod_base = OTHER; note = 2'-O-methylcytidine-3'-phosphate
  modified_base 10: mod_base = OTHER; note = 2'-O-methyladenosine-3'-phosphate
  modified_base 11: mod_base = OTHER; note = 2'-O-methylguanosine-3'-phosphate
  modified_base 13: mod_base = OTHER; note = 2'-O-methyluridine-3'-phosphate
  modified_base 14: mod_base = OTHER; note = 2'-fluoroguanosine-3'-phosphate
  modified_base 15: mod_base = OTHER; note = 2'-O-methyladenosine-3'-phosphate
  modified_base 16: mod_base = OTHER; note = 2'-O-methylguanosine-3'-phosphate
  modified_base 17: mod_base = OTHER; note = 2'-O-methylguanosine-3'-phosphate
  modified_base 18: mod_base = OTHER; note = 2'-O-methylguanosine-3'-phosphate
  modified_base 19: mod_base = OTHER; note = 2'-O-methyladenosine-3'-phosphate
  modified_base 20: mod_base = OTHER; note = 2'-O-methylguanosine-3'-phosphate
  modified_base 21: mod_base = OTHER; note = 2'-O-methyluridine-3'-phosphorothioate
  modified_base 22: mod_base = OTHER; note = 2'-O-methyluridine-3'-phosphorothioate
  modified_base 23: mod_base = OTHER; note = 2'-O-methyluridine-3'-phosphate
  misc_feature 1: note = RNA
  misc_feature 2: note = DNA
  misc_feature 3..4: note = RNA
  misc_feature 5: note = DNA
  misc_feature 6: note = RNA
  misc_feature 7: note = DNA
  misc_feature 8..11: note = RNA
  misc_feature 12: note = DNA
  misc_feature 13..23: note = RNA
acttcatccagttgagggagttt

SEQ ID NO: 2474 - DNA, 23 bp, synthetic construct
  source 1..23: mol_type = other DNA
  modified_base 1: mod_base = OTHER; note = 2'-O-methyladenosine-3'-phosphorothioate
  modified_base 2: mod_base = OTHER; note = 2'-deoxythimidine-3'-phosphorothioate
  modified_base 3: mod_base = OTHER; note = 2'-O-methylcytidine-3'-phosphate
  modified_base 4: mod_base = OTHER; note = 2'-O-methyluridine-3'-phosphate
  modified_base 6: mod_base = OTHER; note = 2'-O-methylcytidine-3'-phosphate
  modified_base 8: mod_base = OTHER; note = 2'-O-methyluridine-3'-phosphate
  modified_base 9: mod_base = OTHER; note = 2'-O-methylcytidine-3'-phosphate
  modified_base 10: mod_base = OTHER; note = 2'-O-methylcytidine-3'-phosphate
  modified_base 11: mod_base = OTHER; note = 2'-O-methyladenosine-3'-phosphate
  modified_base 13: mod_base = OTHER; note = 2'-O-methyluridine-3'-phosphate
  modified_base 14: mod_base = OTHER; note = 2'-fluorouridine-3'-phosphate
  modified_base 15: mod_base = OTHER; note = 2'-O-methylguanosine-3'-phosphate
  modified_base 16: mod_base = OTHER; note = 2'-O-methyladenosine-3'-phosphate
  modified_base 17: mod_base = OTHER; note = 2'-O-methylguanosine-3'-phosphate
  modified_base 18: mod_base = OTHER; note = 2'-O-methylguanosine-3'-phosphate
  modified_base 19: mod_base = OTHER; note = 2'-O-methylguanosine-3'-phosphate
  modified_base 20: mod_base = OTHER; note = 2'-O-methyladenosine-3'-phosphate
  modified_base 21: mod_base = OTHER; note = 2'-O-methylguanosine-3'-phosphorothioate
  modified_base 22: mod_base = OTHER; note = 2'-O-methyluridine-3'-phosphorothioate
  modified_base 23: mod_base = OTHER; note = 2'-O-methyluridine-3'-phosphate
  misc_feature 1: note = RNA
  misc_feature 2: note = DNA
  misc_feature 3..4: note = RNA
  misc_feature 5: note = DNA
  misc_feature 6: note = RNA
  misc_feature 7: note = DNA
  misc_feature 8..11: note = RNA
  misc_feature 12: note = DNA
  misc_feature 13..23: note = RNA
atcttcatccagttgagggagtt

SEQ ID NO: 2475 - DNA, 23 bp, synthetic construct
  source 1..23: mol_type = other DNA
  modified_base 1: mod_base = OTHER; note = 2'-O-methyladenosine-3'-phosphorothioate
  modified_base 2: mod_base = OTHER; note = 2'-deoxythimidine-3'-phosphorothioate
  modified_base 3: mod_base = OTHER; note = 2'-O-methyluridine-3'-phosphate
  modified_base 4: mod_base = OTHER; note = 2'-O-methylcytidine-3'-phosphate
  modified_base 6: mod_base = OTHER; note = 2'-O-methyluridine-3'-phosphate
  modified_base 8: mod_base = OTHER; note = 2'-O-methyladenosine-3'-phosphate
  modified_base 9: mod_base = OTHER; note = 2'-O-methyluridine-3'-phosphate
  modified_base 10: mod_base = OTHER; note = 2'-O-methylcytidine-3'-phosphate
  modified_base 11: mod_base = OTHER; note = 2'-O-methylcytidine-3'-phosphate
  modified_base 13: mod_base = OTHER; note = 2'-O-methylguanosine-3'-phosphate
  modified_base 14: mod_base = OTHER; note = 2'-fluorouridine-3'-phosphate
  modified_base 15: mod_base = OTHER; note = 2'-O-methyluridine-3'-phosphate
  modified_base 16: mod_base = OTHER; note = 2'-O-methylguanosine-3'-phosphate
  modified_base 17: mod_base = OTHER; note = 2'-O-methyladenosine-3'-phosphate
  modified_base 18: mod_base = OTHER; note = 2'-O-methylguanosine-3'-phosphate
  modified_base 19: mod_base = OTHER; note = 2'-O-methylguanosine-3'-phosphate
  modified_base 20: mod_base = OTHER; note = 2'-O-methylguanosine-3'-phosphate
  modified_base 21: mod_base = OTHER; note = 2'-O-methyladenosine-3'-phosphorothioate
  modified_base 22: mod_base = OTHER; note = 2'-O-methylguanosine-3'-phosphorothioate
  modified_base 23: mod_base = OTHER; note = 2'-O-methyluridine-3'-phosphate
  misc_feature 1: note = RNA
  misc_feature 2: note = DNA
  misc_feature 3..4: note = RNA
  misc_feature 5: note = DNA
  misc_feature 6: note = RNA
  misc_feature 7: note = DNA
  misc_feature 8..11: note = RNA
  misc_feature 12: note = DNA
  misc_feature 13..23: note = RNA
attcttcatccagttgagggagt

SEQ ID NO: 2476 - DNA, 23 bp, synthetic construct
  source 1..23: mol_type = other DNA
  modified_base 1: mod_base = OTHER; note = 2'-O-methyladenosine-3'-phosphorothioate
  modified_base 2: mod_base = OTHER; note = 2'-deoxythimidine-3'-phosphorothioate
  modified_base 3: mod_base = OTHER; note = 2'-O-methyluridine-3'-phosphate
  modified_base 4: mod_base = OTHER; note = 2'-O-methyluridine-3'-phosphate
  modified_base 6: mod_base = OTHER; note = 2'-O-methyluridine-3'-phosphate
  modified_base 8: mod_base = OTHER; note = 2'-O-methylcytidine-3'-phosphate
  modified_base 9: mod_base = OTHER; note = 2'-O-methyladenosine-3'-phosphate
  modified_base 10: mod_base = OTHER; note = 2'-O-methyluridine-3'-phosphate
  modified_base 11: mod_base = OTHER; note = 2'-O-methylcytidine-3'-phosphate
  modified_base 13: mod_base = OTHER; note = 2'-O-methyladenosine-3'-phosphate
  modified_base 14: mod_base = OTHER; note = 2'-fluoroguanosine-3'-phosphate
  modified_base 15: mod_base = OTHER; note = 2'-O-methyluridine-3'-phosphate
  modified_base 16: mod_base = OTHER; note = 2'-O-methyluridine-3'-phosphate
  modified_base 17: mod_base = OTHER; note = 2'-O-methylguanosine-3'-phosphate
  modified_base 18: mod_base = OTHER; note = 2'-O-methyladenosine-3'-phosphate
  modified_base 19: mod_base = OTHER; note = 2'-O-methylguanosine-3'-phosphate
  modified_base 20: mod_base = OTHER; note = 2'-O-methylguanosine-3'-phosphate
  modified_base 21: mod_base = OTHER; note = 2'-O-methylguanosine-3'-phosphorothioate
  modified_base 22: mod_base = OTHER; note = 2'-O-methyladenosine-3'-phosphorothioate
  modified_base 23: mod_base = OTHER; note = 2'-O-methylguanosine-3'-phosphate
  misc_feature 1: note = RNA
  misc_feature 2: note = DNA
  misc_feature 3..4: note = RNA
  misc_feature 5: note = DNA
  misc_feature 6: note = RNA
  misc_feature 7: note = DNA
  misc_feature 8..11: note = RNA
  misc_feature 12: note = DNA
  misc_feature 13..23: note = RNA
atttcttcatccagttgagggag

SEQ ID NO: 2477 - DNA, 23 bp, synthetic construct
  source 1..23: mol_type = other DNA
  modified_base 1: mod_base = OTHER; note = 2'-O-methyladenosine-3'-phosphorothioate
  modified_base 2: mod_base = OTHER; note = 2'-deoxyadenosine-3'-phosphorothioate
  modified_base 3: mod_base = OTHER; note = 2'-O-methylguanosine-3'-phosphate
  modified_base 4: mod_base = OTHER; note = 2'-O-methyluridine-3'-phosphate
  modified_base 6: mod_base = OTHER; note = 2'-O-methyluridine-3'-phosphate
  modified_base 8: mod_base = OTHER; note = 2'-O-methyluridine-3'-phosphate
  modified_base 9: mod_base = OTHER; note = 2'-O-methyluridine-3'-phosphate
  modified_base 10: mod_base = OTHER; note = 2'-O-methylcytidine-3'-phosphate
  modified_base 11: mod_base = OTHER; note = 2'-O-methyladenosine-3'-phosphate
  modified_base 13: mod_base = OTHER; note = 2'-O-methylcytidine-3'-phosphate
  modified_base 14: mod_base = OTHER; note = 2'-fluorocytidine-3'-phosphate
  modified_base 15: mod_base = OTHER; note = 2'-O-methyladenosine-3'-phosphate
  modified_base 16: mod_base = OTHER; note = 2'-O-methylguanosine-3'-phosphate
  modified_base 17: mod_base = OTHER; note = 2'-O-methyluridine-3'-phosphate
  modified_base 18: mod_base = OTHER; note = 2'-O-methyluridine-3'-phosphate
  modified_base 19: mod_base = OTHER; note = 2'-O-methylguanosine-3'-phosphate
  modified_base 20: mod_base = OTHER; note = 2'-O-methyladenosine-3'-phosphate
  modified_base 21: mod_base = OTHER; note = 2'-O-methylguanosine-3'-phosphorothioate
  modified_base 22: mod_base = OTHER; note = 2'-O-methylguanosine-3'-phosphorothioate
  modified_base 23: mod_base = OTHER; note = 2'-O-methylguanosine-3'-phosphate
  misc_feature 1: note = RNA
  misc_feature 2: note = DNA
  misc_feature 3..4: note = RNA
  misc_feature 5: note = DNA
  misc_feature 6: note = RNA
  misc_feature 7: note = DNA
  misc_feature 8..11: note = RNA
  misc_feature 12: note = DNA
  misc_feature 13..23: note = RNA
aagtttcttcatccagttgaggg

SEQ ID NO: 2478 - DNA, 23 bp, synthetic construct
  source 1..23: mol_type = other DNA
  modified_base 1: mod_base = OTHER; note = 2'-O-methyladenosine-3'-phosphorothioate
  modified_base 2: mod_base = OTHER; note = 2'-deoxycytidine-3'-phosphorothioate
  modified_base 3: mod_base = OTHER; note = 2'-O-methyluridine-3'-phosphate
  modified_base 4: mod_base = OTHER; note = 2'-O-methylguanosine-3'-phosphate
  modified_base 6: mod_base = OTHER; note = 2'-O-methyladenosine-3'-phosphate
  modified_base 8: mod_base = OTHER; note = 2'-O-methylguanosine-3'-phosphate
  modified_base 9: mod_base = OTHER; note = 2'-O-methyluridine-3'-phosphate
  modified_base 10: mod_base = OTHER; note = 2'-O-methylcytidine-3'-phosphate
  modified_base 11: mod_base = OTHER; note = 2'-O-methyladenosine-3'-phosphate
  modified_base 13: mod_base = OTHER; note = 2'-O-methyladenosine-3'-phosphate
  modified_base 14: mod_base = OTHER; note = 2'-fluoroadenosine-3'-phosphate
  modified_base 15: mod_base = OTHER; note = 2'-O-methylguanosine-3'-phosphate
  modified_base 16: mod_base = OTHER; note = 2'-O-methyladenosine-3'-phosphate
  modified_base 17: mod_base = OTHER; note = 2'-O-methyluridine-3'-phosphate
  modified_base 18: mod_base = OTHER; note = 2'-O-methylcytidine-3'-phosphate
  modified_base 19: mod_base = OTHER; note = 2'-O-methylcytidine-3'-phosphate
  modified_base 20: mod_base = OTHER; note = 2'-O-methyluridine-3'-phosphate
  modified_base 21: mod_base = OTHER; note = 2'-O-methyluridine-3'-phosphorothioate
  modified_base 22: mod_base = OTHER; note = 2'-O-methylguanosine-3'-phosphorothioate
  modified_base 23: mod_base = OTHER; note = 2'-O-methylcytidine-3'-phosphate
  misc_feature 1: note = RNA
  misc_feature 2: note = DNA
  misc_feature 3..4: note = RNA
  misc_feature 5: note = DNA
  misc_feature 6: note = RNA
  misc_feature 7: note = DNA
  misc_feature 8..11: note = RNA
  misc_feature 12: note = DNA
  misc_feature 13..23: note = RNA
actgcaggtcataagatccttgc

SEQ ID NO: 2479 - DNA, 23 bp, synthetic construct
  source 1..23: mol_type = other DNA
  modified_base 1: mod_base = OTHER; note = 2'-O-methyladenosine-3'-phosphorothioate
  modified_base 2: mod_base = OTHER; note = 2'-deoxycytidine-3'-phosphorothioate
  modified_base 3: mod_base = OTHER; note = 2'-O-methylcytidine-3'-phosphate
  modified_base 4: mod_base = OTHER; note = 2'-O-methyluridine-3'-phosphate
  modified_base 6: mod_base = OTHER; note = 2'-O-methylcytidine-3'-phosphate
  modified_base 8: mod_base = OTHER; note = 2'-O-methylguanosine-3'-phosphate
  modified_base 9: mod_base = OTHER; note = 2'-O-methylguanosine-3'-phosphate
  modified_base 10: mod_base = OTHER; note = 2'-O-methyluridine-3'-phosphate
  modified_base 11: mod_base = OTHER; note = 2'-O-methylcytidine-3'-phosphate
  modified_base 13: mod_base = OTHER; note = 2'-O-methyluridine-3'-phosphate
  modified_base 14: mod_base = OTHER; note = 2'-fluoroadenosine-3'-phosphate
  modified_base 15: mod_base = OTHER; note = 2'-O-methyladenosine-3'-phosphate
  modified_base 16: mod_base = OTHER; note = 2'-O-methylguanosine-3'-phosphate
  modified_base 17: mod_base = OTHER; note = 2'-O-methyladenosine-3'-phosphate
  modified_base 18: mod_base = OTHER; note = 2'-O-methyluridine-3'-phosphate
  modified_base 19: mod_base = OTHER; note = 2'-O-methylcytidine-3'-phosphate
  modified_base 20: mod_base = OTHER; note = 2'-O-methylcytidine-3'-phosphate
  modified_base 21: mod_base = OTHER; note = 2'-O-methyluridine-3'-phosphorothioate
  modified_base 22: mod_base = OTHER; note = 2'-O-methyluridine-3'-phosphorothioate
  modified_base 23: mod_base = OTHER; note = 2'-O-methylguanosine-3'-phosphate
  misc_feature 1: note = RNA
  misc_feature 2: note = DNA
  misc_feature 3..4: note = RNA
  misc_feature 5: note = DNA
  misc_feature 6: note = RNA
  misc_feature 7: note = DNA
  misc_feature 8..11: note = RNA
  misc_feature 12: note = DNA
  misc_feature 13..23: note = RNA
acctgcaggtcataagatccttg

SEQ ID NO: 2480 - DNA, 23 bp, synthetic construct
  source 1..23: mol_type = other DNA
  modified_base 1: mod_base = OTHER; note = 2'-O-methyladenosine-3'-phosphorothioate
  modified_base 2: mod_base = OTHER; note = 2'-deoxycytidine-3'-phosphorothioate
  modified_base 3: mod_base = OTHER; note = 2'-O-methyladenosine-3'-phosphate
  modified_base 4: mod_base = OTHER; note = 2'-O-methylguanosine-3'-phosphate
  modified_base 6: mod_base = OTHER; note = 2'-O-methyluridine-3'-phosphate
  modified_base 8: mod_base = OTHER; note = 2'-O-methylcytidine-3'-phosphate
  modified_base 9: mod_base = OTHER; note = 2'-O-methyluridine-3'-phosphate
  modified_base 10: mod_base = OTHER; note = 2'-O-methylguanosine-3'-phosphate
  modified_base 11: mod_base = OTHER; note = 2'-O-methylcytidine-3'-phosphate
  modified_base 13: mod_base = OTHER; note = 2'-O-methylguanosine-3'-phosphate
  modified_base 14: mod_base = OTHER; note = 2'-fluoroguanosine-3'-phosphate
  modified_base 15: mod_base = OTHER; note = 2'-O-methyluridine-3'-phosphate
  modified_base 16: mod_base = OTHER; note = 2'-O-methylcytidine-3'-phosphate
  modified_base 17: mod_base = OTHER; note = 2'-O-methyladenosine-3'-phosphate
  modified_base 18: mod_base = OTHER; note = 2'-O-methyluridine-3'-phosphate
  modified_base 19: mod_base = OTHER; note = 2'-O-methyladenosine-3'-phosphate
  modified_base 20: mod_base = OTHER; note = 2'-O-methyladenosine-3'-phosphate
  modified_base 21: mod_base = OTHER; note = 2'-O-methylguanosine-3'-phosphorothioate
  modified_base 22: mod_base = OTHER; note = 2'-O-methyladenosine-3'-phosphorothioate
  modified_base 23: mod_base = OTHER; note = 2'-O-methyluridine-3'-phosphate
  misc_feature 1: note = RNA
  misc_feature 2: note = DNA
  misc_feature 3..4: note = RNA
  misc_feature 5: note = DNA
  misc_feature 6: note = RNA
  misc_feature 7: note = DNA
  misc_feature 8..11: note = RNA
  misc_feature 12: note = DNA
  misc_feature 13..23: note = RNA
acaggtcctgcaggtcataagat

SEQ ID NO: 2481 - DNA, 23 bp, synthetic construct
  source 1..23: mol_type = other DNA
  modified_base 1: mod_base = OTHER; note = 2'-O-methyladenosine-3'-phosphorothioate
  modified_base 2: mod_base = OTHER; note = 2'-deoxyadenosine-3'-phosphorothioate
  modified_base 3: mod_base = OTHER; note = 2'-O-methyluridine-3'-phosphate
  modified_base 4: mod_base = OTHER; note = 2'-O-methyluridine-3'-phosphate
  modified_base 6: mod_base = OTHER; note = 2'-O-methyluridine-3'-phosphate
  modified_base 8: mod_base = OTHER; note = 2'-O-methylguanosine-3'-phosphate
  modified_base 9: mod_base = OTHER; note = 2'-O-methylcytidine-3'-phosphate
  modified_base 10: mod_base = OTHER; note = 2'-O-methyladenosine-3'-phosphate
  modified_base 11: mod_base = OTHER; note = 2'-O-methylguanosine-3'-phosphate
  modified_base 13: mod_base = OTHER; note = 2'-O-methyluridine-3'-phosphate
  modified_base 14: mod_base = OTHER; note = 2'-fluorouridine-3'-phosphate
  modified_base 15: mod_base = OTHER; note = 2'-O-methylcytidine-3'-phosphate
  modified_base 16: mod_base = OTHER; note = 2'-O-methyladenosine-3'-phosphate
  modified_base 17: mod_base = OTHER; note = 2'-O-methylguanosine-3'-phosphate
  modified_base 18: mod_base = OTHER; note = 2'-O-methylcytidine-3'-phosphate
  modified_base 19: mod_base = OTHER; note = 2'-O-methyluridine-3'-phosphate
  modified_base 20: mod_base = OTHER; note = 2'-O-methylcytidine-3'-phosphate
  modified_base 21: mod_base = OTHER; note = 2'-O-methylguanosine-3'-phosphorothioate
  modified_base 22: mod_base = OTHER; note = 2'-O-methylguanosine-3'-phosphorothioate
  modified_base 23: mod_base = OTHER; note = 2'-O-methyluridine-3'-phosphate
  misc_feature 1: note = RNA
  misc_feature 2: note = DNA
  misc_feature 3..4: note = RNA
  misc_feature 5: note = DNA
  misc_feature 6: note = RNA
  misc_feature 7: note = DNA
  misc_feature 8..11: note = RNA
  misc_feature 12: note = DNA
  misc_feature 13..23: note = RNA
aatttttgcaggttcagctcggt

SEQ ID NO: 2482 - DNA, 23 bp, synthetic construct
  source 1..23: mol_type = other DNA
  modified_base 1: mod_base = OTHER; note = 2'-O-methyladenosine-3'-phosphorothioate
  modified_base 2: mod_base = OTHER; note = 2'-deoxyadenosine-3'-phosphorothioate
  modified_base 3: mod_base = OTHER; note = 2'-O-methyladenosine-3'-phosphate
  modified_base 4: mod_base = OTHER; note = 2'-O-methyluridine-3'-phosphate
  modified_base 6: mod_base = OTHER; note = 2'-O-methyluridine-3'-phosphate
  modified_base 8: mod_base = OTHER; note = 2'-O-methyluridine-3'-phosphate
  modified_base 9: mod_base = OTHER; note = 2'-O-methylguanosine-3'-phosphate
  modified_base 10: mod_base = OTHER; note = 2'-O-methylcytidine-3'-phosphate
  modified_base 11: mod_base = OTHER; note = 2'-O-methyladenosine-3'-phosphate
  modified_base 13: mod_base = OTHER; note = 2'-O-methylguanosine-3'-phosphate
  modified_base 14: mod_base = OTHER; note = 2'-fluorouridine-3'-phosphate
  modified_base 15: mod_base = OTHER; note = 2'-O-methyluridine-3'-phosphate
  modified_base 16: mod_base = OTHER; note = 2'-O-methylcytidine-3'-phosphate
  modified_base 17: mod_base = OTHER; note = 2'-O-methyladenosine-3'-phosphate
  modified_base 18: mod_base = OTHER; note = 2'-O-methylguanosine-3'-phosphate
  modified_base 19: mod_base = OTHER; note = 2'-O-methylcytidine-3'-phosphate
  modified_base 20: mod_base = OTHER; note = 2'-O-methyluridine-3'-phosphate
  modified_base 21: mod_base = OTHER; note = 2'-O-methylcytidine-3'-phosphorothioate
  modified_base 22: mod_base = OTHER; note = 2'-O-methylguanosine-3'-phosphorothioate
  modified_base 23: mod_base = OTHER; note = 2'-O-methylguanosine-3'-phosphate
  misc_feature 1: note = RNA
  misc_feature 2: note = DNA
  misc_feature 3..4: note = RNA
  misc_feature 5: note = DNA
  misc_feature 6: note = RNA
  misc_feature 7: note = DNA
  misc_feature 8..11: note = RNA
  misc_feature 12: note = DNA
  misc_feature 13..23: note = RNA
aaatttttgcaggttcagctcgg

SEQ ID NO: 2483 - DNA, 23 bp, synthetic construct
  source 1..23: mol_type = other DNA
  modified_base 1: mod_base = OTHER; note = 2'-O-methyladenosine-3'-phosphorothioate
  modified_base 2: mod_base = OTHER; note = 2'-deoxycytidine-3'-phosphorothioate
  modified_base 3: mod_base = OTHER; note = 2'-O-methyladenosine-3'-phosphate
  modified_base 4: mod_base = OTHER; note = 2'-O-methyladenosine-3'-phosphate
  modified_base 6: mod_base = OTHER; note = 2'-O-methyluridine-3'-phosphate
  modified_base 8: mod_base = OTHER; note = 2'-O-methyluridine-3'-phosphate
  modified_base 9: mod_base = OTHER; note = 2'-O-methyluridine-3'-phosphate
  modified_base 10: mod_base = OTHER; note = 2'-O-methylguanosine-3'-phosphate
  modified_base 11: mod_base = OTHER; note = 2'-O-methylcytidine-3'-phosphate
  modified_base 13: mod_base = OTHER; note = 2'-O-methylguanosine-3'-phosphate
  modified_base 14: mod_base = OTHER; note = 2'-fluoroguanosine-3'-phosphate
  modified_base 15: mod_base = OTHER; note = 2'-O-methyluridine-3'-phosphate
  modified_base 16: mod_base = OTHER; note = 2'-O-methyluridine-3'-phosphate
  modified_base 17: mod_base = OTHER; note = 2'-O-methylcytidine-3'-phosphate
  modified_base 18: mod_base = OTHER; note = 2'-O-methyladenosine-3'-phosphate
  modified_base 19: mod_base = OTHER; note = 2'-O-methylguanosine-3'-phosphate
  modified_base 20: mod_base = OTHER; note = 2'-O-methylcytidine-3'-phosphate
  modified_base 21: mod_base = OTHER; note = 2'-O-methyluridine-3'-phosphorothioate
  modified_base 22: mod_base = OTHER; note = 2'-O-methylcytidine-3'-phosphorothioate
  modified_base 23: mod_base = OTHER; note = 2'-O-methylguanosine-3'-phosphate
  misc_feature 1: note = RNA
  misc_feature 2: note = DNA
  misc_feature 3..4: note = RNA
  misc_feature 5: note = DNA
  misc_feature 6: note = RNA
  misc_feature 7: note = DNA
  misc_feature 8..11: note = RNA
  misc_feature 12: note = DNA
  misc_feature 13..23: note = RNA
acaatttttgcaggttcagctcg

SEQ ID NO: 2484 - DNA, 23 bp, synthetic construct
  source 1..23: mol_type = other DNA
  modified_base 1: mod_base = OTHER; note = 2'-O-methyladenosine-3'-phosphorothioate
  modified_base 2: mod_base = OTHER; note = 2'-deoxythimidine-3'-phosphorothioate
  modified_base 3: mod_base = OTHER; note = 2'-O-methylcytidine-3'-phosphate
  modified_base 4: mod_base = OTHER; note = 2'-O-methyladenosine-3'-phosphate
  modified_base 6: mod_base = OTHER; note = 2'-O-methyluridine-3'-phosphate
  modified_base 8: mod_base = OTHER; note = 2'-O-methyluridine-3'-phosphate
  modified_base 9: mod_base = OTHER; note = 2'-O-methyluridine-3'-phosphate
  modified_base 10: mod_base = OTHER; note = 2'-O-methyluridine-3'-phosphate
  modified_base 11: mod_base = OTHER; note = 2'-O-methylguanosine-3'-phosphate
  modified_base 13: mod_base = OTHER; note = 2'-O-methyladenosine-3'-phosphate
  modified_base 14: mod_base = OTHER; note = 2'-fluoroguanosine-3'-phosphate
  modified_base 15: mod_base = OTHER; note = 2'-O-methylguanosine-3'-phosphate
  modified_base 16: mod_base = OTHER; note = 2'-O-methyluridine-3'-phosphate
  modified_base 17: mod_base = OTHER; note = 2'-O-methyluridine-3'-phosphate
  modified_base 18: mod_base = OTHER; note = 2'-O-methylcytidine-3'-phosphate
  modified_base 19: mod_base = OTHER; note = 2'-O-methyladenosine-3'-phosphate
  modified_base 20: mod_base = OTHER; note = 2'-O-methylguanosine-3'-phosphate
  modified_base 21: mod_base = OTHER; note = 2'-O-methylcytidine-3'-phosphorothioate
  modified_base 22: mod_base = OTHER; note = 2'-O-methyluridine-3'-phosphorothioate
  modified_base 23: mod_base = OTHER; note = 2'-O-methylcytidine-3'-phosphate
  misc_feature 1: note = RNA
  misc_feature 2: note = DNA
  misc_feature 3..4: note = RNA
  misc_feature 5: note = DNA
  misc_feature 6: note = RNA
  misc_feature 7: note = DNA
  misc_feature 8..11: note = RNA
  misc_feature 12: note = DNA
  misc_feature 13..23: note = RNA
atcaatttttgcaggttcagctc

SEQ ID NO: 2485 - DNA, 23 bp, synthetic construct
  source 1..23: mol_type = other DNA
  modified_base 1: mod_base = OTHER; note = 2'-O-methyladenosine-3'-phosphorothioate
  modified_base 2: mod_base = OTHER; note = 2'-deoxycytidine-3'-phosphorothioate
  modified_base 3: mod_base = OTHER; note = 2'-O-methyluridine-3'-phosphate
  modified_base 4: mod_base = OTHER; note = 2'-O-methylcytidine-3'-phosphate
  modified_base 6: mod_base = OTHER; note = 2'-O-methyladenosine-3'-phosphate
  modified_base 8: mod_base = OTHER; note = 2'-O-methyluridine-3'-phosphate
  modified_base 9: mod_base = OTHER; note = 2'-O-methyluridine-3'-phosphate
  modified_base 10: mod_base = OTHER; note = 2'-O-methyluridine-3'-phosphate
  modified_base 11: mod_base = OTHER; note = 2'-O-methyluridine-3'-phosphate
  modified_base 13: mod_base = OTHER; note = 2'-O-methylcytidine-3'-phosphate
  modified_base 14: mod_base = OTHER; note = 2'-fluoroadenosine-3'-phosphate
  modified_base 15: mod_base = OTHER; note = 2'-O-methylguanosine-3'-phosphate
  modified_base 16: mod_base = OTHER; note = 2'-O-methylguanosine-3'-phosphate
  modified_base 17: mod_base = OTHER; note = 2'-O-methyluridine-3'-phosphate
  modified_base 18: mod_base = OTHER; note = 2'-O-methyluridine-3'-phosphate
  modified_base 19: mod_base = OTHER; note = 2'-O-methylcytidine-3'-phosphate
  modified_base 20: mod_base = OTHER; note = 2'-O-methyladenosine-3'-phosphate
  modified_base 21: mod_base = OTHER; note = 2'-O-methylguanosine-3'-phosphorothioate
  modified_base 22: mod_base = OTHER; note = 2'-O-methylcytidine-3'-phosphorothioate
  modified_base 23: mod_base = OTHER; note = 2'-O-methyluridine-3'-phosphate
  misc_feature 1: note = RNA
  misc_feature 2: note = DNA
  misc_feature 3..4: note = RNA
  misc_feature 5: note = DNA
  misc_feature 6: note = RNA
  misc_feature 7: note = DNA
  misc_feature 8..11: note = RNA
  misc_feature 12: note = DNA
  misc_feature 13..23: note = RNA
actcaatttttgcaggttcagct

SEQ ID NO: 2486 - DNA, 23 bp, synthetic construct
  source 1..23: mol_type = other DNA
  modified_base 1: mod_base = OTHER; note = 2'-O-methyladenosine-3'-phosphorothioate
  modified_base 2: mod_base = OTHER; note = 2'-deoxyguanosine-3'-phosphorothioate
  modified_base 3: mod_base = OTHER; note = 2'-O-methylcytidine-3'-phosphate
  modified_base 4: mod_base = OTHER; note = 2'-O-methyluridine-3'-phosphate
  modified_base 6: mod_base = OTHER; note = 2'-O-methyladenosine-3'-phosphate
  modified_base 8: mod_base = OTHER; note = 2'-O-methyluridine-3'-phosphate
  modified_base 9: mod_base = OTHER; note = 2'-O-methyluridine-3'-phosphate
  modified_base 10: mod_base = OTHER; note = 2'-O-methyluridine-3'-phosphate
  modified_base 11: mod_base = OTHER; note = 2'-O-methyluridine-3'-phosphate
  modified_base 13: mod_base = OTHER; note = 2'-O-methylguanosine-3'-phosphate
  modified_base 14: mod_base = OTHER; note = 2'-fluorocytidine-3'-phosphate
  modified_base 15: mod_base = OTHER; note = 2'-O-methyladenosine-3'-phosphate
  modified_base 16: mod_base = OTHER; note = 2'-O-methylguanosine-3'-phosphate
  modified_base 17: mod_base = OTHER; note = 2'-O-methylguanosine-3'-phosphate
  modified_base 18: mod_base = OTHER; note = 2'-O-methyluridine-3'-phosphate
  modified_base 19: mod_base = OTHER; note = 2'-O-methyluridine-3'-phosphate
  modified_base 20: mod_base = OTHER; note = 2'-O-methylcytidine-3'-phosphate
  modified_base 21: mod_base = OTHER; note = 2'-O-methyladenosine-3'-phosphorothioate
  modified_base 22: mod_base = OTHER; note = 2'-O-methylguanosine-3'-phosphorothioate
  modified_base 23: mod_base = OTHER; note = 2'-O-methylcytidine-3'-phosphate
  misc_feature 1: note = RNA
  misc_feature 2: note = DNA
  misc_feature 3..4: note = RNA
  misc_feature 5: note = DNA
  misc_feature 6: note = RNA
  misc_feature 7: note = DNA
  misc_feature 8..11: note = RNA
  misc_feature 12: note = DNA
  misc_feature 13..23: note = RNA
agctcaatttttgcaggttcagc

SEQ ID NO: 2487 - DNA, 23 bp, synthetic construct
  source 1..23: mol_type = other DNA
  modified_base 1: mod_base = OTHER; note = 2'-O-methyladenosine-3'-phosphorothioate
  modified_base 2: mod_base = OTHER; note = 2'-deoxythimidine-3'-phosphorothioate
  modified_base 3: mod_base = OTHER; note = 2'-O-methylguanosine-3'-phosphate
  modified_base 4: mod_base = OTHER; note = 2'-O-methylcytidine-3'-phosphate
  modified_base 6: mod_base = OTHER; note = 2'-O-methylcytidine-3'-phosphate
  modified_base 8: mod_base = OTHER; note = 2'-O-methyladenosine-3'-phosphate
  modified_base 9: mod_base = OTHER; note = 2'-O-methyluridine-3'-phosphate
  modified_base 10: mod_base = OTHER; note = 2'-O-methyluridine-3'-phosphate
  modified_base 11: mod_base = OTHER; note = 2'-O-methyluridine-3'-phosphate
  modified_base 13: mod_base = OTHER; note = 2'-O-methyluridine-3'-phosphate
  modified_base 14: mod_base = OTHER; note = 2'-fluoroguanosine-3'-phosphate
  modified_base 15: mod_base = OTHER; note = 2'-O-methylcytidine-3'-phosphate
  modified_base 16: mod_base = OTHER; note = 2'-O-methyladenosine-3'-phosphate
  modified_base 17: mod_base = OTHER; note = 2'-O-methylguanosine-3'-phosphate
  modified_base 18: mod_base = OTHER; note = 2'-O-methylguanosine-3'-phosphate
  modified_base 19: mod_base = OTHER; note = 2'-O-methyluridine-3'-phosphate
  modified_base 20: mod_base = OTHER; note = 2'-O-methyluridine-3'-phosphate
  modified_base 21: mod_base = OTHER; note = 2'-O-methylcytidine-3'-phosphorothioate
  modified_base 22: mod_base = OTHER; note = 2'-O-methyladenosine-3'-phosphorothioate
  modified_base 23: mod_base = OTHER; note = 2'-O-methylguanosine-3'-phosphate
  misc_feature 1: note = RNA
  misc_feature 2: note = DNA
  misc_feature 3..4: note = RNA
  misc_feature 5: note = DNA
  misc_feature 6: note = RNA
  misc_feature 7: note = DNA
  misc_feature 8..11: note = RNA
  misc_feature 12: note = DNA
  misc_feature 13..23: note = RNA
atgctcaatttttgcaggttcag

SEQ ID NO: 2488 - DNA, 23 bp, synthetic construct
  source 1..23: mol_type = other DNA
  modified_base 1: mod_base = OTHER; note = 2'-O-methyladenosine-3'-phosphorothioate
  modified_base 2: mod_base = OTHER; note = 2'-deoxyguanosine-3'-phosphorothioate
  modified_base 3: mod_base = OTHER; note = 2'-O-methyluridine-3'-phosphate
  modified_base 4: mod_base = OTHER; note = 2'-O-methylcytidine-3'-phosphate
  modified_base 6: mod_base = OTHER; note = 2'-O-methyluridine-3'-phosphate
  modified_base 8: mod_base = OTHER; note = 2'-O-methylguanosine-3'-phosphate
  modified_base 9: mod_base = OTHER; note = 2'-O-methylcytidine-3'-phosphate
  modified_base 10: mod_base = OTHER; note = 2'-O-methyluridine-3'-phosphate
  modified_base 11: mod_base = OTHER; note = 2'-O-methylcytidine-3'-phosphate
  modified_base 13: mod_base = OTHER; note = 2'-O-methyladenosine-3'-phosphate
  modified_base 14: mod_base = OTHER; note = 2'-fluorouridine-3'-phosphate
  modified_base 15: mod_base = OTHER; note = 2'-O-methyluridine-3'-phosphate
  modified_base 16: mod_base = OTHER; note = 2'-O-methyluridine-3'-phosphate
  modified_base 17: mod_base = OTHER; note = 2'-O-methyluridine-3'-phosphate
  modified_base 18: mod_base = OTHER; note = 2'-O-methyluridine-3'-phosphate
  modified_base 19: mod_base = OTHER; note = 2'-O-methylguanosine-3'-phosphate
  modified_base 20: mod_base = OTHER; note = 2'-O-methylcytidine-3'-phosphate
  modified_base 21: mod_base = OTHER; note = 2'-O-methyladenosine-3'-phosphorothioate
  modified_base 22: mod_base = OTHER; note = 2'-O-methylguanosine-3'-phosphorothioate
  modified_base 23: mod_base = OTHER; note = 2'-O-methylguanosine-3'-phosphate
  misc_feature 1: note = RNA
  misc_feature 2: note = DNA
  misc_feature 3..4: note = RNA
  misc_feature 5: note = DNA
  misc_feature 6: note = RNA
  misc_feature 7: note = DNA
  misc_feature 8..11: note = RNA
  misc_feature 12: note = DNA
  misc_feature 13..23: note = RNA
agtcattgctcaatttttgcagg

SEQ ID NO: 2489 - DNA, 23 bp, synthetic construct
  source 1..23: mol_type = other DNA
  modified_base 1: mod_base = OTHER; note = 2'-O-methyladenosine-3'-phosphorothioate
  modified_base 2: mod_base = OTHER; note = 2'-deoxyadenosine-3'-phosphorothioate
  modified_base 3: mod_base = OTHER; note = 2'-O-methyladenosine-3'-phosphate
  modified_base 4: mod_base = OTHER; note = 2'-O-methyladenosine-3'-phosphate
  modified_base 6: mod_base = OTHER; note = 2'-O-methyluridine-3'-phosphate
  modified_base 8: mod_base = OTHER; note = 2'-O-methylcytidine-3'-phosphate
  modified_base 9: mod_base = OTHER; note = 2'-O-methyluridine-3'-phosphate
  modified_base 10: mod_base = OTHER; note = 2'-O-methylguanosine-3'-phosphate
  modified_base 11: mod_base = OTHER; note = 2'-O-methyluridine-3'-phosphate
  modified_base 13: mod_base = OTHER; note = 2'-O-methylcytidine-3'-phosphate
  modified_base 14: mod_base = OTHER; note = 2'-fluoroadenosine-3'-phosphate
  modified_base 15: mod_base = OTHER; note = 2'-O-methylguanosine-3'-phosphate
  modified_base 16: mod_base = OTHER; note = 2'-O-methylcytidine-3'-phosphate
  modified_base 17: mod_base = OTHER; note = 2'-O-methyladenosine-3'-phosphate
  modified_base 18: mod_base = OTHER; note = 2'-O-methylcytidine-3'-phosphate
  modified_base 19: mod_base = OTHER; note = 2'-O-methylcytidine-3'-phosphate
  modified_base 20: mod_base = OTHER; note = 2'-O-methyluridine-3'-phosphate
  modified_base 21: mod_base = OTHER; note = 2'-O-methylcytidine-3'-phosphorothioate
  modified_base 22: mod_base = OTHER; note = 2'-O-methylcytidine-3'-phosphorothioate
  modified_base 23: mod_base = OTHER; note = 2'-O-methylcytidine-3'-phosphate
  misc_feature 1: note = RNA
  misc_feature 2: note = DNA
  misc_feature 3..4: note = RNA
  misc_feature 5: note = DNA
  misc_feature 6: note = RNA
  misc_feature 7: note = DNA
  misc_feature 8..11: note = RNA
  misc_feature 12: note = DNA
  misc_feature 13..23: note = RNA
aaaaatgctgttcagcacctccc

SEQ ID NO: 2490 - DNA, 23 bp, synthetic construct
  source 1..23: mol_type = other DNA
  modified_base 1: mod_base = OTHER; note = 2'-O-methyladenosine-3'-phosphorothioate
  modified_base 2: mod_base = OTHER; note = 2'-deoxyadenosine-3'-phosphorothioate
  modified_base 3: mod_base = OTHER; note = 2'-O-methyladenosine-3'-phosphate
  modified_base 4: mod_base = OTHER; note = 2'-O-methyladenosine-3'-phosphate
  modified_base 6: mod_base = OTHER; note = 2'-O-methyladenosine-3'-phosphate
  modified_base 8: mod_base = OTHER; note = 2'-O-methylguanosine-3'-phosphate
  modified_base 9: mod_base = OTHER; note = 2'-O-methylcytidine-3'-phosphate
  modified_base 10: mod_base = OTHER; note = 2'-O-methyluridine-3'-phosphate
  modified_base 11: mod_base = OTHER; note = 2'-O-methylguanosine-3'-phosphate
  modified_base 13: mod_base = OTHER; note = 2'-O-methyluridine-3'-phosphate
  modified_base 14: mod_base = OTHER; note = 2'-fluorocytidine-3'-phosphate
  modified_base 15: mod_base = OTHER; note = 2'-O-methyladenosine-3'-phosphate
  modified_base 16: mod_base = OTHER; note = 2'-O-methylguanosine-3'-phosphate
  modified_base 17: mod_base = OTHER; note = 2'-O-methylcytidine-3'-phosphate
  modified_base 18: mod_base = OTHER; note = 2'-O-methyladenosine-3'-phosphate
  modified_base 19: mod_base = OTHER; note = 2'-O-methylcytidine-3'-phosphate
  modified_base 20: mod_base = OTHER; note = 2'-O-methylcytidine-3'-phosphate
  modified_base 21: mod_base = OTHER; note = 2'-O-methyluridine-3'-phosphorothioate
  modified_base 22: mod_base = OTHER; note = 2'-O-methylcytidine-3'-phosphorothioate
  modified_base 23: mod_base = OTHER; note = 2'-O-methylcytidine-3'-phosphate
  misc_feature 1: note = RNA
  misc_feature 2: note = DNA
  misc_feature 3..4: note = RNA
  misc_feature 5: note = DNA
  misc_feature 6: note = RNA
  misc_feature 7: note = DNA
  misc_feature 8..11: note = RNA
  misc_feature 12: note = DNA
  misc_feature 13..23: note = RNA
aaaaaatgctgttcagcacctcc

SEQ ID NO: 2491 - DNA, 23 bp, synthetic construct
  source 1..23: mol_type = other DNA
  modified_base 1: mod_base = OTHER; note = 2'-O-methyladenosine-3'-phosphorothioate
  modified_base 2: mod_base = OTHER; note = 2'-deoxyadenosine-3'-phosphorothioate
  modified_base 3: mod_base = OTHER; note = 2'-O-methyladenosine-3'-phosphate
  modified_base 4: mod_base = OTHER; note = 2'-O-methyladenosine-3'-phosphate
  modified_base 6: mod_base = OTHER; note = 2'-O-methyladenosine-3'-phosphate
  modified_base 8: mod_base = OTHER; note = 2'-O-methyluridine-3'-phosphate
  modified_base 9: mod_base = OTHER; note = 2'-O-methylguanosine-3'-phosphate
  modified_base 10: mod_base = OTHER; note = 2'-O-methylcytidine-3'-phosphate
  modified_base 11: mod_base = OTHER; note = 2'-O-methyluridine-3'-phosphate
  modified_base 13: mod_base = OTHER; note = 2'-O-methyluridine-3'-phosphate
  modified_base 14: mod_base = OTHER; note = 2'-fluorouridine-3'-phosphate
  modified_base 15: mod_base = OTHER; note = 2'-O-methylcytidine-3'-phosphate
  modified_base 16: mod_base = OTHER; note = 2'-O-methyladenosine-3'-phosphate
  modified_base 17: mod_base = OTHER; note = 2'-O-methylguanosine-3'-phosphate
  modified_base 18: mod_base = OTHER; note = 2'-O-methylcytidine-3'-phosphate
  modified_base 19: mod_base = OTHER; note = 2'-O-methyladenosine-3'-phosphate
  modified_base 20: mod_base = OTHER; note = 2'-O-methylcytidine-3'-phosphate
  modified_base 21: mod_base = OTHER; note = 2'-O-methylcytidine-3'-phosphorothioate
  modified_base 22: mod_base = OTHER; note = 2'-O-methyluridine-3'-phosphorothioate
  modified_base 23: mod_base = OTHER; note = 2'-O-methylcytidine-3'-phosphate
  misc_feature 1: note = RNA
  misc_feature 2: note = DNA
  misc_feature 3..4: note = RNA
  misc_feature 5: note = DNA
  misc_feature 6: note = RNA
  misc_feature 7: note = DNA
  misc_feature 8..11: note = RNA
  misc_feature 12: note = DNA
  misc_feature 13..23: note = RNA
aaaaaaatgctgttcagcacctc

SEQ ID NO: 2492 - DNA, 23 bp, synthetic construct
  source 1..23: mol_type = other DNA
  modified_base 1: mod_base = OTHER; note = 2'-O-methyladenosine-3'-phosphorothioate
  modified_base 2: mod_base = OTHER; note = 2'-deoxyadenosine-3'-phosphorothioate
  modified_base 3: mod_base = OTHER; note = 2'-O-methyladenosine-3'-phosphate
  modified_base 4: mod_base = OTHER; note = 2'-O-methyladenosine-3'-phosphate
  modified_base 6: mod_base = OTHER; note = 2'-O-methyladenosine-3'-phosphate
  modified_base 8: mod_base = OTHER; note = 2'-O-methyladenosine-3'-phosphate
  modified_base 9: mod_base = OTHER; note = 2'-O-methyluridine-3'-phosphate
  modified_base 10: mod_base = OTHER; note = 2'-O-methylguanosine-3'-phosphate
  modified_base 11: mod_base = OTHER; note = 2'-O-methylcytidine-3'-phosphate
  modified_base 13: mod_base = OTHER; note = 2'-O-methylguanosine-3'-phosphate
  modified_base 14: mod_base = OTHER; note = 2'-fluorouridine-3'-phosphate
  modified_base 15: mod_base = OTHER; note = 2'-O-methyluridine-3'-phosphate
  modified_base 16: mod_base = OTHER; note = 2'-O-methylcytidine-3'-phosphate
  modified_base 17: mod_base = OTHER; note = 2'-O-methyladenosine-3'-phosphate
  modified_base 18: mod_base = OTHER; note = 2'-O-methylguanosine-3'-phosphate
  modified_base 19: mod_base = OTHER; note = 2'-O-methylcytidine-3'-phosphate
  modified_base 20: mod_base = OTHER; note = 2'-O-methyladenosine-3'-phosphate
  modified_base 21: mod_base = OTHER; note = 2'-O-methylcytidine-3'-phosphorothioate
  modified_base 22: mod_base = OTHER; note = 2'-O-methylcytidine-3'-phosphorothioate
  modified_base 23: mod_base = OTHER; note = 2'-O-methyluridine-3'-phosphate
  misc_feature 1: note = RNA
  misc_feature 2: note = DNA
  misc_feature 3..4: note = RNA
  misc_feature 5: note = DNA
  misc_feature 6: note = RNA
  misc_feature 7: note = DNA
  misc_feature 8..11: note = RNA
  misc_feature 12: note = DNA
  misc_feature 13..23: note = RNA
aaaaaaaatgctgttcagcacct

SEQ ID NO: 2493 - DNA, 23 bp, synthetic construct
  source 1..23: mol_type = other DNA
  modified_base 1: mod_base = OTHER; note = 2'-O-methyladenosine-3'-phosphorothioate
  modified_base 2: mod_base = OTHER; note = 2'-deoxyadenosine-3'-phosphorothioate
  modified_base 3: mod_base = OTHER; note = 2'-O-methyladenosine-3'-phosphate
  modified_base 4: mod_base = OTHER; note = 2'-O-methyladenosine-3'-phosphate
  modified_base 6: mod_base = OTHER; note = 2'-O-methyladenosine-3'-phosphate
  modified_base 8: mod_base = OTHER; note = 2'-O-methyladenosine-3'-phosphate
  modified_base 9: mod_base = OTHER; note = 2'-O-methyladenosine-3'-phosphate
  modified_base 10: mod_base = OTHER; note = 2'-O-methyluridine-3'-phosphate
  modified_base 11: mod_base = OTHER; note = 2'-O-methylguanosine-3'-phosphate
  modified_base 13: mod_base = OTHER; note = 2'-O-methyluridine-3'-phosphate
  modified_base 14: mod_base = OTHER; note = 2'-fluoroguanosine-3'-phosphate
  modified_base 15: mod_base = OTHER; note = 2'-O-methyluridine-3'-phosphate
  modified_base 16: mod_base = OTHER; note = 2'-O-methyluridine-3'-phosphate
  modified_base 17: mod_base = OTHER; note = 2'-O-methylcytidine-3'-phosphate
  modified_base 18: mod_base = OTHER; note = 2'-O-methyladenosine-3'-phosphate
  modified_base 19: mod_base = OTHER; note = 2'-O-methylguanosine-3'-phosphate
  modified_base 20: mod_base = OTHER; note = 2'-O-methylcytidine-3'-phosphate
  modified_base 21: mod_base = OTHER; note = 2'-O-methyladenosine-3'-phosphorothioate
  modified_base 22: mod_base = OTHER; note = 2'-O-methylcytidine-3'-phosphorothioate
  modified_base 23: mod_base = OTHER; note = 2'-O-methylcytidine-3'-phosphate
  misc_feature 1: note = RNA
  misc_feature 2: note = DNA
  misc_feature 3..4: note = RNA
  misc_feature 5: note = DNA
  misc_feature 6: note = RNA
  misc_feature 7: note = DNA
  misc_feature 8..11: note = RNA
  misc_feature 12: note = DNA
  misc_feature 13..23: note = RNA
aaaaaaaaatgctgttcagcacc

SEQ ID NO: 2494 - DNA, 23 bp, synthetic construct
  source 1..23: mol_type = other DNA
  modified_base 1: mod_base = OTHER; note = 2'-O-methyladenosine-3'-phosphorothioate
  modified_base 2: mod_base = OTHER; note = 2'-deoxycytidine-3'-phosphorothioate
  modified_base 3: mod_base = OTHER; note = 2'-O-methyladenosine-3'-phosphate
  modified_base 4: mod_base = OTHER; note = 2'-O-methyladenosine-3'-phosphate
  modified_base 6: mod_base = OTHER; note = 2'-O-methyladenosine-3'-phosphate
  modified_base 8: mod_base = OTHER; note = 2'-O-methyladenosine-3'-phosphate
  modified_base 9: mod_base = OTHER; note = 2'-O-methyladenosine-3'-phosphate
  modified_base 10: mod_base = OTHER; note = 2'-O-methyladenosine-3'-phosphate
  modified_base 11: mod_base = OTHER; note = 2'-O-methyluridine-3'-phosphate
  modified_base 13: mod_base = OTHER; note = 2'-O-methylcytidine-3'-phosphate
  modified_base 14: mod_base = OTHER; note = 2'-fluorouridine-3'-phosphate
  modified_base 15: mod_base = OTHER; note = 2'-O-methylguanosine-3'-phosphate
  modified_base 16: mod_base = OTHER; note = 2'-O-methyluridine-3'-phosphate
  modified_base 17: mod_base = OTHER; note = 2'-O-methyluridine-3'-phosphate
  modified_base 18: mod_base = OTHER; note = 2'-O-methylcytidine-3'-phosphate
  modified_base 19: mod_base = OTHER; note = 2'-O-methyladenosine-3'-phosphate
  modified_base 20: mod_base = OTHER; note = 2'-O-methylguanosine-3'-phosphate
  modified_base 21: mod_base = OTHER; note = 2'-O-methylcytidine-3'-phosphorothioate
  modified_base 22: mod_base = OTHER; note = 2'-O-methyladenosine-3'-phosphorothioate
  modified_base 23: mod_base = OTHER; note = 2'-O-methylcytidine-3'-phosphate
  misc_feature 1: note = RNA
  misc_feature 2: note = DNA
  misc_feature 3..4: note = RNA
  misc_feature 5: note = DNA
  misc_feature 6: note = RNA
  misc_feature 7: note = DNA
  misc_feature 8..11: note = RNA
  misc_feature 12: note = DNA
  misc_feature 13..23: note = RNA
acaaaaaaaatgctgttcagcac

SEQ ID NO: 2495 - DNA, 23 bp, synthetic construct
  source 1..23: mol_type = other DNA
  modified_base 1: mod_base = OTHER; note = 2'-O-methyladenosine-3'-phosphorothioate
  modified_base 2: mod_base = OTHER; note = 2'-deoxythimidine-3'-phosphorothioate
  modified_base 3: mod_base = OTHER; note = 2'-O-methylcytidine-3'-phosphate
  modified_base 4: mod_base = OTHER; note = 2'-O-methyladenosine-3'-phosphate
  modified_base 6: mod_base = OTHER; note = 2'-O-methyladenosine-3'-phosphate
  modified_base 8: mod_base = OTHER; note = 2'-O-methyladenosine-3'-phosphate
  modified_base 9: mod_base = OTHER; note = 2'-O-methyladenosine-3'-phosphate
  modified_base 10: mod_base = OTHER; note = 2'-O-methyladenosine-3'-phosphate
  modified_base 11: mod_base = OTHER; note = 2'-O-methyladenosine-3'-phosphate
  modified_base 13: mod_base = OTHER; note = 2'-O-methylguanosine-3'-phosphate
  modified_base 14: mod_base = OTHER; note = 2'-fluorocytidine-3'-phosphate
  modified_base 15: mod_base = OTHER; note = 2'-O-methyluridine-3'-phosphate
  modified_base 16: mod_base = OTHER; note = 2'-O-methylguanosine-3'-phosphate
  modified_base 17: mod_base = OTHER; note = 2'-O-methyluridine-3'-phosphate
  modified_base 18: mod_base = OTHER; note = 2'-O-methyluridine-3'-phosphate
  modified_base 19: mod_base = OTHER; note = 2'-O-methylcytidine-3'-phosphate
  modified_base 20: mod_base = OTHER; note = 2'-O-methyladenosine-3'-phosphate
  modified_base 21: mod_base = OTHER; note = 2'-O-methylguanosine-3'-phosphorothioate
  modified_base 22: mod_base = OTHER; note = 2'-O-methylcytidine-3'-phosphorothioate
  modified_base 23: mod_base = OTHER; note = 2'-O-methyladenosine-3'-phosphate
  misc_feature 1: note = RNA
  misc_feature 2: note = DNA
  misc_feature 3..4: note = RNA
  misc_feature 5: note = DNA
  misc_feature 6: note = RNA
  misc_feature 7: note = DNA
  misc_feature 8..11: note = RNA
  misc_feature 12: note = DNA
  misc_feature 13..23: note = RNA
atcaaaaaaaatgctgttcagca

SEQ ID NO: 2496 - DNA, 23 bp, synthetic construct
  source 1..23: mol_type = other DNA
  modified_base 1: mod_base = OTHER; note = 2'-O-methyladenosine-3'-phosphorothioate
  modified_base 2: mod_base = OTHER; note = 2'-deoxyadenosine-3'-phosphorothioate
  modified_base 3: mod_base = OTHER; note = 2'-O-methylcytidine-3'-phosphate
  modified_base 4: mod_base = OTHER; note = 2'-O-methyluridine-3'-phosphate
  modified_base 6: mod_base = OTHER; note = 2'-O-methyluridine-3'-phosphate
  modified_base 8: mod_base = OTHER; note = 2'-O-methyluridine-3'-phosphate
  modified_base 9: mod_base = OTHER; note = 2'-O-methylguanosine-3'-phosphate
  modified_base 10: mod_base = OTHER; note = 2'-O-methylguanosine-3'-phosphate
  modified_base 11: mod_base = OTHER; note = 2'-O-methylguanosine-3'-phosphate
  modified_base 13: mod_base = OTHER; note = 2'-O-methyluridine-3'-phosphate
  modified_base 14: mod_base = OTHER; note = 2'-fluorocytidine-3'-phosphate
  modified_base 15: mod_base = OTHER; note = 2'-O-methyluridine-3'-phosphate
  modified_base 16: mod_base = OTHER; note = 2'-O-methylcytidine-3'-phosphate
  modified_base 17: mod_base = OTHER; note = 2'-O-methyluridine-3'-phosphate
  modified_base 18: mod_base = OTHER; note = 2'-O-methylcytidine-3'-phosphate
  modified_base 19: mod_base = OTHER; note = 2'-O-methyluridine-3'-phosphate
  modified_base 20: mod_base = OTHER; note = 2'-O-methylcytidine-3'-phosphate
  modified_base 21: mod_base = OTHER; note = 2'-O-methyladenosine-3'-phosphorothioate
  modified_base 22: mod_base = OTHER; note = 2'-O-methyluridine-3'-phosphorothioate
  modified_base 23: mod_base = OTHER; note = 2'-O-methylcytidine-3'-phosphate
  misc_feature 1: note = RNA
  misc_feature 2: note = DNA
  misc_feature 3..4: note = RNA
  misc_feature 5: note = DNA
  misc_feature 6: note = RNA
  misc_feature 7: note = DNA
  misc_feature 8..11: note = RNA
  misc_feature 12: note = DNA
  misc_feature 13..23: note = RNA
aactctgtgggctctctctcatc

SEQ ID NO: 2497 - DNA, 23 bp, synthetic construct
  source 1..23: mol_type = other DNA
  modified_base 1: mod_base = OTHER; note = 2'-O-methyladenosine-3'-phosphorothioate
  modified_base 2: mod_base = OTHER; note = 2'-deoxyadenosine-3'-phosphorothioate
  modified_base 3: mod_base = OTHER; note = 2'-O-methylguanosine-3'-phosphate
  modified_base 4: mod_base = OTHER; note = 2'-O-methyladenosine-3'-phosphate
  modified_base 6: mod_base = OTHER; note = 2'-O-methyluridine-3'-phosphate
  modified_base 8: mod_base = OTHER; note = 2'-O-methyluridine-3'-phosphate
  modified_base 9: mod_base = OTHER; note = 2'-O-methylguanosine-3'-phosphate
  modified_base 10: mod_base = OTHER; note = 2'-O-methyluridine-3'-phosphate
  modified_base 11: mod_base = OTHER; note = 2'-O-methylguanosine-3'-phosphate
  modified_base 13: mod_base = OTHER; note = 2'-O-methylguanosine-3'-phosphate
  modified_base 14: mod_base = OTHER; note = 2'-fluorocytidine-3'-phosphate
  modified_base 15: mod_base = OTHER; note = 2'-O-methyluridine-3'-phosphate
  modified_base 16: mod_base = OTHER; note = 2'-O-methylcytidine-3'-phosphate
  modified_base 17: mod_base = OTHER; note = 2'-O-methyluridine-3'-phosphate
  modified_base 18: mod_base = OTHER; note = 2'-O-methylcytidine-3'-phosphate
  modified_base 19: mod_base = OTHER; note = 2'-O-methyluridine-3'-phosphate
  modified_base 20: mod_base = OTHER; note = 2'-O-methylcytidine-3'-phosphate
  modified_base 21: mod_base = OTHER; note = 2'-O-methyluridine-3'-phosphorothioate
  modified_base 22: mod_base = OTHER; note = 2'-O-methylcytidine-3'-phosphorothioate
  modified_base 23: mod_base = OTHER; note = 2'-O-methyladenosine-3'-phosphate
  misc_feature 1: note = RNA
  misc_feature 2: note = DNA
  misc_feature 3..4: note = RNA
  misc_feature 5: note = DNA
  misc_feature 6: note = RNA
  misc_feature 7: note = DNA
  misc_feature 8..11: note = RNA
  misc_feature 12: note = DNA
  misc_feature 13..23: note = RNA
aagactctgtgggctctctctca

SEQ ID NO: 2498 - DNA, 23 bp, synthetic construct
  source 1..23: mol_type = other DNA
  modified_base 1: mod_base = OTHER; note = 2'-O-methyladenosine-3'-phosphorothioate
  modified_base 2: mod_base = OTHER; note = 2'-deoxythimidine-3'-phosphorothioate
  modified_base 3: mod_base = OTHER; note = 2'-O-methyladenosine-3'-phosphate
  modified_base 4: mod_base = OTHER; note = 2'-O-methylguanosine-3'-phosphate
  modified_base 6: mod_base = OTHER; note = 2'-O-methylcytidine-3'-phosphate
  modified_base 8: mod_base = OTHER; note = 2'-O-methylcytidine-3'-phosphate
  modified_base 9: mod_base = OTHER; note = 2'-O-methyluridine-3'-phosphate
  modified_base 10: mod_base = OTHER; note = 2'-O-methylguanosine-3'-phosphate
  modified_base 11: mod_base = OTHER; note = 2'-O-methyluridine-3'-phosphate
  modified_base 13: mod_base = OTHER; note = 2'-O-methylguanosine-3'-phosphate
  modified_base 14: mod_base = OTHER; note = 2'-fluoroguanosine-3'-phosphate
  modified_base 15: mod_base = OTHER; note = 2'-O-methylcytidine-3'-phosphate
  modified_base 16: mod_base = OTHER; note = 2'-O-methyluridine-3'-phosphate
  modified_base 17: mod_base = OTHER; note = 2'-O-methylcytidine-3'-phosphate
  modified_base 18: mod_base = OTHER; note = 2'-O-methyluridine-3'-phosphate
  modified_base 19: mod_base = OTHER; note = 2'-O-methylcytidine-3'-phosphate
  modified_base 20: mod_base = OTHER; note = 2'-O-methyluridine-3'-phosphate
  modified_base 21: mod_base = OTHER; note = 2'-O-methylcytidine-3'-phosphorothioate
  modified_base 22: mod_base = OTHER; note = 2'-O-methyluridine-3'-phosphorothioate
  modified_base 23: mod_base = OTHER; note = 2'-O-methylcytidine-3'-phosphate
  misc_feature 1: note = RNA
  misc_feature 2: note = DNA
  misc_feature 3..4: note = RNA
  misc_feature 5: note = DNA
  misc_feature 6: note = RNA
  misc_feature 7: note = DNA
  misc_feature 8..11: note = RNA
  misc_feature 12: note = DNA
  misc_feature 13..23: note = RNA
atagactctgtgggctctctctc

SEQ ID NO: 2499 - DNA, 23 bp, synthetic construct
  source 1..23: mol_type = other DNA
  modified_base 1: mod_base = OTHER; note = 2'-O-methyladenosine-3'-phosphorothioate
  modified_base 2: mod_base = OTHER; note = 2'-deoxycytidine-3'-phosphorothioate
  modified_base 3: mod_base = OTHER; note = 2'-O-methyladenosine-3'-phosphate
  modified_base 4: mod_base = OTHER; note = 2'-O-methyladenosine-3'-phosphate
  modified_base 6: mod_base = OTHER; note = 2'-O-methylcytidine-3'-phosphate
  modified_base 8: mod_base = OTHER; note = 2'-O-methylguanosine-3'-phosphate
  modified_base 9: mod_base = OTHER; note = 2'-O-methylguanosine-3'-phosphate
  modified_base 10: mod_base = OTHER; note = 2'-O-methyladenosine-3'-phosphate
  modified_base 11: mod_base = OTHER; note = 2'-O-methyladenosine-3'-phosphate
  modified_base 13: mod_base = OTHER; note = 2'-O-methylguanosine-3'-phosphate
  modified_base 14: mod_base = OTHER; note = 2'-fluoroguanosine-3'-phosphate
  modified_base 15: mod_base = OTHER; note = 2'-O-methylguanosine-3'-phosphate
  modified_base 16: mod_base = OTHER; note = 2'-O-methylcytidine-3'-phosphate
  modified_base 17: mod_base = OTHER; note = 2'-O-methylguanosine-3'-phosphate
  modified_base 18: mod_base = OTHER; note = 2'-O-methylguanosine-3'-phosphate
  modified_base 19: mod_base = OTHER; note = 2'-O-methyluridine-3'-phosphate
  modified_base 20: mod_base = OTHER; note = 2'-O-methyluridine-3'-phosphate
  modified_base 21: mod_base = OTHER; note = 2'-O-methylcytidine-3'-phosphorothioate
  modified_base 22: mod_base = OTHER; note = 2'-O-methyladenosine-3'-phosphorothioate
  modified_base 23: mod_base = OTHER; note = 2'-O-methylguanosine-3'-phosphate
  misc_feature 1: note = RNA
  misc_feature 2: note = DNA
  misc_feature 3..4: note = RNA
  misc_feature 5: note = DNA
  misc_feature 6: note = RNA
  misc_feature 7: note = DNA
  misc_feature 8..11: note = RNA
  misc_feature 12: note = DNA
  misc_feature 13..23: note = RNA
acaaacaggaatgggcggttcag

SEQ ID NO: 2500 - DNA, 23 bp, synthetic construct
  source 1..23: mol_type = other DNA
  modified_base 1: mod_base = OTHER; note = 2'-O-methyladenosine-3'-phosphorothioate
  modified_base 2: mod_base = OTHER; note = 2'-deoxyguanosine-3'-phosphorothioate
  modified_base 3: mod_base = OTHER; note = 2'-O-methylcytidine-3'-phosphate
  modified_base 4: mod_base = OTHER; note = 2'-O-methyladenosine-3'-phosphate
  modified_base 6: mod_base = OTHER; note = 2'-O-methyladenosine-3'-phosphate
  modified_base 8: mod_base = OTHER; note = 2'-O-methyladenosine-3'-phosphate
  modified_base 9: mod_base = OTHER; note = 2'-O-methylguanosine-3'-phosphate
  modified_base 10: mod_base = OTHER; note = 2'-O-methylguanosine-3'-phosphate
  modified_base 11: mod_base = OTHER; note = 2'-O-methyladenosine-3'-phosphate
  modified_base 13: mod_base = OTHER; note = 2'-O-methyluridine-3'-phosphate
  modified_base 14: mod_base = OTHER; note = 2'-fluoroguanosine-3'-phosphate
  modified_base 15: mod_base = OTHER; note = 2'-O-methylguanosine-3'-phosphate
  modified_base 16: mod_base = OTHER; note = 2'-O-methylguanosine-3'-phosphate
  modified_base 17: mod_base = OTHER; note = 2'-O-methylcytidine-3'-phosphate
  modified_base 18: mod_base = OTHER; note = 2'-O-methylguanosine-3'-phosphate
  modified_base 19: mod_base = OTHER; note = 2'-O-methylguanosine-3'-phosphate
  modified_base 20: mod_base = OTHER; note = 2'-O-methyluridine-3'-phosphate
  modified_base 21: mod_base = OTHER; note = 2'-O-methyluridine-3'-phosphorothioate
  modified_base 22: mod_base = OTHER; note = 2'-O-methylcytidine-3'-phosphorothioate
  modified_base 23: mod_base = OTHER; note = 2'-O-methyladenosine-3'-phosphate
  misc_feature 1: note = RNA
  misc_feature 2: note = DNA
  misc_feature 3..4: note = RNA
  misc_feature 5: note = DNA
  misc_feature 6: note = RNA
  misc_feature 7: note = DNA
  misc_feature 8..11: note = RNA
  misc_feature 12: note = DNA
  misc_feature 13..23: note = RNA
agcaaacaggaatgggcggttca

SEQ ID NO: 2501 - DNA, 23 bp, synthetic construct
  source 1..23: mol_type = other DNA
  modified_base 1: mod_base = OTHER; note = 2'-O-methyladenosine-3'-phosphorothioate
  modified_base 2: mod_base = OTHER; note = 2'-deoxyadenosine-3'-phosphorothioate
  modified_base 3: mod_base = OTHER; note = 2'-O-methylguanosine-3'-phosphate
  modified_base 4: mod_base = OTHER; note = 2'-O-methylcytidine-3'-phosphate
  modified_base 6: mod_base = OTHER; note = 2'-O-methyladenosine-3'-phosphate
  modified_base 8: mod_base = OTHER; note = 2'-O-methylcytidine-3'-phosphate
  modified_base 9: mod_base = OTHER; note = 2'-O-methyladenosine-3'-phosphate
  modified_base 10: mod_base = OTHER; note = 2'-O-methylguanosine-3'-phosphate
  modified_base 11: mod_base = OTHER; note = 2'-O-methylguanosine-3'-phosphate
  modified_base 13: mod_base = OTHER; note = 2'-O-methyladenosine-3'-phosphate
  modified_base 14: mod_base = OTHER; note = 2'-fluorouridine-3'-phosphate
  modified_base 15: mod_base = OTHER; note = 2'-O-methylguanosine-3'-phosphate
  modified_base 16: mod_base = OTHER; note = 2'-O-methylguanosine-3'-phosphate
  modified_base 17: mod_base = OTHER; note = 2'-O-methylguanosine-3'-phosphate
  modified_base 18: mod_base = OTHER; note = 2'-O-methylcytidine-3'-phosphate
  modified_base 19: mod_base = OTHER; note = 2'-O-methylguanosine-3'-phosphate
  modified_base 20: mod_base = OTHER; note = 2'-O-methylguanosine-3'-phosphate
  modified_base 21: mod_base = OTHER; note = 2'-O-methyluridine-3'-phosphorothioate
  modified_base 22: mod_base = OTHER; note = 2'-O-methyluridine-3'-phosphorothioate
  modified_base 23: mod_base = OTHER; note = 2'-O-methylcytidine-3'-phosphate
  misc_feature 1: note = RNA
  misc_feature 2: note = DNA
  misc_feature 3..4: note = RNA
  misc_feature 5: note = DNA
  misc_feature 6: note = RNA
  misc_feature 7: note = DNA
  misc_feature 8..11: note = RNA
  misc_feature 12: note = DNA
  misc_feature 13..23: note = RNA
aagcaaacaggaatgggcggttc

SEQ ID NO: 2502 - DNA, 23 bp, synthetic construct
  source 1..23: mol_type = other DNA
  modified_base 1: mod_base = OTHER; note = 2'-O-methyladenosine-3'-phosphorothioate
  modified_base 2: mod_base = OTHER; note = 2'-deoxycytidine-3'-phosphorothioate
  modified_base 3: mod_base = OTHER; note = 2'-O-methyladenosine-3'-phosphate
  modified_base 4: mod_base = OTHER; note = 2'-O-methylguanosine-3'-phosphate
  modified_base 6: mod_base = OTHER; note = 2'-O-methyladenosine-3'-phosphate
  modified_base 8: mod_base = OTHER; note = 2'-O-methyladenosine-3'-phosphate
  modified_base 9: mod_base = OTHER; note = 2'-O-methylcytidine-3'-phosphate
  modified_base 10: mod_base = OTHER; note = 2'-O-methyladenosine-3'-phosphate
  modified_base 11: mod_base = OTHER; note = 2'-O-methylguanosine-3'-phosphate
  modified_base 13: mod_base = OTHER; note = 2'-O-methyladenosine-3'-phosphate
  modified_base 14: mod_base = OTHER; note = 2'-fluoroadenosine-3'-phosphate
  modified_base 15: mod_base = OTHER; note = 2'-O-methyluridine-3'-phosphate
  modified_base 16: mod_base = OTHER; note = 2'-O-methylguanosine-3'-phosphate
  modified_base 17: mod_base = OTHER; note = 2'-O-methylguanosine-3'-phosphate
  modified_base 18: mod_base = OTHER; note = 2'-O-methylguanosine-3'-phosphate
  modified_base 19: mod_base = OTHER; note = 2'-O-methylcytidine-3'-phosphate
  modified_base 20: mod_base = OTHER; note = 2'-O-methylguanosine-3'-phosphate
  modified_base 21: mod_base = OTHER; note = 2'-O-methylguanosine-3'-phosphorothioate
  modified_base 22: mod_base = OTHER; note = 2'-O-methyluridine-3'-phosphorothioate
  modified_base 23: mod_base = OTHER; note = 2'-O-methyluridine-3'-phosphate
  misc_feature 1: note = RNA
  misc_feature 2: note = DNA
  misc_feature 3..4: note = RNA
  misc_feature 5: note = DNA
  misc_feature 6: note = RNA
  misc_feature 7: note = DNA
  misc_feature 8..11: note = RNA
  misc_feature 12: note = DNA
  misc_feature 13..23: note = RNA
acagcaaacaggaatgggcggtt

SEQ ID NO: 2503 - DNA, 23 bp, synthetic construct
  source 1..23: mol_type = other DNA
  modified_base 1: mod_base = OTHER; note = 2'-O-methyladenosine-3'-phosphorothioate
  modified_base 2: mod_base = OTHER; note = 2'-deoxyadenosine-3'-phosphorothioate
  modified_base 3: mod_base = OTHER; note = 2'-O-methylcytidine-3'-phosphate
  modified_base 4: mod_base = OTHER; note = 2'-O-methyladenosine-3'-phosphate
  modified_base 6: mod_base = OTHER; note = 2'-O-methylcytidine-3'-phosphate
  modified_base 8: mod_base = OTHER; note = 2'-O-methyladenosine-3'-phosphate
  modified_base 9: mod_base = OTHER; note = 2'-O-methyladenosine-3'-phosphate
  modified_base 10: mod_base = OTHER; note = 2'-O-methylcytidine-3'-phosphate
  modified_base 11: mod_base = OTHER; note = 2'-O-methyladenosine-3'-phosphate
  modified_base 13: mod_base = OTHER; note = 2'-O-methylguanosine-3'-phosphate
  modified_base 14: mod_base = OTHER; note = 2'-fluoroadenosine-3'-phosphate
  modified_base 15: mod_base = OTHER; note = 2'-O-methyladenosine-3'-phosphate
  modified_base 16: mod_base = OTHER; note = 2'-O-methyluridine-3'-phosphate
  modified_base 17: mod_base = OTHER; note = 2'-O-methylguanosine-3'-phosphate
  modified_base 18: mod_base = OTHER; note = 2'-O-methylguanosine-3'-phosphate
  modified_base 19: mod_base = OTHER; note = 2'-O-methylguanosine-3'-phosphate
  modified_base 20: mod_base = OTHER; note = 2'-O-methylcytidine-3'-phosphate
  modified_base 21: mod_base = OTHER; note = 2'-O-methylguanosine-3'-phosphorothioate
  modified_base 22: mod_base = OTHER; note = 2'-O-methylguanosine-3'-phosphorothioate
  modified_base 23: mod_base = OTHER; note = 2'-O-methyluridine-3'-phosphate
  misc_feature 1: note = RNA
  misc_feature 2: note = DNA
  misc_feature 3..4: note = RNA
  misc_feature 5: note = DNA
  misc_feature 6: note = RNA
  misc_feature 7: note = DNA
  misc_feature 8..11: note = RNA
  misc_feature 12: note = DNA
  misc_feature 13..23: note = RNA
aacagcaaacaggaatgggcggt

SEQ ID NO: 2504 - DNA, 23 bp, synthetic construct
  source 1..23: mol_type = other DNA
  modified_base 1: mod_base = OTHER; note = 2'-O-methyladenosine-3'-phosphorothioate
  modified_base 2: mod_base = OTHER; note = 2'-deoxycytidine-3'-phosphorothioate
  modified_base 3: mod_base = OTHER; note = 2'-O-methyladenosine-3'-phosphate
  modified_base 4: mod_base = OTHER; note = 2'-O-methylcytidine-3'-phosphate
  modified_base 6: mod_base = OTHER; note = 2'-O-methylguanosine-3'-phosphate
  modified_base 8: mod_base = OTHER; note = 2'-O-methyladenosine-3'-phosphate
  modified_base 9: mod_base = OTHER; note = 2'-O-methyladenosine-3'-phosphate
  modified_base 10: mod_base = OTHER; note = 2'-O-methyladenosine-3'-phosphate
  modified_base 11: mod_base = OTHER; note = 2'-O-methylcytidine-3'-phosphate
  modified_base 13: mod_base = OTHER; note = 2'-O-methylguanosine-3'-phosphate
  modified_base 14: mod_base = OTHER; note = 2'-fluoroguanosine-3'-phosphate
  modified_base 15: mod_base = OTHER; note = 2'-O-methyladenosine-3'-phosphate
  modified_base 16: mod_base = OTHER; note = 2'-O-methyladenosine-3'-phosphate
  modified_base 17: mod_base = OTHER; note = 2'-O-methyluridine-3'-phosphate
  modified_base 18: mod_base = OTHER; note = 2'-O-methylguanosine-3'-phosphate
  modified_base 19: mod_base = OTHER; note = 2'-O-methylguanosine-3'-phosphate
  modified_base 20: mod_base = OTHER; note = 2'-O-methylguanosine-3'-phosphate
  modified_base 21: mod_base = OTHER; note = 2'-O-methylcytidine-3'-phosphorothioate
  modified_base 22: mod_base = OTHER; note = 2'-O-methylguanosine-3'-phosphorothioate
  modified_base 23: mod_base = OTHER; note = 2'-O-methylguanosine-3'-phosphate
  misc_feature 1: note = RNA
  misc_feature 2: note = DNA
  misc_feature 3..4: note = RNA
  misc_feature 5: note = DNA
  misc_feature 6: note = RNA
  misc_feature 7: note = DNA
  misc_feature 8..11: note = RNA
  misc_feature 12: note = DNA
  misc_feature 13..23: note = RNA
acacagcaaacaggaatgggcgg

SEQ ID NO: 2505 - DNA, 23 bp, synthetic construct
  source 1..23: mol_type = other DNA
  modified_base 1: mod_base = OTHER; note = 2'-O-methyladenosine-3'-phosphorothioate
  modified_base 2: mod_base = OTHER; note = 2'-deoxyadenosine-3'-phosphorothioate
  modified_base 3: mod_base = OTHER; note = 2'-O-methylcytidine-3'-phosphate
  modified_base 4: mod_base = OTHER; note = 2'-O-methyladenosine-3'-phosphate
  modified_base 6: mod_base = OTHER; note = 2'-O-methyladenosine-3'-phosphate
  modified_base 8: mod_base = OTHER; note = 2'-O-methylcytidine-3'-phosphate
  modified_base 9: mod_base = OTHER; note = 2'-O-methyladenosine-3'-phosphate
  modified_base 10: mod_base = OTHER; note = 2'-O-methyladenosine-3'-phosphate
  modified_base 11: mod_base = OTHER; note = 2'-O-methyladenosine-3'-phosphate
  modified_base 13: mod_base = OTHER; note = 2'-O-methyladenosine-3'-phosphate
  modified_base 14: mod_base = OTHER; note = 2'-fluoroguanosine-3'-phosphate
  modified_base 15: mod_base = OTHER; note = 2'-O-methylguanosine-3'-phosphate
  modified_base 16: mod_base = OTHER; note = 2'-O-methyladenosine-3'-phosphate
  modified_base 17: mod_base = OTHER; note = 2'-O-methyladenosine-3'-phosphate
  modified_base 18: mod_base = OTHER; note = 2'-O-methyluridine-3'-phosphate
  modified_base 19: mod_base = OTHER; note = 2'-O-methylguanosine-3'-phosphate
  modified_base 20: mod_base = OTHER; note = 2'-O-methylguanosine-3'-phosphate
  modified_base 21: mod_base = OTHER; note = 2'-O-methylguanosine-3'-phosphorothioate
  modified_base 22: mod_base = OTHER; note = 2'-O-methylcytidine-3'-phosphorothioate
  modified_base 23: mod_base = OTHER; note = 2'-O-methylguanosine-3'-phosphate
  misc_feature 1: note = RNA
  misc_feature 2: note = DNA
  misc_feature 3..4: note = RNA
  misc_feature 5: note = DNA
  misc_feature 6: note = RNA
  misc_feature 7: note = DNA
  misc_feature 8..11: note = RNA
  misc_feature 12: note = DNA
  misc_feature 13..23: note = RNA
aacacagcaaacaggaatgggcg

SEQ ID NO: 2506 - DNA, 23 bp, synthetic construct
  source 1..23: mol_type = other DNA
  modified_base 1: mod_base = OTHER; note = 2'-O-methyladenosine-3'-phosphorothioate
  modified_base 2: mod_base = OTHER; note = 2'-deoxythimidine-3'-phosphorothioate
  modified_base 3: mod_base = OTHER; note = 2'-O-methyladenosine-3'-phosphate
  modified_base 4: mod_base = OTHER; note = 2'-O-methylcytidine-3'-phosphate
  modified_base 6: mod_base = OTHER; note = 2'-O-methylcytidine-3'-phosphate
  modified_base 8: mod_base = OTHER; note = 2'-O-methylguanosine-3'-phosphate
  modified_base 9: mod_base = OTHER; note = 2'-O-methylcytidine-3'-phosphate
  modified_base 10: mod_base = OTHER; note = 2'-O-methyladenosine-3'-phosphate
  modified_base 11: mod_base = OTHER; note = 2'-O-methyladenosine-3'-phosphate
  modified_base 13: mod_base = OTHER; note = 2'-O-methylcytidine-3'-phosphate
  modified_base 14: mod_base = OTHER; note = 2'-fluoroadenosine-3'-phosphate
  modified_base 15: mod_base = OTHER; note = 2'-O-methylguanosine-3'-phosphate
  modified_base 16: mod_base = OTHER; note = 2'-O-methylguanosine-3'-phosphate
  modified_base 17: mod_base = OTHER; note = 2'-O-methyladenosine-3'-phosphate
  modified_base 18: mod_base = OTHER; note = 2'-O-methyladenosine-3'-phosphate
  modified_base 19: mod_base = OTHER; note = 2'-O-methyluridine-3'-phosphate
  modified_base 20: mod_base = OTHER; note = 2'-O-methylguanosine-3'-phosphate
  modified_base 21: mod_base = OTHER; note = 2'-O-methylguanosine-3'-phosphorothioate
  modified_base 22: mod_base = OTHER; note = 2'-O-methylguanosine-3'-phosphorothioate
  modified_base 23: mod_base = OTHER; note = 2'-O-methylcytidine-3'-phosphate
  misc_feature 1: note = RNA
  misc_feature 2: note = DNA
  misc_feature 3..4: note = RNA
  misc_feature 5: note = DNA
  misc_feature 6: note = RNA
  misc_feature 7: note = DNA
  misc_feature 8..11: note = RNA
  misc_feature 12: note = DNA
  misc_feature 13..23: note = RNA
atacacagcaaacaggaatgggc

SEQ ID NO: 2507 - DNA, 23 bp, synthetic construct
  source 1..23: mol_type = other DNA
  modified_base 1: mod_base = OTHER; note = 2'-O-methyladenosine-3'-phosphorothioate
  modified_base 2: mod_base = OTHER; note = 2'-deoxyadenosine-3'-phosphorothioate
  modified_base 3: mod_base = OTHER; note = 2'-O-methyluridine-3'-phosphate
  modified_base 4: mod_base = OTHER; note = 2'-O-methyladenosine-3'-phosphate
  modified_base 6: mod_base = OTHER; note = 2'-O-methyladenosine-3'-phosphate
  modified_base 8: mod_base = OTHER; note = 2'-O-methyladenosine-3'-phosphate
  modified_base 9: mod_base = OTHER; note = 2'-O-methylguanosine-3'-phosphate
  modified_base 10: mod_base = OTHER; note = 2'-O-methylcytidine-3'-phosphate
  modified_base 11: mod_base = OTHER; note = 2'-O-methyladenosine-3'-phosphate
  modified_base 13: mod_base = OTHER; note = 2'-O-methyladenosine-3'-phosphate
  modified_base 14: mod_base = OTHER; note = 2'-fluorocytidine-3'-phosphate
  modified_base 15: mod_base = OTHER; note = 2'-O-methyladenosine-3'-phosphate
  modified_base 16: mod_base = OTHER; note = 2'-O-methylguanosine-3'-phosphate
  modified_base 17: mod_base = OTHER; note = 2'-O-methylguanosine-3'-phosphate
  modified_base 18: mod_base = OTHER; note = 2'-O-methyladenosine-3'-phosphate
  modified_base 19: mod_base = OTHER; note = 2'-O-methyladenosine-3'-phosphate
  modified_base 20: mod_base = OTHER; note = 2'-O-methyluridine-3'-phosphate
  modified_base 21: mod_base = OTHER; note = 2'-O-methylguanosine-3'-phosphorothioate
  modified_base 22: mod_base = OTHER; note = 2'-O-methylguanosine-3'-phosphorothioate
  modified_base 23: mod_base = OTHER; note = 2'-O-methylguanosine-3'-phosphate
  misc_feature 1: note = RNA
  misc_feature 2: note = DNA
  misc_feature 3..4: note = RNA
  misc_feature 5: note = DNA
  misc_feature 6: note = RNA
  misc_feature 7: note = DNA
  misc_feature 8..11: note = RNA
  misc_feature 12: note = DNA
  misc_feature 13..23: note = RNA
aatacacagcaaacaggaatggg

SEQ ID NO: 2508 - DNA, 23 bp, synthetic construct
  source 1..23: mol_type = other DNA
  modified_base 1: mod_base = OTHER; note = 2'-O-methyladenosine-3'-phosphorothioate
  modified_base 2: mod_base = OTHER; note = 2'-deoxycytidine-3'-phosphorothioate
  modified_base 3: mod_base = OTHER; note = 2'-O-methyladenosine-3'-phosphate
  modified_base 4: mod_base = OTHER; note = 2'-O-methyluridine-3'-phosphate
  modified_base 6: mod_base = OTHER; note = 2'-O-methylcytidine-3'-phosphate
  modified_base 8: mod_base = OTHER; note = 2'-O-methylcytidine-3'-phosphate
  modified_base 9: mod_base = OTHER; note = 2'-O-methyladenosine-3'-phosphate
  modified_base 10: mod_base = OTHER; note = 2'-O-methylguanosine-3'-phosphate
  modified_base 11: mod_base = OTHER; note = 2'-O-methylcytidine-3'-phosphate
  modified_base 13: mod_base = OTHER; note = 2'-O-methyladenosine-3'-phosphate
  modified_base 14: mod_base = OTHER; note = 2'-fluoroadenosine-3'-phosphate
  modified_base 15: mod_base = OTHER; note = 2'-O-methylcytidine-3'-phosphate
  modified_base 16: mod_base = OTHER; note = 2'-O-methyladenosine-3'-phosphate
  modified_base 17: mod_base = OTHER; note = 2'-O-methylguanosine-3'-phosphate
  modified_base 18: mod_base = OTHER; note = 2'-O-methylguanosine-3'-phosphate
  modified_base 19: mod_base = OTHER; note = 2'-O-methyladenosine-3'-phosphate
  modified_base 20: mod_base = OTHER; note = 2'-O-methyladenosine-3'-phosphate
  modified_base 21: mod_base = OTHER; note = 2'-O-methyluridine-3'-phosphorothioate
  modified_base 22: mod_base = OTHER; note = 2'-O-methylguanosine-3'-phosphorothioate
  modified_base 23: mod_base = OTHER; note = 2'-O-methylguanosine-3'-phosphate
  misc_feature 1: note = RNA
  misc_feature 2: note = DNA
  misc_feature 3..4: note = RNA
  misc_feature 5: note = DNA
  misc_feature 6: note = RNA
  misc_feature 7: note = DNA
  misc_feature 8..11: note = RNA
  misc_feature 12: note = DNA
  misc_feature 13..23: note = RNA
acatacacagcaaacaggaatgg

SEQ ID NO: 2509 - DNA, 23 bp, synthetic construct
  source 1..23: mol_type = other DNA
  modified_base 1: mod_base = OTHER; note = 2'-O-methyladenosine-3'-phosphorothioate
  modified_base 2: mod_base = OTHER; note = 2'-deoxythimidine-3'-phosphorothioate
  modified_base 3: mod_base = OTHER; note = 2'-O-methylcytidine-3'-phosphate
  modified_base 4: mod_base = OTHER; note = 2'-O-methyladenosine-3'-phosphate
  modified_base 6: mod_base = OTHER; note = 2'-O-methyladenosine-3'-phosphate
  modified_base 8: mod_base = OTHER; note = 2'-O-methyladenosine-3'-phosphate
  modified_base 9: mod_base = OTHER; note = 2'-O-methylcytidine-3'-phosphate
  modified_base 10: mod_base = OTHER; note = 2'-O-methyladenosine-3'-phosphate
  modified_base 11: mod_base = OTHER; note = 2'-O-methylguanosine-3'-phosphate
  modified_base 13: mod_base = OTHER; note = 2'-O-methyladenosine-3'-phosphate
  modified_base 14: mod_base = OTHER; note = 2'-fluoroadenosine-3'-phosphate
  modified_base 15: mod_base = OTHER; note = 2'-O-methyladenosine-3'-phosphate
  modified_base 16: mod_base = OTHER; note = 2'-O-methylcytidine-3'-phosphate
  modified_base 17: mod_base = OTHER; note = 2'-O-methyladenosine-3'-phosphate
  modified_base 18: mod_base = OTHER; note = 2'-O-methylguanosine-3'-phosphate
  modified_base 19: mod_base = OTHER; note = 2'-O-methylguanosine-3'-phosphate
  modified_base 20: mod_base = OTHER; note = 2'-O-methyladenosine-3'-phosphate
  modified_base 21: mod_base = OTHER; note = 2'-O-methyladenosine-3'-phosphorothioate
  modified_base 22: mod_base = OTHER; note = 2'-O-methyluridine-3'-phosphorothioate
  modified_base 23: mod_base = OTHER; note = 2'-O-methylguanosine-3'-phosphate
  misc_feature 1: note = RNA
  misc_feature 2: note = DNA
  misc_feature 3..4: note = RNA
  misc_feature 5: note = DNA
  misc_feature 6: note = RNA
  misc_feature 7: note = DNA
  misc_feature 8..11: note = RNA
  misc_feature 12: note = DNA
  misc_feature 13..23: note = RNA
atcatacacagcaaacaggaatg

SEQ ID NO: 2510 - DNA, 23 bp, synthetic construct
  source 1..23: mol_type = other DNA
  modified_base 1: mod_base = OTHER; note = 2'-O-methyladenosine-3'-phosphorothioate
  modified_base 2: mod_base = OTHER; note = 2'-deoxyadenosine-3'-phosphorothioate
  modified_base 3: mod_base = OTHER; note = 2'-O-methyluridine-3'-phosphate
  modified_base 4: mod_base = OTHER; note = 2'-O-methylcytidine-3'-phosphate
  modified_base 6: mod_base = OTHER; note = 2'-O-methyluridine-3'-phosphate
  modified_base 8: mod_base = OTHER; note = 2'-O-methylcytidine-3'-phosphate
  modified_base 9: mod_base = OTHER; note = 2'-O-methyladenosine-3'-phosphate
  modified_base 10: mod_base = OTHER; note = 2'-O-methylcytidine-3'-phosphate
  modified_base 11: mod_base = OTHER; note = 2'-O-methyladenosine-3'-phosphate
  modified_base 13: mod_base = OTHER; note = 2'-O-methylcytidine-3'-phosphate
  modified_base 14: mod_base = OTHER; note = 2'-fluoroadenosine-3'-phosphate
  modified_base 15: mod_base = OTHER; note = 2'-O-methyladenosine-3'-phosphate
  modified_base 16: mod_base = OTHER; note = 2'-O-methyladenosine-3'-phosphate
  modified_base 17: mod_base = OTHER; note = 2'-O-methylcytidine-3'-phosphate
  modified_base 18: mod_base = OTHER; note = 2'-O-methyladenosine-3'-phosphate
  modified_base 19: mod_base = OTHER; note = 2'-O-methylguanosine-3'-phosphate
  modified_base 20: mod_base = OTHER; note = 2'-O-methylguanosine-3'-phosphate
  modified_base 21: mod_base = OTHER; note = 2'-O-methyladenosine-3'-phosphorothioate
  modified_base 22: mod_base = OTHER; note = 2'-O-methyladenosine-3'-phosphorothioate
  modified_base 23: mod_base = OTHER; note = 2'-O-methyluridine-3'-phosphate
  misc_feature 1: note = RNA
  misc_feature 2: note = DNA
  misc_feature 3..4: note = RNA
  misc_feature 5: note = DNA
  misc_feature 6: note = RNA
  misc_feature 7: note = DNA
  misc_feature 8..11: note = RNA
  misc_feature 12: note = DNA
  misc_feature 13..23: note = RNA
aatcatacacagcaaacaggaat

SEQ ID NO: 2511 - DNA, 23 bp, synthetic construct
  source 1..23: mol_type = other DNA
  modified_base 1: mod_base = OTHER; note = 2'-O-methyladenosine-3'-phosphorothioate
  modified_base 2: mod_base = OTHER; note = 2'-deoxyguanosine-3'-phosphorothioate
  modified_base 3: mod_base = OTHER; note = 2'-O-methyladenosine-3'-phosphate
  modified_base 4: mod_base = OTHER; note = 2'-O-methyluridine-3'-phosphate
  modified_base 6: mod_base = OTHER; note = 2'-O-methyladenosine-3'-phosphate
  modified_base 8: mod_base = OTHER; note = 2'-O-methyladenosine-3'-phosphate
  modified_base 9: mod_base = OTHER; note = 2'-O-methylcytidine-3'-phosphate
  modified_base 10: mod_base = OTHER; note = 2'-O-methyladenosine-3'-phosphate
  modified_base 11: mod_base = OTHER; note = 2'-O-methylcytidine-3'-phosphate
  modified_base 13: mod_base = OTHER; note = 2'-O-methylguanosine-3'-phosphate
  modified_base 14: mod_base = OTHER; note = 2'-fluorocytidine-3'-phosphate
  modified_base 15: mod_base = OTHER; note = 2'-O-methyladenosine-3'-phosphate
  modified_base 16: mod_base = OTHER; note = 2'-O-methyladenosine-3'-phosphate
  modified_base 17: mod_base = OTHER; note = 2'-O-methyladenosine-3'-phosphate
  modified_base 18: mod_base = OTHER; note = 2'-O-methylcytidine-3'-phosphate
  modified_base 19: mod_base = OTHER; note = 2'-O-methyladenosine-3'-phosphate
  modified_base 20: mod_base = OTHER; note = 2'-O-methylguanosine-3'-phosphate
  modified_base 21: mod_base = OTHER; note = 2'-O-methylguanosine-3'-phosphorothioate
  modified_base 22: mod_base = OTHER; note = 2'-O-methyladenosine-3'-phosphorothioate
  modified_base 23: mod_base = OTHER; note = 2'-O-methyladenosine-3'-phosphate
  misc_feature 1: note = RNA
  misc_feature 2: note = DNA
  misc_feature 3..4: note = RNA
  misc_feature 5: note = DNA
  misc_feature 6: note = RNA
  misc_feature 7: note = DNA
  misc_feature 8..11: note = RNA
  misc_feature 12: note = DNA
  misc_feature 13..23: note = RNA
agatcatacacagcaaacaggaa

SEQ ID NO: 2512 - DNA, 23 bp, synthetic construct
  source 1..23: mol_type = other DNA
  modified_base 1: mod_base = OTHER; note = 2'-O-methyladenosine-3'-phosphorothioate
  modified_base 2: mod_base = OTHER; note = 2'-deoxythimidine-3'-phosphorothioate
  modified_base 3: mod_base = OTHER; note = 2'-O-methylguanosine-3'-phosphate
  modified_base 4: mod_base = OTHER; note = 2'-O-methyladenosine-3'-phosphate
  modified_base 6: mod_base = OTHER; note = 2'-O-methylcytidine-3'-phosphate
  modified_base 8: mod_base = OTHER; note = 2'-O-methyluridine-3'-phosphate
  modified_base 9: mod_base = OTHER; note = 2'-O-methyladenosine-3'-phosphate
  modified_base 10: mod_base = OTHER; note = 2'-O-methylcytidine-3'-phosphate
  modified_base 11: mod_base = OTHER; note = 2'-O-methyladenosine-3'-phosphate
  modified_base 13: mod_base = OTHER; note = 2'-O-methyladenosine-3'-phosphate
  modified_base 14: mod_base = OTHER; note = 2'-fluoroguanosine-3'-phosphate
  modified_base 15: mod_base = OTHER; note = 2'-O-methylcytidine-3'-phosphate
  modified_base 16: mod_base = OTHER; note = 2'-O-methyladenosine-3'-phosphate
  modified_base 17: mod_base = OTHER; note = 2'-O-methyladenosine-3'-phosphate
  modified_base 18: mod_base = OTHER; note = 2'-O-methyladenosine-3'-phosphate
  modified_base 19: mod_base = OTHER; note = 2'-O-methylcytidine-3'-phosphate
  modified_base 20: mod_base = OTHER; note = 2'-O-methyladenosine-3'-phosphate
  modified_base 21: mod_base = OTHER; note = 2'-O-methylguanosine-3'-phosphorothioate
  modified_base 22: mod_base = OTHER; note = 2'-O-methylguanosine-3'-phosphorothioate
  modified_base 23: mod_base = OTHER; note = 2'-O-methyladenosine-3'-phosphate
  misc_feature 1: note = RNA
  misc_feature 2: note = DNA
  misc_feature 3..4: note = RNA
  misc_feature 5: note = DNA
  misc_feature 6: note = RNA
  misc_feature 7: note = DNA
  misc_feature 8..11: note = RNA
  misc_feature 12: note = DNA
  misc_feature 13..23: note = RNA
atgatcatacacagcaaacagga

SEQ ID NO: 2513 - DNA, 23 bp, synthetic construct
  source 1..23: mol_type = other DNA
  modified_base 1: mod_base = OTHER; note = 2'-O-methyladenosine-3'-phosphorothioate
  modified_base 2: mod_base = OTHER; note = 2'-deoxythimidine-3'-phosphorothioate
  modified_base 3: mod_base = OTHER; note = 2'-O-methyluridine-3'-phosphate
  modified_base 4: mod_base = OTHER; note = 2'-O-methylguanosine-3'-phosphate
  modified_base 6: mod_base = OTHER; note = 2'-O-methyluridine-3'-phosphate
  modified_base 8: mod_base = OTHER; note = 2'-O-methyladenosine-3'-phosphate
  modified_base 9: mod_base = OTHER; note = 2'-O-methyluridine-3'-phosphate
  modified_base 10: mod_base = OTHER; note = 2'-O-methyladenosine-3'-phosphate
  modified_base 11: mod_base = OTHER; note = 2'-O-methylcytidine-3'-phosphate
  modified_base 13: mod_base = OTHER; note = 2'-O-methylcytidine-3'-phosphate
  modified_base 14: mod_base = OTHER; note = 2'-fluoroadenosine-3'-phosphate
  modified_base 15: mod_base = OTHER; note = 2'-O-methylguanosine-3'-phosphate
  modified_base 16: mod_base = OTHER; note = 2'-O-methylcytidine-3'-phosphate
  modified_base 17: mod_base = OTHER; note = 2'-O-methyladenosine-3'-phosphate
  modified_base 18: mod_base = OTHER; note = 2'-O-methyladenosine-3'-phosphate
  modified_base 19: mod_base = OTHER; note = 2'-O-methyladenosine-3'-phosphate
  modified_base 20: mod_base = OTHER; note = 2'-O-methylcytidine-3'-phosphate
  modified_base 21: mod_base = OTHER; note = 2'-O-methyladenosine-3'-phosphorothioate
  modified_base 22: mod_base = OTHER; note = 2'-O-methylguanosine-3'-phosphorothioate
  modified_base 23: mod_base = OTHER; note = 2'-O-methylguanosine-3'-phosphate
  misc_feature 1: note = RNA
  misc_feature 2: note = DNA
  misc_feature 3..4: note = RNA
  misc_feature 5: note = DNA
  misc_feature 6: note = RNA
  misc_feature 7: note = DNA
  misc_feature 8..11: note = RNA
  misc_feature 12: note = DNA
  misc_feature 13..23: note = RNA
attgatcatacacagcaaacagg

SEQ ID NO: 2514 - DNA, 23 bp, synthetic construct
  source 1..23: mol_type = other DNA
  modified_base 1: mod_base = OTHER; note = 2'-O-methyladenosine-3'-phosphorothioate
  modified_base 2: mod_base = OTHER; note = 2'-deoxythimidine-3'-phosphorothioate
  modified_base 3: mod_base = OTHER; note = 2'-O-methyluridine-3'-phosphate
  modified_base 4: mod_base = OTHER; note = 2'-O-methyluridine-3'-phosphate
  modified_base 6: mod_base = OTHER; note = 2'-O-methyladenosine-3'-phosphate
  modified_base 8: mod_base = OTHER; note = 2'-O-methylcytidine-3'-phosphate
  modified_base 9: mod_base = OTHER; note = 2'-O-methyladenosine-3'-phosphate
  modified_base 10: mod_base = OTHER; note = 2'-O-methyluridine-3'-phosphate
  modified_base 11: mod_base = OTHER; note = 2'-O-methyladenosine-3'-phosphate
  modified_base 13: mod_base = OTHER; note = 2'-O-methyladenosine-3'-phosphate
  modified_base 14: mod_base = OTHER; note = 2'-fluorocytidine-3'-phosphate
  modified_base 15: mod_base = OTHER; note = 2'-O-methyladenosine-3'-phosphate
  modified_base 16: mod_base = OTHER; note = 2'-O-methylguanosine-3'-phosphate
  modified_base 17: mod_base = OTHER; note = 2'-O-methylcytidine-3'-phosphate
  modified_base 18: mod_base = OTHER; note = 2'-O-methyladenosine-3'-phosphate
  modified_base 19: mod_base = OTHER; note = 2'-O-methyladenosine-3'-phosphate
  modified_base 20: mod_base = OTHER; note = 2'-O-methyladenosine-3'-phosphate
  modified_base 21: mod_base = OTHER; note = 2'-O-methylcytidine-3'-phosphorothioate
  modified_base 22: mod_base = OTHER; note = 2'-O-methyladenosine-3'-phosphorothioate
  modified_base 23: mod_base = OTHER; note = 2'-O-methylguanosine-3'-phosphate
  misc_feature 1: note = RNA
  misc_feature 2: note = DNA
  misc_feature 3..4: note = RNA
  misc_feature 5: note = DNA
  misc_feature 6: note = RNA
  misc_feature 7: note = DNA
  misc_feature 8..11: note = RNA
  misc_feature 12: note = DNA
  misc_feature 13..23: note = RNA
atttgatcatacacagcaaacag

SEQ ID NO: 2515 - DNA, 23 bp, synthetic construct
  source 1..23: mol_type = other DNA
  modified_base 1: mod_base = OTHER; note = 2'-O-methyladenosine-3'-phosphorothioate
  modified_base 2: mod_base = OTHER; note = 2'-deoxycytidine-3'-phosphorothioate
  modified_base 3: mod_base = OTHER; note = 2'-O-methyluridine-3'-phosphate
  modified_base 4: mod_base = OTHER; note = 2'-O-methyluridine-3'-phosphate
  modified_base 6: mod_base = OTHER; note = 2'-O-methylguanosine-3'-phosphate
  modified_base 8: mod_base = OTHER; note = 2'-O-methyluridine-3'-phosphate
  modified_base 9: mod_base = OTHER; note = 2'-O-methylcytidine-3'-phosphate
  modified_base 10: mod_base = OTHER; note = 2'-O-methyladenosine-3'-phosphate
  modified_base 11: mod_base = OTHER; note = 2'-O-methyluridine-3'-phosphate
  modified_base 13: mod_base = OTHER; note = 2'-O-methylcytidine-3'-phosphate
  modified_base 14: mod_base = OTHER; note = 2'-fluoroadenosine-3'-phosphate
  modified_base 15: mod_base = OTHER; note = 2'-O-methylcytidine-3'-phosphate
  modified_base 16: mod_base = OTHER; note = 2'-O-methyladenosine-3'-phosphate
  modified_base 17: mod_base = OTHER; note = 2'-O-methylguanosine-3'-phosphate
  modified_base 18: mod_base = OTHER; note = 2'-O-methylcytidine-3'-phosphate
  modified_base 19: mod_base = OTHER; note = 2'-O-methyladenosine-3'-phosphate
  modified_base 20: mod_base = OTHER; note = 2'-O-methyladenosine-3'-phosphate
  modified_base 21: mod_base = OTHER; note = 2'-O-methyladenosine-3'-phosphorothioate
  modified_base 22: mod_base = OTHER; note = 2'-O-methylcytidine-3'-phosphorothioate
  modified_base 23: mod_base = OTHER; note = 2'-O-methyladenosine-3'-phosphate
  misc_feature 1: note = RNA
  misc_feature 2: note = DNA
  misc_feature 3..4: note = RNA
  misc_feature 5: note = DNA
  misc_feature 6: note = RNA
  misc_feature 7: note = DNA
  misc_feature 8..11: note = RNA
  misc_feature 12: note = DNA
  misc_feature 13..23: note = RNA
actttgatcatacacagcaaaca

SEQ ID NO: 2516 - DNA, 23 bp, synthetic construct
  source 1..23: mol_type = other DNA
  modified_base 1: mod_base = OTHER; note = 2'-O-methyladenosine-3'-phosphorothioate
  modified_base 2: mod_base = OTHER; note = 2'-deoxyguanosine-3'-phosphorothioate
  modified_base 3: mod_base = OTHER; note = 2'-O-methyladenosine-3'-phosphate
  modified_base 4: mod_base = OTHER; note = 2'-O-methyladenosine-3'-phosphate
  modified_base 6: mod_base = OTHER; note = 2'-O-methyladenosine-3'-phosphate
  modified_base 8: mod_base = OTHER; note = 2'-O-methyladenosine-3'-phosphate
  modified_base 9: mod_base = OTHER; note = 2'-O-methyladenosine-3'-phosphate
  modified_base 10: mod_base = OTHER; note = 2'-O-methylguanosine-3'-phosphate
  modified_base 11: mod_base = OTHER; note = 2'-O-methylguanosine-3'-phosphate
  modified_base 13: mod_base = OTHER; note = 2'-O-methylguanosine-3'-phosphate
  modified_base 14: mod_base = OTHER; note = 2'-fluoroguanosine-3'-phosphate
  modified_base 15: mod_base = OTHER; note = 2'-O-methylguanosine-3'-phosphate
  modified_base 16: mod_base = OTHER; note = 2'-O-methyladenosine-3'-phosphate
  modified_base 17: mod_base = OTHER; note = 2'-O-methylguanosine-3'-phosphate
  modified_base 18: mod_base = OTHER; note = 2'-O-methyladenosine-3'-phosphate
  modified_base 19: mod_base = OTHER; note = 2'-O-methylcytidine-3'-phosphate
  modified_base 20: mod_base = OTHER; note = 2'-O-methyluridine-3'-phosphate
  modified_base 21: mod_base = OTHER; note = 2'-O-methylguanosine-3'-phosphorothioate
  modified_base 22: mod_base = OTHER; note = 2'-O-methylguanosine-3'-phosphorothioate
  modified_base 23: mod_base = OTHER; note = 2'-O-methylguanosine-3'-phosphate
  misc_feature 1: note = RNA
  misc_feature 2: note = DNA
  misc_feature 3..4: note = RNA
  misc_feature 5: note = DNA
  misc_feature 6: note = RNA
  misc_feature 7: note = DNA
  misc_feature 8..11: note = RNA
  misc_feature 12: note = DNA
  misc_feature 13..23: note = RNA
agaagaaaaggtgggagactggg

SEQ ID NO: 2517 - DNA, 23 bp, synthetic construct
  source 1..23: mol_type = other DNA
  modified_base 1: mod_base = OTHER; note = 2'-O-methyladenosine-3'-phosphorothioate
  modified_base 2: mod_base = OTHER; note = 2'-deoxythimidine-3'-phosphorothioate
  modified_base 3: mod_base = OTHER; note = 2'-O-methyladenosine-3'-phosphate
  modified_base 4: mod_base = OTHER; note = 2'-O-methylguanosine-3'-phosphate
  modified_base 6: mod_base = OTHER; note = 2'-O-methyladenosine-3'-phosphate
  modified_base 8: mod_base = OTHER; note = 2'-O-methyladenosine-3'-phosphate
  modified_base 9: mod_base = OTHER; note = 2'-O-methyladenosine-3'-phosphate
  modified_base 10: mod_base = OTHER; note = 2'-O-methyladenosine-3'-phosphate
  modified_base 11: mod_base = OTHER; note = 2'-O-methyladenosine-3'-phosphate
  modified_base 13: mod_base = OTHER; note = 2'-O-methylguanosine-3'-phosphate
  modified_base 14: mod_base = OTHER; note = 2'-fluorouridine-3'-phosphate
  modified_base 15: mod_base = OTHER; note = 2'-O-methylguanosine-3'-phosphate
  modified_base 16: mod_base = OTHER; note = 2'-O-methylguanosine-3'-phosphate
  modified_base 17: mod_base = OTHER; note = 2'-O-methylguanosine-3'-phosphate
  modified_base 18: mod_base = OTHER; note = 2'-O-methyladenosine-3'-phosphate
  modified_base 19: mod_base = OTHER; note = 2'-O-methylguanosine-3'-phosphate
  modified_base 20: mod_base = OTHER; note = 2'-O-methyladenosine-3'-phosphate
  modified_base 21: mod_base = OTHER; note = 2'-O-methylcytidine-3'-phosphorothioate
  modified_base 22: mod_base = OTHER; note = 2'-O-methyluridine-3'-phosphorothioate
  modified_base 23: mod_base = OTHER; note = 2'-O-methylguanosine-3'-phosphate
  misc_feature 1: note = RNA
  misc_feature 2: note = DNA
  misc_feature 3..4: note = RNA
  misc_feature 5: note = DNA
  misc_feature 6: note = RNA
  misc_feature 7: note = DNA
  misc_feature 8..11: note = RNA
  misc_feature 12: note = DNA
  misc_feature 13..23: note = RNA
atagaagaaaaggtgggagactg

SEQ ID NO: 2518 - DNA, 23 bp, synthetic construct
  source 1..23: mol_type = other DNA
  modified_base 1: mod_base = OTHER; note = 2'-O-methyladenosine-3'-phosphorothioate
  modified_base 2: mod_base = OTHER; note = 2'-deoxyadenosine-3'-phosphorothioate
  modified_base 3: mod_base = OTHER; note = 2'-O-methyluridine-3'-phosphate
  modified_base 4: mod_base = OTHER; note = 2'-O-methyluridine-3'-phosphate
  modified_base 6: mod_base = OTHER; note = 2'-O-methylguanosine-3'-phosphate
  modified_base 8: mod_base = OTHER; note = 2'-O-methyladenosine-3'-phosphate
  modified_base 9: mod_base = OTHER; note = 2'-O-methylguanosine-3'-phosphate
  modified_base 10: mod_base = OTHER; note = 2'-O-methyladenosine-3'-phosphate
  modified_base 11: mod_base = OTHER; note = 2'-O-methyladenosine-3'-phosphate
  modified_base 13: mod_base = OTHER; note = 2'-O-methyladenosine-3'-phosphate
  modified_base 14: mod_base = OTHER; note = 2'-fluoroguanosine-3'-phosphate
  modified_base 15: mod_base = OTHER; note = 2'-O-methylguanosine-3'-phosphate
  modified_base 16: mod_base = OTHER; note = 2'-O-methyluridine-3'-phosphate
  modified_base 17: mod_base = OTHER; note = 2'-O-methylguanosine-3'-phosphate
  modified_base 18: mod_base = OTHER; note = 2'-O-methylguanosine-3'-phosphate
  modified_base 19: mod_base = OTHER; note = 2'-O-methylguanosine-3'-phosphate
  modified_base 20: mod_base = OTHER; note = 2'-O-methyladenosine-3'-phosphate
  modified_base 21: mod_base = OTHER; note = 2'-O-methylguanosine-3'-phosphorothioate
  modified_base 22: mod_base = OTHER; note = 2'-O-methyladenosine-3'-phosphorothioate
  modified_base 23: mod_base = OTHER; note = 2'-O-methylcytidine-3'-phosphate
  misc_feature 1: note = RNA
  misc_feature 2: note = DNA
  misc_feature 3..4: note = RNA
  misc_feature 5: note = DNA
  misc_feature 6: note = RNA
  misc_feature 7: note = DNA
  misc_feature 8..11: note = RNA
  misc_feature 12: note = DNA
  misc_feature 13..23: note = RNA
aattagaagaaaaggtgggagac

SEQ ID NO: 2519 - DNA, 23 bp, synthetic construct
  source 1..23: mol_type = other DNA
  modified_base 1: mod_base = OTHER; note = 2'-O-methyladenosine-3'-phosphorothioate
  modified_base 2: mod_base = OTHER; note = 2'-deoxycytidine-3'-phosphorothioate
  modified_base 3: mod_base = OTHER; note = 2'-O-methyladenosine-3'-phosphate
  modified_base 4: mod_base = OTHER; note = 2'-O-methyluridine-3'-phosphate
  modified_base 6: mod_base = OTHER; note = 2'-O-methyladenosine-3'-phosphate
  modified_base 8: mod_base = OTHER; note = 2'-O-methyladenosine-3'-phosphate
  modified_base 9: mod_base = OTHER; note = 2'-O-methyladenosine-3'-phosphate
  modified_base 10: mod_base = OTHER; note = 2'-O-methylguanosine-3'-phosphate
  modified_base 11: mod_base = OTHER; note = 2'-O-methyladenosine-3'-phosphate
  modified_base 13: mod_base = OTHER; note = 2'-O-methyladenosine-3'-phosphate
  modified_base 14: mod_base = OTHER; note = 2'-fluoroadenosine-3'-phosphate
  modified_base 15: mod_base = OTHER; note = 2'-O-methylguanosine-3'-phosphate
  modified_base 16: mod_base = OTHER; note = 2'-O-methylguanosine-3'-phosphate
  modified_base 17: mod_base = OTHER; note = 2'-O-methyluridine-3'-phosphate
  modified_base 18: mod_base = OTHER; note = 2'-O-methylguanosine-3'-phosphate
  modified_base 19: mod_base = OTHER; note = 2'-O-methylguanosine-3'-phosphate
  modified_base 20: mod_base = OTHER; note = 2'-O-methylguanosine-3'-phosphate
  modified_base 21: mod_base = OTHER; note = 2'-O-methyladenosine-3'-phosphorothioate
  modified_base 22: mod_base = OTHER; note = 2'-O-methylguanosine-3'-phosphorothioate
  modified_base 23: mod_base = OTHER; note = 2'-O-methyladenosine-3'-phosphate
  misc_feature 1: note = RNA
  misc_feature 2: note = DNA
  misc_feature 3..4: note = RNA
  misc_feature 5: note = DNA
  misc_feature 6: note = RNA
  misc_feature 7: note = DNA
  misc_feature 8..11: note = RNA
  misc_feature 12: note = DNA
  misc_feature 13..23: note = RNA
acattagaagaaaaggtgggaga

SEQ ID NO: 2520 - DNA, 23 bp, synthetic construct
  source 1..23: mol_type = other DNA
  modified_base 1: mod_base = OTHER; note = 2'-O-methyladenosine-3'-phosphorothioate
  modified_base 2: mod_base = OTHER; note = 2'-deoxythimidine-3'-phosphorothioate
  modified_base 3: mod_base = OTHER; note = 2'-O-methylcytidine-3'-phosphate
  modified_base 4: mod_base = OTHER; note = 2'-O-methyladenosine-3'-phosphate
  modified_base 6: mod_base = OTHER; note = 2'-O-methyluridine-3'-phosphate
  modified_base 8: mod_base = OTHER; note = 2'-O-methylguanosine-3'-phosphate
  modified_base 9: mod_base = OTHER; note = 2'-O-methyladenosine-3'-phosphate
  modified_base 10: mod_base = OTHER; note = 2'-O-methyladenosine-3'-phosphate
  modified_base 11: mod_base = OTHER; note = 2'-O-methylguanosine-3'-phosphate
  modified_base 13: mod_base = OTHER; note = 2'-O-methyladenosine-3'-phosphate
  modified_base 14: mod_base = OTHER; note = 2'-fluoroadenosine-3'-phosphate
  modified_base 15: mod_base = OTHER; note = 2'-O-methyladenosine-3'-phosphate
  modified_base 16: mod_base = OTHER; note = 2'-O-methylguanosine-3'-phosphate
  modified_base 17: mod_base = OTHER; note = 2'-O-methylguanosine-3'-phosphate
  modified_base 18: mod_base = OTHER; note = 2'-O-methyluridine-3'-phosphate
  modified_base 19: mod_base = OTHER; note = 2'-O-methylguanosine-3'-phosphate
  modified_base 20: mod_base = OTHER; note = 2'-O-methylguanosine-3'-phosphate
  modified_base 21: mod_base = OTHER; note = 2'-O-methylguanosine-3'-phosphorothioate
  modified_base 22: mod_base = OTHER; note = 2'-O-methyladenosine-3'-phosphorothioate
  modified_base 23: mod_base = OTHER; note = 2'-O-methylguanosine-3'-phosphate
  misc_feature 1: note = RNA
  misc_feature 2: note = DNA
  misc_feature 3..4: note = RNA
  misc_feature 5: note = DNA
  misc_feature 6: note = RNA
  misc_feature 7: note = DNA
  misc_feature 8..11: note = RNA
  misc_feature 12: note = DNA
  misc_feature 13..23: note = RNA
atcattagaagaaaaggtgggag

SEQ ID NO: 2521 - DNA, 23 bp, synthetic construct
  source 1..23: mol_type = other DNA
  modified_base 1: mod_base = OTHER; note = 2'-O-methyladenosine-3'-phosphorothioate
  modified_base 2: mod_base = OTHER; note = 2'-deoxycytidine-3'-phosphorothioate
  modified_base 3: mod_base = OTHER; note = 2'-O-methyluridine-3'-phosphate
  modified_base 4: mod_base = OTHER; note = 2'-O-methylcytidine-3'-phosphate
  modified_base 6: mod_base = OTHER; note = 2'-O-methyluridine-3'-phosphate
  modified_base 8: mod_base = OTHER; note = 2'-O-methyladenosine-3'-phosphate
  modified_base 9: mod_base = OTHER; note = 2'-O-methylguanosine-3'-phosphate
  modified_base 10: mod_base = OTHER; note = 2'-O-methyladenosine-3'-phosphate
  modified_base 11: mod_base = OTHER; note = 2'-O-methyladenosine-3'-phosphate
  modified_base 13: mod_base = OTHER; note = 2'-O-methyladenosine-3'-phosphate
  modified_base 14: mod_base = OTHER; note = 2'-fluoroadenosine-3'-phosphate
  modified_base 15: mod_base = OTHER; note = 2'-O-methyladenosine-3'-phosphate
  modified_base 16: mod_base = OTHER; note = 2'-O-methyladenosine-3'-phosphate
  modified_base 17: mod_base = OTHER; note = 2'-O-methylguanosine-3'-phosphate
  modified_base 18: mod_base = OTHER; note = 2'-O-methylguanosine-3'-phosphate
  modified_base 19: mod_base = OTHER; note = 2'-O-methyluridine-3'-phosphate
  modified_base 20: mod_base = OTHER; note = 2'-O-methylguanosine-3'-phosphate
  modified_base 21: mod_base = OTHER; note = 2'-O-methylguanosine-3'-phosphorothioate
  modified_base 22: mod_base = OTHER; note = 2'-O-methylguanosine-3'-phosphorothioate
  modified_base 23: mod_base = OTHER; note = 2'-O-methyladenosine-3'-phosphate
  misc_feature 1: note = RNA
  misc_feature 2: note = DNA
  misc_feature 3..4: note = RNA
  misc_feature 5: note = DNA
  misc_feature 6: note = RNA
  misc_feature 7: note = DNA
  misc_feature 8..11: note = RNA
  misc_feature 12: note = DNA
  misc_feature 13..23: note = RNA
actcattagaagaaaaggtggga

SEQ ID NO: 2522 - DNA, 23 bp, synthetic construct
  source 1..23: mol_type = other DNA
  modified_base 1: mod_base = OTHER; note = 2'-O-methyladenosine-3'-phosphorothioate
  modified_base 2: mod_base = OTHER; note = 2'-deoxyadenosine-3'-phosphorothioate
  modified_base 3: mod_base = OTHER; note = 2'-O-methylcytidine-3'-phosphate
  modified_base 4: mod_base = OTHER; note = 2'-O-methyluridine-3'-phosphate
  modified_base 6: mod_base = OTHER; note = 2'-O-methyladenosine-3'-phosphate
  modified_base 8: mod_base = OTHER; note = 2'-O-methyluridine-3'-phosphate
  modified_base 9: mod_base = OTHER; note = 2'-O-methyladenosine-3'-phosphate
  modified_base 10: mod_base = OTHER; note = 2'-O-methylguanosine-3'-phosphate
  modified_base 11: mod_base = OTHER; note = 2'-O-methyladenosine-3'-phosphate
  modified_base 13: mod_base = OTHER; note = 2'-O-methylguanosine-3'-phosphate
  modified_base 14: mod_base = OTHER; note = 2'-fluoroadenosine-3'-phosphate
  modified_base 15: mod_base = OTHER; note = 2'-O-methyladenosine-3'-phosphate
  modified_base 16: mod_base = OTHER; note = 2'-O-methyladenosine-3'-phosphate
  modified_base 17: mod_base = OTHER; note = 2'-O-methyladenosine-3'-phosphate
  modified_base 18: mod_base = OTHER; note = 2'-O-methylguanosine-3'-phosphate
  modified_base 19: mod_base = OTHER; note = 2'-O-methylguanosine-3'-phosphate
  modified_base 20: mod_base = OTHER; note = 2'-O-methyluridine-3'-phosphate
  modified_base 21: mod_base = OTHER; note = 2'-O-methylguanosine-3'-phosphorothioate
  modified_base 22: mod_base = OTHER; note = 2'-O-methylguanosine-3'-phosphorothioate
  modified_base 23: mod_base = OTHER; note = 2'-O-methylguanosine-3'-phosphate
  misc_feature 1: note = RNA
  misc_feature 2: note = DNA
  misc_feature 3..4: note = RNA
  misc_feature 5: note = DNA
  misc_feature 6: note = RNA
  misc_feature 7: note = DNA
  misc_feature 8..11: note = RNA
  misc_feature 12: note = DNA
  misc_feature 13..23: note = RNA
aactcattagaagaaaaggtggg

SEQ ID NO: 2523 - DNA, 23 bp, synthetic construct
  source 1..23: mol_type = other DNA
  modified_base 1: mod_base = OTHER; note = 2'-O-methyladenosine-3'-phosphorothioate
  modified_base 2: mod_base = OTHER; note = 2'-deoxyguanosine-3'-phosphorothioate
  modified_base 3: mod_base = OTHER; note = 2'-O-methyladenosine-3'-phosphate
  modified_base 4: mod_base = OTHER; note = 2'-O-methylcytidine-3'-phosphate
  modified_base 6: mod_base = OTHER; note = 2'-O-methylcytidine-3'-phosphate
  modified_base 8: mod_base = OTHER; note = 2'-O-methyluridine-3'-phosphate
  modified_base 9: mod_base = OTHER; note = 2'-O-methyluridine-3'-phosphate
  modified_base 10: mod_base = OTHER; note = 2'-O-methyladenosine-3'-phosphate
  modified_base 11: mod_base = OTHER; note = 2'-O-methylguanosine-3'-phosphate
  modified_base 13: mod_base = OTHER; note = 2'-O-methyladenosine-3'-phosphate
  modified_base 14: mod_base = OTHER; note = 2'-fluoroguanosine-3'-phosphate
  modified_base 15: mod_base = OTHER; note = 2'-O-methyladenosine-3'-phosphate
  modified_base 16: mod_base = OTHER; note = 2'-O-methyladenosine-3'-phosphate
  modified_base 17: mod_base = OTHER; note = 2'-O-methyladenosine-3'-phosphate
  modified_base 18: mod_base = OTHER; note = 2'-O-methyladenosine-3'-phosphate
  modified_base 19: mod_base = OTHER; note = 2'-O-methylguanosine-3'-phosphate
  modified_base 20: mod_base = OTHER; note = 2'-O-methylguanosine-3'-phosphate
  modified_base 21: mod_base = OTHER; note = 2'-O-methyluridine-3'-phosphorothioate
  modified_base 22: mod_base = OTHER; note = 2'-O-methylguanosine-3'-phosphorothioate
  modified_base 23: mod_base = OTHER; note = 2'-O-methylguanosine-3'-phosphate
  misc_feature 1: note = RNA
  misc_feature 2: note = DNA
  misc_feature 3..4: note = RNA
  misc_feature 5: note = DNA
  misc_feature 6: note = RNA
  misc_feature 7: note = DNA
  misc_feature 8..11: note = RNA
  misc_feature 12: note = DNA
  misc_feature 13..23: note = RNA
agactcattagaagaaaaggtgg

SEQ ID NO: 2524 - DNA, 23 bp, synthetic construct
  source 1..23: mol_type = other DNA
  modified_base 1: mod_base = OTHER; note = 2'-O-methyladenosine-3'-phosphorothioate
  modified_base 2: mod_base = OTHER; note = 2'-deoxycytidine-3'-phosphorothioate
  modified_base 3: mod_base = OTHER; note = 2'-O-methyluridine-3'-phosphate
  modified_base 4: mod_base = OTHER; note = 2'-O-methyluridine-3'-phosphate
  modified_base 6: mod_base = OTHER; note = 2'-O-methylguanosine-3'-phosphate
  modified_base 8: mod_base = OTHER; note = 2'-O-methylcytidine-3'-phosphate
  modified_base 9: mod_base = OTHER; note = 2'-O-methylcytidine-3'-phosphate
  modified_base 10: mod_base = OTHER; note = 2'-O-methyladenosine-3'-phosphate
  modified_base 11: mod_base = OTHER; note = 2'-O-methyladenosine-3'-phosphate
  modified_base 13: mod_base = OTHER; note = 2'-O-methylguanosine-3'-phosphate
  modified_base 14: mod_base = OTHER; note = 2'-fluoroadenosine-3'-phosphate
  modified_base 15: mod_base = OTHER; note = 2'-O-methylguanosine-3'-phosphate
  modified_base 16: mod_base = OTHER; note = 2'-O-methyladenosine-3'-phosphate
  modified_base 17: mod_base = OTHER; note = 2'-O-methyladenosine-3'-phosphate
  modified_base 18: mod_base = OTHER; note = 2'-O-methyladenosine-3'-phosphate
  modified_base 19: mod_base = OTHER; note = 2'-O-methylcytidine-3'-phosphate
  modified_base 20: mod_base = OTHER; note = 2'-O-methylguanosine-3'-phosphate
  modified_base 21: mod_base = OTHER; note = 2'-O-methylguanosine-3'-phosphorothioate
  modified_base 22: mod_base = OTHER; note = 2'-O-methylcytidine-3'-phosphorothioate
  modified_base 23: mod_base = OTHER; note = 2'-O-methyluridine-3'-phosphate
  misc_feature 1: note = RNA
  misc_feature 2: note = DNA
  misc_feature 3..4: note = RNA
  misc_feature 5: note = DNA
  misc_feature 6: note = RNA
  misc_feature 7: note = DNA
  misc_feature 8..11: note = RNA
  misc_feature 12: note = DNA
  misc_feature 13..23: note = RNA
acttagaccaaggagaaacggct

SEQ ID NO: 2525 - DNA, 23 bp, synthetic construct
  source 1..23: mol_type = other DNA
  modified_base 1: mod_base = OTHER; note = 2'-O-methyladenosine-3'-phosphorothioate
  modified_base 2: mod_base = OTHER; note = 2'-deoxyadenosine-3'-phosphorothioate
  modified_base 3: mod_base = OTHER; note = 2'-O-methylcytidine-3'-phosphate
  modified_base 4: mod_base = OTHER; note = 2'-O-methyluridine-3'-phosphate
  modified_base 6: mod_base = OTHER; note = 2'-O-methyladenosine-3'-phosphate
  modified_base 8: mod_base = OTHER; note = 2'-O-methyladenosine-3'-phosphate
  modified_base 9: mod_base = OTHER; note = 2'-O-methylcytidine-3'-phosphate
  modified_base 10: mod_base = OTHER; note = 2'-O-methylcytidine-3'-phosphate
  modified_base 11: mod_base = OTHER; note = 2'-O-methyladenosine-3'-phosphate
  modified_base 13: mod_base = OTHER; note = 2'-O-methylguanosine-3'-phosphate
  modified_base 14: mod_base = OTHER; note = 2'-fluoroguanosine-3'-phosphate
  modified_base 15: mod_base = OTHER; note = 2'-O-methyladenosine-3'-phosphate
  modified_base 16: mod_base = OTHER; note = 2'-O-methylguanosine-3'-phosphate
  modified_base 17: mod_base = OTHER; note = 2'-O-methyladenosine-3'-phosphate
  modified_base 18: mod_base = OTHER; note = 2'-O-methyladenosine-3'-phosphate
  modified_base 19: mod_base = OTHER; note = 2'-O-methyladenosine-3'-phosphate
  modified_base 20: mod_base = OTHER; note = 2'-O-methylcytidine-3'-phosphate
  modified_base 21: mod_base = OTHER; note = 2'-O-methylguanosine-3'-phosphorothioate
  modified_base 22: mod_base = OTHER; note = 2'-O-methylguanosine-3'-phosphorothioate
  modified_base 23: mod_base = OTHER; note = 2'-O-methylcytidine-3'-phosphate
  misc_feature 1: note = RNA
  misc_feature 2: note = DNA
  misc_feature 3..4: note = RNA
  misc_feature 5: note = DNA
  misc_feature 6: note = RNA
  misc_feature 7: note = DNA
  misc_feature 8..11: note = RNA
  misc_feature 12: note = DNA
  misc_feature 13..23: note = RNA
aacttagaccaaggagaaacggc

SEQ ID NO: 2526 - DNA, 23 bp, synthetic construct
  source 1..23: mol_type = other DNA
  modified_base 1: mod_base = OTHER; note = 2'-O-methyladenosine-3'-phosphorothioate
  modified_base 2: mod_base = OTHER; note = 2'-deoxycytidine-3'-phosphorothioate
  modified_base 3: mod_base = OTHER; note = 2'-O-methyladenosine-3'-phosphate
  modified_base 4: mod_base = OTHER; note = 2'-O-methylcytidine-3'-phosphate
  modified_base 6: mod_base = OTHER; note = 2'-O-methyluridine-3'-phosphate
  modified_base 8: mod_base = OTHER; note = 2'-O-methylguanosine-3'-phosphate
  modified_base 9: mod_base = OTHER; note = 2'-O-methyladenosine-3'-phosphate
  modified_base 10: mod_base = OTHER; note = 2'-O-methylcytidine-3'-phosphate
  modified_base 11: mod_base = OTHER; note = 2'-O-methylcytidine-3'-phosphate
  modified_base 13: mod_base = OTHER; note = 2'-O-methyladenosine-3'-phosphate
  modified_base 14: mod_base = OTHER; note = 2'-fluoroguanosine-3'-phosphate
  modified_base 15: mod_base = OTHER; note = 2'-O-methylguanosine-3'-phosphate
  modified_base 16: mod_base = OTHER; note = 2'-O-methyladenosine-3'-phosphate
  modified_base 17: mod_base = OTHER; note = 2'-O-methylguanosine-3'-phosphate
  modified_base 18: mod_base = OTHER; note = 2'-O-methyladenosine-3'-phosphate
  modified_base 19: mod_base = OTHER; note = 2'-O-methyladenosine-3'-phosphate
  modified_base 20: mod_base = OTHER; note = 2'-O-methyladenosine-3'-phosphate
  modified_base 21: mod_base = OTHER; note = 2'-O-methylcytidine-3'-phosphorothioate
  modified_base 22: mod_base = OTHER; note = 2'-O-methylguanosine-3'-phosphorothioate
  modified_base 23: mod_base = OTHER; note = 2'-O-methylguanosine-3'-phosphate
  misc_feature 1: note = RNA
  misc_feature 2: note = DNA
  misc_feature 3..4: note = RNA
  misc_feature 5: note = DNA
  misc_feature 6: note = RNA
  misc_feature 7: note = DNA
  misc_feature 8..11: note = RNA
  misc_feature 12: note = DNA
  misc_feature 13..23: note = RNA
acacttagaccaaggagaaacgg

SEQ ID NO: 2527 - DNA, 23 bp, synthetic construct
  source 1..23: mol_type = other DNA
  modified_base 1: mod_base = OTHER; note = 2'-O-methyladenosine-3'-phosphorothioate
  modified_base 2: mod_base = OTHER; note = 2'-deoxycytidine-3'-phosphorothioate
  modified_base 3: mod_base = OTHER; note = 2'-O-methyluridine-3'-phosphate
  modified_base 4: mod_base = OTHER; note = 2'-O-methyladenosine-3'-phosphate
  modified_base 6: mod_base = OTHER; note = 2'-O-methyladenosine-3'-phosphate
  modified_base 8: mod_base = OTHER; note = 2'-O-methyluridine-3'-phosphate
  modified_base 9: mod_base = OTHER; note = 2'-O-methyladenosine-3'-phosphate
  modified_base 10: mod_base = OTHER; note = 2'-O-methyladenosine-3'-phosphate
  modified_base 11: mod_base = OTHER; note = 2'-O-methyladenosine-3'-phosphate
  modified_base 13: mod_base = OTHER; note = 2'-O-methylcytidine-3'-phosphate
  modified_base 14: mod_base = OTHER; note = 2'-fluorocytidine-3'-phosphate
  modified_base 15: mod_base = OTHER; note = 2'-O-methyladenosine-3'-phosphate
  modified_base 16: mod_base = OTHER; note = 2'-O-methylguanosine-3'-phosphate
  modified_base 17: mod_base = OTHER; note = 2'-O-methylcytidine-3'-phosphate
  modified_base 18: mod_base = OTHER; note = 2'-O-methyladenosine-3'-phosphate
  modified_base 19: mod_base = OTHER; note = 2'-O-methyladenosine-3'-phosphate
  modified_base 20: mod_base = OTHER; note = 2'-O-methyladenosine-3'-phosphate
  modified_base 21: mod_base = OTHER; note = 2'-O-methylcytidine-3'-phosphorothioate
  modified_base 22: mod_base = OTHER; note = 2'-O-methyluridine-3'-phosphorothioate
  modified_base 23: mod_base = OTHER; note = 2'-O-methylguanosine-3'-phosphate
  misc_feature 1: note = RNA
  misc_feature 2: note = DNA
  misc_feature 3..4: note = RNA
  misc_feature 5: note = DNA
  misc_feature 6: note = RNA
  misc_feature 7: note = DNA
  misc_feature 8..11: note = RNA
  misc_feature 12: note = DNA
  misc_feature 13..23: note = RNA
actaaaataaacccagcaaactg

SEQ ID NO: 2528 - DNA, 23 bp, synthetic construct
  source 1..23: mol_type = other DNA
  modified_base 1: mod_base = OTHER; note = 2'-O-methyladenosine-3'-phosphorothioate
  modified_base 2: mod_base = OTHER; note = 2'-deoxythimidine-3'-phosphorothioate
  modified_base 3: mod_base = OTHER; note = 2'-O-methylcytidine-3'-phosphate
  modified_base 4: mod_base = OTHER; note = 2'-O-methyluridine-3'-phosphate
  modified_base 6: mod_base = OTHER; note = 2'-O-methyladenosine-3'-phosphate
  modified_base 8: mod_base = OTHER; note = 2'-O-methyladenosine-3'-phosphate
  modified_base 9: mod_base = OTHER; note = 2'-O-methyluridine-3'-phosphate
  modified_base 10: mod_base = OTHER; note = 2'-O-methyladenosine-3'-phosphate
  modified_base 11: mod_base = OTHER; note = 2'-O-methyladenosine-3'-phosphate
  modified_base 13: mod_base = OTHER; note = 2'-O-methylcytidine-3'-phosphate
  modified_base 14: mod_base = OTHER; note = 2'-fluorocytidine-3'-phosphate
  modified_base 15: mod_base = OTHER; note = 2'-O-methylcytidine-3'-phosphate
  modified_base 16: mod_base = OTHER; note = 2'-O-methyladenosine-3'-phosphate
  modified_base 17: mod_base = OTHER; note = 2'-O-methylguanosine-3'-phosphate
  modified_base 18: mod_base = OTHER; note = 2'-O-methylcytidine-3'-phosphate
  modified_base 19: mod_base = OTHER; note = 2'-O-methyladenosine-3'-phosphate
  modified_base 20: mod_base = OTHER; note = 2'-O-methyladenosine-3'-phosphate
  modified_base 21: mod_base = OTHER; note = 2'-O-methyladenosine-3'-phosphorothioate
  modified_base 22: mod_base = OTHER; note = 2'-O-methylcytidine-3'-phosphorothioate
  modified_base 23: mod_base = OTHER; note = 2'-O-methyluridine-3'-phosphate
  misc_feature 1: note = RNA
  misc_feature 2: note = DNA
  misc_feature 3..4: note = RNA
  misc_feature 5: note = DNA
  misc_feature 6: note = RNA
  misc_feature 7: note = DNA
  misc_feature 8..11: note = RNA
  misc_feature 12: note = DNA
  misc_feature 13..23: note = RNA
atctaaaataaacccagcaaact

SEQ ID NO: 2529 - DNA, 23 bp, synthetic construct
  source 1..23: mol_type = other DNA
  modified_base 1: mod_base = OTHER; note = 2'-O-methyladenosine-3'-phosphorothioate
  modified_base 2: mod_base = OTHER; note = 2'-deoxycytidine-3'-phosphorothioate
  modified_base 3: mod_base = OTHER; note = 2'-O-methyluridine-3'-phosphate
  modified_base 4: mod_base = OTHER; note = 2'-O-methylcytidine-3'-phosphate
  modified_base 6: mod_base = OTHER; note = 2'-O-methyladenosine-3'-phosphate
  modified_base 8: mod_base = OTHER; note = 2'-O-methyladenosine-3'-phosphate
  modified_base 9: mod_base = OTHER; note = 2'-O-methyladenosine-3'-phosphate
  modified_base 10: mod_base = OTHER; note = 2'-O-methyluridine-3'-phosphate
  modified_base 11: mod_base = OTHER; note = 2'-O-methyladenosine-3'-phosphate
  modified_base 13: mod_base = OTHER; note = 2'-O-methyladenosine-3'-phosphate
  modified_base 14: mod_base = OTHER; note = 2'-fluorocytidine-3'-phosphate
  modified_base 15: mod_base = OTHER; note = 2'-O-methylcytidine-3'-phosphate
  modified_base 16: mod_base = OTHER; note = 2'-O-methylcytidine-3'-phosphate
  modified_base 17: mod_base = OTHER; note = 2'-O-methyladenosine-3'-phosphate
  modified_base 18: mod_base = OTHER; note = 2'-O-methylguanosine-3'-phosphate
  modified_base 19: mod_base = OTHER; note = 2'-O-methylcytidine-3'-phosphate
  modified_base 20: mod_base = OTHER; note = 2'-O-methyladenosine-3'-phosphate
  modified_base 21: mod_base = OTHER; note = 2'-O-methyladenosine-3'-phosphorothioate
  modified_base 22: mod_base = OTHER; note = 2'-O-methyladenosine-3'-phosphorothioate
  modified_base 23: mod_base = OTHER; note = 2'-O-methylcytidine-3'-phosphate
  misc_feature 1: note = RNA
  misc_feature 2: note = DNA
  misc_feature 3..4: note = RNA
  misc_feature 5: note = DNA
  misc_feature 6: note = RNA
  misc_feature 7: note = DNA
  misc_feature 8..11: note = RNA
  misc_feature 12: note = DNA
  misc_feature 13..23: note = RNA
actctaaaataaacccagcaaac

SEQ ID NO: 2530 - DNA, 23 bp, synthetic construct
  source 1..23: mol_type = other DNA
  modified_base 1: mod_base = OTHER; note = 2'-O-methyladenosine-3'-phosphorothioate
  modified_base 2: mod_base = OTHER; note = 2'-deoxythimidine-3'-phosphorothioate
  modified_base 3: mod_base = OTHER; note = 2'-O-methylcytidine-3'-phosphate
  modified_base 4: mod_base = OTHER; note = 2'-O-methyluridine-3'-phosphate
  modified_base 6: mod_base = OTHER; note = 2'-O-methyluridine-3'-phosphate
  modified_base 8: mod_base = OTHER; note = 2'-O-methyladenosine-3'-phosphate
  modified_base 9: mod_base = OTHER; note = 2'-O-methyladenosine-3'-phosphate
  modified_base 10: mod_base = OTHER; note = 2'-O-methyladenosine-3'-phosphate
  modified_base 11: mod_base = OTHER; note = 2'-O-methyluridine-3'-phosphate
  modified_base 13: mod_base = OTHER; note = 2'-O-methyladenosine-3'-phosphate
  modified_base 14: mod_base = OTHER; note = 2'-fluoroadenosine-3'-phosphate
  modified_base 15: mod_base = OTHER; note = 2'-O-methylcytidine-3'-phosphate
  modified_base 16: mod_base = OTHER; note = 2'-O-methylcytidine-3'-phosphate
  modified_base 17: mod_base = OTHER; note = 2'-O-methylcytidine-3'-phosphate
  modified_base 18: mod_base = OTHER; note = 2'-O-methyladenosine-3'-phosphate
  modified_base 19: mod_base = OTHER; note = 2'-O-methylguanosine-3'-phosphate
  modified_base 20: mod_base = OTHER; note = 2'-O-methylcytidine-3'-phosphate
  modified_base 21: mod_base = OTHER; note = 2'-O-methyladenosine-3'-phosphorothioate
  modified_base 22: mod_base = OTHER; note = 2'-O-methyladenosine-3'-phosphorothioate
  modified_base 23: mod_base = OTHER; note = 2'-O-methyladenosine-3'-phosphate
  misc_feature 1: note = RNA
  misc_feature 2: note = DNA
  misc_feature 3..4: note = RNA
  misc_feature 5: note = DNA
  misc_feature 6: note = RNA
  misc_feature 7: note = DNA
  misc_feature 8..11: note = RNA
  misc_feature 12: note = DNA
  misc_feature 13..23: note = RNA
atctctaaaataaacccagcaaa

SEQ ID NO: 2531 - DNA, 23 bp, synthetic construct
  source 1..23: mol_type = other DNA
  modified_base 1: mod_base = OTHER; note = 2'-O-methyladenosine-3'-phosphorothioate
  modified_base 2: mod_base = OTHER; note = 2'-deoxythimidine-3'-phosphorothioate
  modified_base 3: mod_base = OTHER; note = 2'-O-methyluridine-3'-phosphate
  modified_base 4: mod_base = OTHER; note = 2'-O-methylcytidine-3'-phosphate
  modified_base 6: mod_base = OTHER; note = 2'-O-methylcytidine-3'-phosphate
  modified_base 8: mod_base = OTHER; note = 2'-O-methyladenosine-3'-phosphate
  modified_base 9: mod_base = OTHER; note = 2'-O-methyladenosine-3'-phosphate
  modified_base 10: mod_base = OTHER; note = 2'-O-methyladenosine-3'-phosphate
  modified_base 11: mod_base = OTHER; note = 2'-O-methyladenosine-3'-phosphate
  modified_base 13: mod_base = OTHER; note = 2'-O-methyladenosine-3'-phosphate
  modified_base 14: mod_base = OTHER; note = 2'-fluoroadenosine-3'-phosphate
  modified_base 15: mod_base = OTHER; note = 2'-O-methyladenosine-3'-phosphate
  modified_base 16: mod_base = OTHER; note = 2'-O-methylcytidine-3'-phosphate
  modified_base 17: mod_base = OTHER; note = 2'-O-methylcytidine-3'-phosphate
  modified_base 18: mod_base = OTHER; note = 2'-O-methylcytidine-3'-phosphate
  modified_base 19: mod_base = OTHER; note = 2'-O-methyladenosine-3'-phosphate
  modified_base 20: mod_base = OTHER; note = 2'-O-methylguanosine-3'-phosphate
  modified_base 21: mod_base = OTHER; note = 2'-O-methylcytidine-3'-phosphorothioate
  modified_base 22: mod_base = OTHER; note = 2'-O-methyladenosine-3'-phosphorothioate
  modified_base 23: mod_base = OTHER; note = 2'-O-methyladenosine-3'-phosphate
  misc_feature 1: note = RNA
  misc_feature 2: note = DNA
  misc_feature 3..4: note = RNA
  misc_feature 5: note = DNA
  misc_feature 6: note = RNA
  misc_feature 7: note = DNA
  misc_feature 8..11: note = RNA
  misc_feature 12: note = DNA
  misc_feature 13..23: note = RNA
attctctaaaataaacccagcaa

SEQ ID NO: 2532 - DNA, 23 bp, synthetic construct
  source 1..23: mol_type = other DNA
  modified_base 1: mod_base = OTHER; note = 2'-O-methyladenosine-3'-phosphorothioate
  modified_base 2: mod_base = OTHER; note = 2'-deoxyadenosine-3'-phosphorothioate
  modified_base 3: mod_base = OTHER; note = 2'-O-methyluridine-3'-phosphate
  modified_base 4: mod_base = OTHER; note = 2'-O-methyluridine-3'-phosphate
  modified_base 6: mod_base = OTHER; note = 2'-O-methyluridine-3'-phosphate
  modified_base 8: mod_base = OTHER; note = 2'-O-methyluridine-3'-phosphate
  modified_base 9: mod_base = OTHER; note = 2'-O-methyladenosine-3'-phosphate
  modified_base 10: mod_base = OTHER; note = 2'-O-methyladenosine-3'-phosphate
  modified_base 11: mod_base = OTHER; note = 2'-O-methyladenosine-3'-phosphate
  modified_base 13: mod_base = OTHER; note = 2'-O-methyluridine-3'-phosphate
  modified_base 14: mod_base = OTHER; note = 2'-fluoroadenosine-3'-phosphate
  modified_base 15: mod_base = OTHER; note = 2'-O-methyladenosine-3'-phosphate
  modified_base 16: mod_base = OTHER; note = 2'-O-methyladenosine-3'-phosphate
  modified_base 17: mod_base = OTHER; note = 2'-O-methylcytidine-3'-phosphate
  modified_base 18: mod_base = OTHER; note = 2'-O-methylcytidine-3'-phosphate
  modified_base 19: mod_base = OTHER; note = 2'-O-methylcytidine-3'-phosphate
  modified_base 20: mod_base = OTHER; note = 2'-O-methyladenosine-3'-phosphate
  modified_base 21: mod_base = OTHER; note = 2'-O-methylguanosine-3'-phosphorothioate
  modified_base 22: mod_base = OTHER; note = 2'-O-methylcytidine-3'-phosphorothioate
  modified_base 23: mod_base = OTHER; note = 2'-O-methyladenosine-3'-phosphate
  misc_feature 1: note = RNA
  misc_feature 2: note = DNA
  misc_feature 3..4: note = RNA
  misc_feature 5: note = DNA
  misc_feature 6: note = RNA
  misc_feature 7: note = DNA
  misc_feature 8..11: note = RNA
  misc_feature 12: note = DNA
  misc_feature 13..23: note = RNA
aattctctaaaataaacccagca

SEQ ID NO: 2533 - DNA, 23 bp, synthetic construct
  source 1..23: mol_type = other DNA
  modified_base 1: mod_base = OTHER; note = 2'-O-methyladenosine-3'-phosphorothioate
  modified_base 2: mod_base = OTHER; note = 2'-deoxycytidine-3'-phosphorothioate
  modified_base 3: mod_base = OTHER; note = 2'-O-methyladenosine-3'-phosphate
  modified_base 4: mod_base = OTHER; note = 2'-O-methyluridine-3'-phosphate
  modified_base 6: mod_base = OTHER; note = 2'-O-methylcytidine-3'-phosphate
  modified_base 8: mod_base = OTHER; note = 2'-O-methylcytidine-3'-phosphate
  modified_base 9: mod_base = OTHER; note = 2'-O-methyluridine-3'-phosphate
  modified_base 10: mod_base = OTHER; note = 2'-O-methyladenosine-3'-phosphate
  modified_base 11: mod_base = OTHER; note = 2'-O-methyladenosine-3'-phosphate
  modified_base 13: mod_base = OTHER; note = 2'-O-methyladenosine-3'-phosphate
  modified_base 14: mod_base = OTHER; note = 2'-fluorouridine-3'-phosphate
  modified_base 15: mod_base = OTHER; note = 2'-O-methyladenosine-3'-phosphate
  modified_base 16: mod_base = OTHER; note = 2'-O-methyladenosine-3'-phosphate
  modified_base 17: mod_base = OTHER; note = 2'-O-methyladenosine-3'-phosphate
  modified_base 18: mod_base = OTHER; note = 2'-O-methylcytidine-3'-phosphate
  modified_base 19: mod_base = OTHER; note = 2'-O-methylcytidine-3'-phosphate
  modified_base 20: mod_base = OTHER; note = 2'-O-methylcytidine-3'-phosphate
  modified_base 21: mod_base = OTHER; note = 2'-O-methyladenosine-3'-phosphorothioate
  modified_base 22: mod_base = OTHER; note = 2'-O-methylguanosine-3'-phosphorothioate
  modified_base 23: mod_base = OTHER; note = 2'-O-methylcytidine-3'-phosphate
  misc_feature 1: note = RNA
  misc_feature 2: note = DNA
  misc_feature 3..4: note = RNA
  misc_feature 5: note = DNA
  misc_feature 6: note = RNA
  misc_feature 7: note = DNA
  misc_feature 8..11: note = RNA
  misc_feature 12: note = DNA
  misc_feature 13..23: note = RNA
acattctctaaaataaacccagc

SEQ ID NO: 2534 - DNA, 23 bp, synthetic construct
  source 1..23: mol_type = other DNA
  modified_base 1: mod_base = OTHER; note = 2'-O-methyladenosine-3'-phosphorothioate
  modified_base 2: mod_base = OTHER; note = 2'-deoxycytidine-3'-phosphorothioate
  modified_base 3: mod_base = OTHER; note = 2'-O-methylcytidine-3'-phosphate
  modified_base 4: mod_base = OTHER; note = 2'-O-methyladenosine-3'-phosphate
  modified_base 6: mod_base = OTHER; note = 2'-O-methyluridine-3'-phosphate
  modified_base 8: mod_base = OTHER; note = 2'-O-methyluridine-3'-phosphate
  modified_base 9: mod_base = OTHER; note = 2'-O-methylcytidine-3'-phosphate
  modified_base 10: mod_base = OTHER; note = 2'-O-methyluridine-3'-phosphate
  modified_base 11: mod_base = OTHER; note = 2'-O-methyladenosine-3'-phosphate
  modified_base 13: mod_base = OTHER; note = 2'-O-methyladenosine-3'-phosphate
  modified_base 14: mod_base = OTHER; note = 2'-fluoroadenosine-3'-phosphate
  modified_base 15: mod_base = OTHER; note = 2'-O-methyluridine-3'-phosphate
  modified_base 16: mod_base = OTHER; note = 2'-O-methyladenosine-3'-phosphate
  modified_base 17: mod_base = OTHER; note = 2'-O-methyladenosine-3'-phosphate
  modified_base 18: mod_base = OTHER; note = 2'-O-methyladenosine-3'-phosphate
  modified_base 19: mod_base = OTHER; note = 2'-O-methylcytidine-3'-phosphate
  modified_base 20: mod_base = OTHER; note = 2'-O-methylcytidine-3'-phosphate
  modified_base 21: mod_base = OTHER; note = 2'-O-methylcytidine-3'-phosphorothioate
  modified_base 22: mod_base = OTHER; note = 2'-O-methyladenosine-3'-phosphorothioate
  modified_base 23: mod_base = OTHER; note = 2'-O-methylguanosine-3'-phosphate
  misc_feature 1: note = RNA
  misc_feature 2: note = DNA
  misc_feature 3..4: note = RNA
  misc_feature 5: note = DNA
  misc_feature 6: note = RNA
  misc_feature 7: note = DNA
  misc_feature 8..11: note = RNA
  misc_feature 12: note = DNA
  misc_feature 13..23: note = RNA
accattctctaaaataaacccag

SEQ ID NO: 2535 - DNA, 23 bp, synthetic construct
  source 1..23: mol_type = other DNA
  modified_base 1: mod_base = OTHER; note = 2'-O-methyladenosine-3'-phosphorothioate
  modified_base 2: mod_base = OTHER; note = 2'-deoxythimidine-3'-phosphorothioate
  modified_base 3: mod_base = OTHER; note = 2'-O-methyladenosine-3'-phosphate
  modified_base 4: mod_base = OTHER; note = 2'-O-methyladenosine-3'-phosphate
  modified_base 6: mod_base = OTHER; note = 2'-O-methylcytidine-3'-phosphate
  modified_base 8: mod_base = OTHER; note = 2'-O-methylcytidine-3'-phosphate
  modified_base 9: mod_base = OTHER; note = 2'-O-methyluridine-3'-phosphate
  modified_base 10: mod_base = OTHER; note = 2'-O-methylguanosine-3'-phosphate
  modified_base 11: mod_base = OTHER; note = 2'-O-methylguanosine-3'-phosphate
  modified_base 13: mod_base = OTHER; note = 2'-O-methyluridine-3'-phosphate
  modified_base 14: mod_base = OTHER; note = 2'-fluorocytidine-3'-phosphate
  modified_base 15: mod_base = OTHER; note = 2'-O-methyluridine-3'-phosphate
  modified_base 16: mod_base = OTHER; note = 2'-O-methyluridine-3'-phosphate
  modified_base 17: mod_base = OTHER; note = 2'-O-methylguanosine-3'-phosphate
  modified_base 18: mod_base = OTHER; note = 2'-O-methylcytidine-3'-phosphate
  modified_base 19: mod_base = OTHER; note = 2'-O-methylcytidine-3'-phosphate
  modified_base 20: mod_base = OTHER; note = 2'-O-methyluridine-3'-phosphate
  modified_base 21: mod_base = OTHER; note = 2'-O-methylcytidine-3'-phosphorothioate
  modified_base 22: mod_base = OTHER; note = 2'-O-methylcytidine-3'-phosphorothioate
  modified_base 23: mod_base = OTHER; note = 2'-O-methylcytidine-3'-phosphate
  misc_feature 1: note = RNA
  misc_feature 2: note = DNA
  misc_feature 3..4: note = RNA
  misc_feature 5: note = DNA
  misc_feature 6: note = RNA
  misc_feature 7: note = DNA
  misc_feature 8..11: note = RNA
  misc_feature 12: note = DNA
  misc_feature 13..23: note = RNA
ataaacactggttcttgcctccc

SEQ ID NO: 2536 - DNA, 23 bp, synthetic construct
  source 1..23: mol_type = other DNA
  modified_base 1: mod_base = OTHER; note = 2'-O-methyladenosine-3'-phosphorothioate
  modified_base 2: mod_base = OTHER; note = 2'-deoxycytidine-3'-phosphorothioate
  modified_base 3: mod_base = OTHER; note = 2'-O-methyluridine-3'-phosphate
  modified_base 4: mod_base = OTHER; note = 2'-O-methyladenosine-3'-phosphate
  modified_base 6: mod_base = OTHER; note = 2'-O-methyladenosine-3'-phosphate
  modified_base 8: mod_base = OTHER; note = 2'-O-methyladenosine-3'-phosphate
  modified_base 9: mod_base = OTHER; note = 2'-O-methylcytidine-3'-phosphate
  modified_base 10: mod_base = OTHER; note = 2'-O-methyluridine-3'-phosphate
  modified_base 11: mod_base = OTHER; note = 2'-O-methylguanosine-3'-phosphate
  modified_base 13: mod_base = OTHER; note = 2'-O-methyluridine-3'-phosphate
  modified_base 14: mod_base = OTHER; note = 2'-fluorouridine-3'-phosphate
  modified_base 15: mod_base = OTHER; note = 2'-O-methylcytidine-3'-phosphate
  modified_base 16: mod_base = OTHER; note = 2'-O-methyluridine-3'-phosphate
  modified_base 17: mod_base = OTHER; note = 2'-O-methyluridine-3'-phosphate
  modified_base 18: mod_base = OTHER; note = 2'-O-methylguanosine-3'-phosphate
  modified_base 19: mod_base = OTHER; note = 2'-O-methylcytidine-3'-phosphate
  modified_base 20: mod_base = OTHER; note = 2'-O-methylcytidine-3'-phosphate
  modified_base 21: mod_base = OTHER; note = 2'-O-methyluridine-3'-phosphorothioate
  modified_base 22: mod_base = OTHER; note = 2'-O-methylcytidine-3'-phosphorothioate
  modified_base 23: mod_base = OTHER; note = 2'-O-methylcytidine-3'-phosphate
  misc_feature 1: note = RNA
  misc_feature 2: note = DNA
  misc_feature 3..4: note = RNA
  misc_feature 5: note = DNA
  misc_feature 6: note = RNA
  misc_feature 7: note = DNA
  misc_feature 8..11: note = RNA
  misc_feature 12: note = DNA
  misc_feature 13..23: note = RNA
actaaacactggttcttgcctcc

SEQ ID NO: 2537 - DNA, 23 bp, synthetic construct
  source 1..23: mol_type = other DNA
  modified_base 1: mod_base = OTHER; note = 2'-O-methyladenosine-3'-phosphorothioate
  modified_base 2: mod_base = OTHER; note = 2'-deoxyguanosine-3'-phosphorothioate
  modified_base 3: mod_base = OTHER; note = 2'-O-methylcytidine-3'-phosphate
  modified_base 4: mod_base = OTHER; note = 2'-O-methyluridine-3'-phosphate
  modified_base 6: mod_base = OTHER; note = 2'-O-methyladenosine-3'-phosphate
  modified_base 8: mod_base = OTHER; note = 2'-O-methylcytidine-3'-phosphate
  modified_base 9: mod_base = OTHER; note = 2'-O-methyladenosine-3'-phosphate
  modified_base 10: mod_base = OTHER; note = 2'-O-methylcytidine-3'-phosphate
  modified_base 11: mod_base = OTHER; note = 2'-O-methyluridine-3'-phosphate
  modified_base 13: mod_base = OTHER; note = 2'-O-methylguanosine-3'-phosphate
  modified_base 14: mod_base = OTHER; note = 2'-fluorouridine-3'-phosphate
  modified_base 15: mod_base = OTHER; note = 2'-O-methyluridine-3'-phosphate
  modified_base 16: mod_base = OTHER; note = 2'-O-methylcytidine-3'-phosphate
  modified_base 17: mod_base = OTHER; note = 2'-O-methyluridine-3'-phosphate
  modified_base 18: mod_base = OTHER; note = 2'-O-methyluridine-3'-phosphate
  modified_base 19: mod_base = OTHER; note = 2'-O-methylguanosine-3'-phosphate
  modified_base 20: mod_base = OTHER; note = 2'-O-methylcytidine-3'-phosphate
  modified_base 21: mod_base = OTHER; note = 2'-O-methylcytidine-3'-phosphorothioate
  modified_base 22: mod_base = OTHER; note = 2'-O-methyluridine-3'-phosphorothioate
  modified_base 23: mod_base = OTHER; note = 2'-O-methylcytidine-3'-phosphate
  misc_feature 1: note = RNA
  misc_feature 2: note = DNA
  misc_feature 3..4: note = RNA
  misc_feature 5: note = DNA
  misc_feature 6: note = RNA
  misc_feature 7: note = DNA
  misc_feature 8..11: note = RNA
  misc_feature 12: note = DNA
  misc_feature 13..23: note = RNA
agctaaacactggttcttgcctc

SEQ ID NO: 2538 - DNA, 23 bp, synthetic construct
  source 1..23: mol_type = other DNA
  modified_base 1: mod_base = OTHER; note = 2'-O-methyladenosine-3'-phosphorothioate
  modified_base 2: mod_base = OTHER; note = 2'-deoxycytidine-3'-phosphorothioate
  modified_base 3: mod_base = OTHER; note = 2'-O-methylguanosine-3'-phosphate
  modified_base 4: mod_base = OTHER; note = 2'-O-methylcytidine-3'-phosphate
  modified_base 6: mod_base = OTHER; note = 2'-O-methyladenosine-3'-phosphate
  modified_base 8: mod_base = OTHER; note = 2'-O-methyladenosine-3'-phosphate
  modified_base 9: mod_base = OTHER; note = 2'-O-methylcytidine-3'-phosphate
  modified_base 10: mod_base = OTHER; note = 2'-O-methyladenosine-3'-phosphate
  modified_base 11: mod_base = OTHER; note = 2'-O-methylcytidine-3'-phosphate
  modified_base 13: mod_base = OTHER; note = 2'-O-methylguanosine-3'-phosphate
  modified_base 14: mod_base = OTHER; note = 2'-fluoroguanosine-3'-phosphate
  modified_base 15: mod_base = OTHER; note = 2'-O-methyluridine-3'-phosphate
  modified_base 16: mod_base = OTHER; note = 2'-O-methyluridine-3'-phosphate
  modified_base 17: mod_base = OTHER; note = 2'-O-methylcytidine-3'-phosphate
  modified_base 18: mod_base = OTHER; note = 2'-O-methyluridine-3'-phosphate
  modified_base 19: mod_base = OTHER; note = 2'-O-methyluridine-3'-phosphate
  modified_base 20: mod_base = OTHER; note = 2'-O-methylguanosine-3'-phosphate
  modified_base 21: mod_base = OTHER; note = 2'-O-methylcytidine-3'-phosphorothioate
  modified_base 22: mod_base = OTHER; note = 2'-O-methylcytidine-3'-phosphorothioate
  modified_base 23: mod_base = OTHER; note = 2'-O-methyluridine-3'-phosphate
  misc_feature 1: note = RNA
  misc_feature 2: note = DNA
  misc_feature 3..4: note = RNA
  misc_feature 5: note = DNA
  misc_feature 6: note = RNA
  misc_feature 7: note = DNA
  misc_feature 8..11: note = RNA
  misc_feature 12: note = DNA
  misc_feature 13..23: note = RNA
acgctaaacactggttcttgcct

SEQ ID NO: 2539 - DNA, 23 bp, synthetic construct
  source 1..23: mol_type = other DNA
  modified_base 1: mod_base = OTHER; note = 2'-O-methyladenosine-3'-phosphorothioate
  modified_base 2: mod_base = OTHER; note = 2'-deoxyguanosine-3'-phosphorothioate
  modified_base 3: mod_base = OTHER; note = 2'-O-methylcytidine-3'-phosphate
  modified_base 4: mod_base = OTHER; note = 2'-O-methylguanosine-3'-phosphate
  modified_base 6: mod_base = OTHER; note = 2'-O-methyluridine-3'-phosphate
  modified_base 8: mod_base = OTHER; note = 2'-O-methyladenosine-3'-phosphate
  modified_base 9: mod_base = OTHER; note = 2'-O-methyladenosine-3'-phosphate
  modified_base 10: mod_base = OTHER; note = 2'-O-methylcytidine-3'-phosphate
  modified_base 11: mod_base = OTHER; note = 2'-O-methyladenosine-3'-phosphate
  modified_base 13: mod_base = OTHER; note = 2'-O-methyluridine-3'-phosphate
  modified_base 14: mod_base = OTHER; note = 2'-fluoroguanosine-3'-phosphate
  modified_base 15: mod_base = OTHER; note = 2'-O-methylguanosine-3'-phosphate
  modified_base 16: mod_base = OTHER; note = 2'-O-methyluridine-3'-phosphate
  modified_base 17: mod_base = OTHER; note = 2'-O-methyluridine-3'-phosphate
  modified_base 18: mod_base = OTHER; note = 2'-O-methylcytidine-3'-phosphate
  modified_base 19: mod_base = OTHER; note = 2'-O-methyluridine-3'-phosphate
  modified_base 20: mod_base = OTHER; note = 2'-O-methyluridine-3'-phosphate
  modified_base 21: mod_base = OTHER; note = 2'-O-methylguanosine-3'-phosphorothioate
  modified_base 22: mod_base = OTHER; note = 2'-O-methylcytidine-3'-phosphorothioate
  modified_base 23: mod_base = OTHER; note = 2'-O-methylcytidine-3'-phosphate
  misc_feature 1: note = RNA
  misc_feature 2: note = DNA
  misc_feature 3..4: note = RNA
  misc_feature 5: note = DNA
  misc_feature 6: note = RNA
  misc_feature 7: note = DNA
  misc_feature 8..11: note = RNA
  misc_feature 12: note = DNA
  misc_feature 13..23: note = RNA
agcgctaaacactggttcttgcc

SEQ ID NO: 2540 - DNA, 23 bp, synthetic construct
  source 1..23: mol_type = other DNA
  modified_base 1: mod_base = OTHER; note = 2'-O-methyladenosine-3'-phosphorothioate
  modified_base 2: mod_base = OTHER; note = 2'-deoxycytidine-3'-phosphorothioate
  modified_base 3: mod_base = OTHER; note = 2'-O-methylguanosine-3'-phosphate
  modified_base 4: mod_base = OTHER; note = 2'-O-methylcytidine-3'-phosphate
  modified_base 6: mod_base = OTHER; note = 2'-O-methylcytidine-3'-phosphate
  modified_base 8: mod_base = OTHER; note = 2'-O-methyladenosine-3'-phosphate
  modified_base 9: mod_base = OTHER; note = 2'-O-methyladenosine-3'-phosphate
  modified_base 10: mod_base = OTHER; note = 2'-O-methyladenosine-3'-phosphate
  modified_base 11: mod_base = OTHER; note = 2'-O-methylcytidine-3'-phosphate
  modified_base 13: mod_base = OTHER; note = 2'-O-methylcytidine-3'-phosphate
  modified_base 14: mod_base = OTHER; note = 2'-fluorouridine-3'-phosphate
  modified_base 15: mod_base = OTHER; note = 2'-O-methylguanosine-3'-phosphate
  modified_base 16: mod_base = OTHER; note = 2'-O-methylguanosine-3'-phosphate
  modified_base 17: mod_base = OTHER; note = 2'-O-methyluridine-3'-phosphate
  modified_base 18: mod_base = OTHER; note = 2'-O-methyluridine-3'-phosphate
  modified_base 19: mod_base = OTHER; note = 2'-O-methylcytidine-3'-phosphate
  modified_base 20: mod_base = OTHER; note = 2'-O-methyluridine-3'-phosphate
  modified_base 21: mod_base = OTHER; note = 2'-O-methyluridine-3'-phosphorothioate
  modified_base 22: mod_base = OTHER; note = 2'-O-methylguanosine-3'-phosphorothioate
  modified_base 23: mod_base = OTHER; note = 2'-O-methylcytidine-3'-phosphate
  misc_feature 1: note = RNA
  misc_feature 2: note = DNA
  misc_feature 3..4: note = RNA
  misc_feature 5: note = DNA
  misc_feature 6: note = RNA
  misc_feature 7: note = DNA
  misc_feature 8..11: note = RNA
  misc_feature 12: note = DNA
  misc_feature 13..23: note = RNA
acgcgctaaacactggttcttgc

SEQ ID NO: 2541 - DNA, 23 bp, synthetic construct
  source 1..23: mol_type = other DNA
  modified_base 1: mod_base = OTHER; note = 2'-O-methyladenosine-3'-phosphorothioate
  modified_base 2: mod_base = OTHER; note = 2'-deoxycytidine-3'-phosphorothioate
  modified_base 3: mod_base = OTHER; note = 2'-O-methylcytidine-3'-phosphate
  modified_base 4: mod_base = OTHER; note = 2'-O-methylguanosine-3'-phosphate
  modified_base 6: mod_base = OTHER; note = 2'-O-methylguanosine-3'-phosphate
  modified_base 8: mod_base = OTHER; note = 2'-O-methyluridine-3'-phosphate
  modified_base 9: mod_base = OTHER; note = 2'-O-methyladenosine-3'-phosphate
  modified_base 10: mod_base = OTHER; note = 2'-O-methyladenosine-3'-phosphate
  modified_base 11: mod_base = OTHER; note = 2'-O-methyladenosine-3'-phosphate
  modified_base 13: mod_base = OTHER; note = 2'-O-methyladenosine-3'-phosphate
  modified_base 14: mod_base = OTHER; note = 2'-fluorocytidine-3'-phosphate
  modified_base 15: mod_base = OTHER; note = 2'-O-methyluridine-3'-phosphate
  modified_base 16: mod_base = OTHER; note = 2'-O-methylguanosine-3'-phosphate
  modified_base 17: mod_base = OTHER; note = 2'-O-methylguanosine-3'-phosphate
  modified_base 18: mod_base = OTHER; note = 2'-O-methyluridine-3'-phosphate
  modified_base 19: mod_base = OTHER; note = 2'-O-methyluridine-3'-phosphate
  modified_base 20: mod_base = OTHER; note = 2'-O-methylcytidine-3'-phosphate
  modified_base 21: mod_base = OTHER; note = 2'-O-methyluridine-3'-phosphorothioate
  modified_base 22: mod_base = OTHER; note = 2'-O-methyluridine-3'-phosphorothioate
  modified_base 23: mod_base = OTHER; note = 2'-O-methylguanosine-3'-phosphate
  misc_feature 1: note = RNA
  misc_feature 2: note = DNA
  misc_feature 3..4: note = RNA
  misc_feature 5: note = DNA
  misc_feature 6: note = RNA
  misc_feature 7: note = DNA
  misc_feature 8..11: note = RNA
  misc_feature 12: note = DNA
  misc_feature 13..23: note = RNA
accgcgctaaacactggttcttg

SEQ ID NO: 2542 - DNA, 23 bp, synthetic construct
  source 1..23: mol_type = other DNA
  modified_base 1: mod_base = OTHER; note = 2'-O-methyladenosine-3'-phosphorothioate
  modified_base 2: mod_base = OTHER; note = 2'-deoxycytidine-3'-phosphorothioate
  modified_base 3: mod_base = OTHER; note = 2'-O-methylcytidine-3'-phosphate
  modified_base 4: mod_base = OTHER; note = 2'-O-methylcytidine-3'-phosphate
  modified_base 6: mod_base = OTHER; note = 2'-O-methylcytidine-3'-phosphate
  modified_base 8: mod_base = OTHER; note = 2'-O-methylcytidine-3'-phosphate
  modified_base 9: mod_base = OTHER; note = 2'-O-methyluridine-3'-phosphate
  modified_base 10: mod_base = OTHER; note = 2'-O-methyladenosine-3'-phosphate
  modified_base 11: mod_base = OTHER; note = 2'-O-methyladenosine-3'-phosphate
  modified_base 13: mod_base = OTHER; note = 2'-O-methylcytidine-3'-phosphate
  modified_base 14: mod_base = OTHER; note = 2'-fluoroadenosine-3'-phosphate
  modified_base 15: mod_base = OTHER; note = 2'-O-methylcytidine-3'-phosphate
  modified_base 16: mod_base = OTHER; note = 2'-O-methyluridine-3'-phosphate
  modified_base 17: mod_base = OTHER; note = 2'-O-methylguanosine-3'-phosphate
  modified_base 18: mod_base = OTHER; note = 2'-O-methylguanosine-3'-phosphate
  modified_base 19: mod_base = OTHER; note = 2'-O-methyluridine-3'-phosphate
  modified_base 20: mod_base = OTHER; note = 2'-O-methyluridine-3'-phosphate
  modified_base 21: mod_base = OTHER; note = 2'-O-methylcytidine-3'-phosphorothioate
  modified_base 22: mod_base = OTHER; note = 2'-O-methyluridine-3'-phosphorothioate
  modified_base 23: mod_base = OTHER; note = 2'-O-methyluridine-3'-phosphate
  misc_feature 1: note = RNA
  misc_feature 2: note = DNA
  misc_feature 3..4: note = RNA
  misc_feature 5: note = DNA
  misc_feature 6: note = RNA
  misc_feature 7: note = DNA
  misc_feature 8..11: note = RNA
  misc_feature 12: note = DNA
  misc_feature 13..23: note = RNA
acccgcgctaaacactggttctt

SEQ ID NO: 2543 - DNA, 23 bp, synthetic construct
  source 1..23: mol_type = other DNA
  modified_base 1: mod_base = OTHER; note = 2'-O-methyladenosine-3'-phosphorothioate
  modified_base 2: mod_base = OTHER; note = 2'-deoxythimidine-3'-phosphorothioate
  modified_base 3: mod_base = OTHER; note = 2'-O-methylcytidine-3'-phosphate
  modified_base 4: mod_base = OTHER; note = 2'-O-methylcytidine-3'-phosphate
  modified_base 6: mod_base = OTHER; note = 2'-O-methylguanosine-3'-phosphate
  modified_base 8: mod_base = OTHER; note = 2'-O-methylguanosine-3'-phosphate
  modified_base 9: mod_base = OTHER; note = 2'-O-methylcytidine-3'-phosphate
  modified_base 10: mod_base = OTHER; note = 2'-O-methyluridine-3'-phosphate
  modified_base 11: mod_base = OTHER; note = 2'-O-methyladenosine-3'-phosphate
  modified_base 13: mod_base = OTHER; note = 2'-O-methyladenosine-3'-phosphate
  modified_base 14: mod_base = OTHER; note = 2'-fluorocytidine-3'-phosphate
  modified_base 15: mod_base = OTHER; note = 2'-O-methyladenosine-3'-phosphate
  modified_base 16: mod_base = OTHER; note = 2'-O-methylcytidine-3'-phosphate
  modified_base 17: mod_base = OTHER; note = 2'-O-methyluridine-3'-phosphate
  modified_base 18: mod_base = OTHER; note = 2'-O-methylguanosine-3'-phosphate
  modified_base 19: mod_base = OTHER; note = 2'-O-methylguanosine-3'-phosphate
  modified_base 20: mod_base = OTHER; note = 2'-O-methyluridine-3'-phosphate
  modified_base 21: mod_base = OTHER; note = 2'-O-methyluridine-3'-phosphorothioate
  modified_base 22: mod_base = OTHER; note = 2'-O-methylcytidine-3'-phosphorothioate
  modified_base 23: mod_base = OTHER; note = 2'-O-methyluridine-3'-phosphate
  misc_feature 1: note = RNA
  misc_feature 2: note = DNA
  misc_feature 3..4: note = RNA
  misc_feature 5: note = DNA
  misc_feature 6: note = RNA
  misc_feature 7: note = DNA
  misc_feature 8..11: note = RNA
  misc_feature 12: note = DNA
  misc_feature 13..23: note = RNA
atcccgcgctaaacactggttct

SEQ ID NO: 2544 - DNA, 23 bp, synthetic construct
  source 1..23: mol_type = other DNA
  modified_base 1: mod_base = OTHER; note = 2'-O-methyladenosine-3'-phosphorothioate
  modified_base 2: mod_base = OTHER; note = 2'-deoxythimidine-3'-phosphorothioate
  modified_base 3: mod_base = OTHER; note = 2'-O-methylguanosine-3'-phosphate
  modified_base 4: mod_base = OTHER; note = 2'-O-methylguanosine-3'-phosphate
  modified_base 6: mod_base = OTHER; note = 2'-O-methyladenosine-3'-phosphate
  modified_base 8: mod_base = OTHER; note = 2'-O-methyluridine-3'-phosphate
  modified_base 9: mod_base = OTHER; note = 2'-O-methylcytidine-3'-phosphate
  modified_base 10: mod_base = OTHER; note = 2'-O-methyluridine-3'-phosphate
  modified_base 11: mod_base = OTHER; note = 2'-O-methyluridine-3'-phosphate
  modified_base 13: mod_base = OTHER; note = 2'-O-methyluridine-3'-phosphate
  modified_base 14: mod_base = OTHER; note = 2'-fluorouridine-3'-phosphate
  modified_base 15: mod_base = OTHER; note = 2'-O-methylguanosine-3'-phosphate
  modified_base 16: mod_base = OTHER; note = 2'-O-methylguanosine-3'-phosphate
  modified_base 17: mod_base = OTHER; note = 2'-O-methyladenosine-3'-phosphate
  modified_base 18: mod_base = OTHER; note = 2'-O-methyladenosine-3'-phosphate
  modified_base 19: mod_base = OTHER; note = 2'-O-methylcytidine-3'-phosphate
  modified_base 20: mod_base = OTHER; note = 2'-O-methyladenosine-3'-phosphate
  modified_base 21: mod_base = OTHER; note = 2'-O-methylguanosine-3'-phosphorothioate
  modified_base 22: mod_base = OTHER; note = 2'-O-methyluridine-3'-phosphorothioate
  modified_base 23: mod_base = OTHER; note = 2'-O-methyladenosine-3'-phosphate
  misc_feature 1: note = RNA
  misc_feature 2: note = DNA
  misc_feature 3..4: note = RNA
  misc_feature 5: note = DNA
  misc_feature 6: note = RNA
  misc_feature 7: note = DNA
  misc_feature 8..11: note = RNA
  misc_feature 12: note = DNA
  misc_feature 13..23: note = RNA
atggaattctttttggaacagta

SEQ ID NO: 2545 - DNA, 23 bp, synthetic construct
  source 1..23: mol_type = other DNA
  modified_base 1: mod_base = OTHER; note = 2'-O-methyladenosine-3'-phosphorothioate
  modified_base 2: mod_base = OTHER; note = 2'-deoxythimidine-3'-phosphorothioate
  modified_base 3: mod_base = OTHER; note = 2'-O-methyluridine-3'-phosphate
  modified_base 4: mod_base = OTHER; note = 2'-O-methylguanosine-3'-phosphate
  modified_base 6: mod_base = OTHER; note = 2'-O-methyladenosine-3'-phosphate
  modified_base 8: mod_base = OTHER; note = 2'-O-methyluridine-3'-phosphate
  modified_base 9: mod_base = OTHER; note = 2'-O-methyluridine-3'-phosphate
  modified_base 10: mod_base = OTHER; note = 2'-O-methylcytidine-3'-phosphate
  modified_base 11: mod_base = OTHER; note = 2'-O-methyluridine-3'-phosphate
  modified_base 13: mod_base = OTHER; note = 2'-O-methyluridine-3'-phosphate
  modified_base 14: mod_base = OTHER; note = 2'-fluorouridine-3'-phosphate
  modified_base 15: mod_base = OTHER; note = 2'-O-methyluridine-3'-phosphate
  modified_base 16: mod_base = OTHER; note = 2'-O-methylguanosine-3'-phosphate
  modified_base 17: mod_base = OTHER; note = 2'-O-methylguanosine-3'-phosphate
  modified_base 18: mod_base = OTHER; note = 2'-O-methyladenosine-3'-phosphate
  modified_base 19: mod_base = OTHER; note = 2'-O-methyladenosine-3'-phosphate
  modified_base 20: mod_base = OTHER; note = 2'-O-methylcytidine-3'-phosphate
  modified_base 21: mod_base = OTHER; note = 2'-O-methyladenosine-3'-phosphorothioate
  modified_base 22: mod_base = OTHER; note = 2'-O-methylguanosine-3'-phosphorothioate
  modified_base 23: mod_base = OTHER; note = 2'-O-methyluridine-3'-phosphate
  misc_feature 1: note = RNA
  misc_feature 2: note = DNA
  misc_feature 3..4: note = RNA
  misc_feature 5: note = DNA
  misc_feature 6: note = RNA
  misc_feature 7: note = DNA
  misc_feature 8..11: note = RNA
  misc_feature 12: note = DNA
  misc_feature 13..23: note = RNA
attggaattctttttggaacagt

SEQ ID NO: 2546 - DNA, 23 bp, synthetic construct
  source 1..23: mol_type = other DNA
  modified_base 1: mod_base = OTHER; note = 2'-O-methyladenosine-3'-phosphorothioate
  modified_base 2: mod_base = OTHER; note = 2'-deoxyguanosine-3'-phosphorothioate
  modified_base 3: mod_base = OTHER; note = 2'-O-methyluridine-3'-phosphate
  modified_base 4: mod_base = OTHER; note = 2'-O-methyluridine-3'-phosphate
  modified_base 6: mod_base = OTHER; note = 2'-O-methylguanosine-3'-phosphate
  modified_base 8: mod_base = OTHER; note = 2'-O-methyladenosine-3'-phosphate
  modified_base 9: mod_base = OTHER; note = 2'-O-methyluridine-3'-phosphate
  modified_base 10: mod_base = OTHER; note = 2'-O-methyluridine-3'-phosphate
  modified_base 11: mod_base = OTHER; note = 2'-O-methylcytidine-3'-phosphate
  modified_base 13: mod_base = OTHER; note = 2'-O-methyluridine-3'-phosphate
  modified_base 14: mod_base = OTHER; note = 2'-fluorouridine-3'-phosphate
  modified_base 15: mod_base = OTHER; note = 2'-O-methyluridine-3'-phosphate
  modified_base 16: mod_base = OTHER; note = 2'-O-methyluridine-3'-phosphate
  modified_base 17: mod_base = OTHER; note = 2'-O-methylguanosine-3'-phosphate
  modified_base 18: mod_base = OTHER; note = 2'-O-methylguanosine-3'-phosphate
  modified_base 19: mod_base = OTHER; note = 2'-O-methyladenosine-3'-phosphate
  modified_base 20: mod_base = OTHER; note = 2'-O-methyladenosine-3'-phosphate
  modified_base 21: mod_base = OTHER; note = 2'-O-methylcytidine-3'-phosphorothioate
  modified_base 22: mod_base = OTHER; note = 2'-O-methyladenosine-3'-phosphorothioate
  modified_base 23: mod_base = OTHER; note = 2'-O-methylguanosine-3'-phosphate
  misc_feature 1: note = RNA
  misc_feature 2: note = DNA
  misc_feature 3..4: note = RNA
  misc_feature 5: note = DNA
  misc_feature 6: note = RNA
  misc_feature 7: note = DNA
  misc_feature 8..11: note = RNA
  misc_feature 12: note = DNA
  misc_feature 13..23: note = RNA
agttggaattctttttggaacag

SEQ ID NO: 2547 - DNA, 23 bp, synthetic construct
  source 1..23: mol_type = other DNA
  modified_base 1: mod_base = OTHER; note = 2'-O-methyladenosine-3'-phosphorothioate
  modified_base 2: mod_base = OTHER; note = 2'-deoxycytidine-3'-phosphorothioate
  modified_base 3: mod_base = OTHER; note = 2'-O-methylguanosine-3'-phosphate
  modified_base 4: mod_base = OTHER; note = 2'-O-methylguanosine-3'-phosphate
  modified_base 6: mod_base = OTHER; note = 2'-O-methyluridine-3'-phosphate
  modified_base 8: mod_base = OTHER; note = 2'-O-methylguanosine-3'-phosphate
  modified_base 9: mod_base = OTHER; note = 2'-O-methyladenosine-3'-phosphate
  modified_base 10: mod_base = OTHER; note = 2'-O-methyladenosine-3'-phosphate
  modified_base 11: mod_base = OTHER; note = 2'-O-methyluridine-3'-phosphate
  modified_base 13: mod_base = OTHER; note = 2'-O-methylcytidine-3'-phosphate
  modified_base 14: mod_base = OTHER; note = 2'-fluorouridine-3'-phosphate
  modified_base 15: mod_base = OTHER; note = 2'-O-methyluridine-3'-phosphate
  modified_base 16: mod_base = OTHER; note = 2'-O-methyluridine-3'-phosphate
  modified_base 17: mod_base = OTHER; note = 2'-O-methyluridine-3'-phosphate
  modified_base 18: mod_base = OTHER; note = 2'-O-methyluridine-3'-phosphate
  modified_base 19: mod_base = OTHER; note = 2'-O-methylguanosine-3'-phosphate
  modified_base 20: mod_base = OTHER; note = 2'-O-methylguanosine-3'-phosphate
  modified_base 21: mod_base = OTHER; note = 2'-O-methyladenosine-3'-phosphorothioate
  modified_base 22: mod_base = OTHER; note = 2'-O-methyladenosine-3'-phosphorothioate
  modified_base 23: mod_base = OTHER; note = 2'-O-methylcytidine-3'-phosphate
  misc_feature 1: note = RNA
  misc_feature 2: note = DNA
  misc_feature 3..4: note = RNA
  misc_feature 5: note = DNA
  misc_feature 6: note = RNA
  misc_feature 7: note = DNA
  misc_feature 8..11: note = RNA
  misc_feature 12: note = DNA
  misc_feature 13..23: note = RNA
acggttggaattctttttggaac

SEQ ID NO: 2548 - DNA, 23 bp, synthetic construct
  source 1..23: mol_type = other DNA
  modified_base 1: mod_base = OTHER; note = 2'-O-methyladenosine-3'-phosphorothioate
  modified_base 2: mod_base = OTHER; note = 2'-deoxythimidine-3'-phosphorothioate
  modified_base 3: mod_base = OTHER; note = 2'-O-methylcytidine-3'-phosphate
  modified_base 4: mod_base = OTHER; note = 2'-O-methylguanosine-3'-phosphate
  modified_base 6: mod_base = OTHER; note = 2'-O-methyluridine-3'-phosphate
  modified_base 8: mod_base = OTHER; note = 2'-O-methylguanosine-3'-phosphate
  modified_base 9: mod_base = OTHER; note = 2'-O-methylguanosine-3'-phosphate
  modified_base 10: mod_base = OTHER; note = 2'-O-methyladenosine-3'-phosphate
  modified_base 11: mod_base = OTHER; note = 2'-O-methyladenosine-3'-phosphate
  modified_base 13: mod_base = OTHER; note = 2'-O-methyluridine-3'-phosphate
  modified_base 14: mod_base = OTHER; note = 2'-fluorocytidine-3'-phosphate
  modified_base 15: mod_base = OTHER; note = 2'-O-methyluridine-3'-phosphate
  modified_base 16: mod_base = OTHER; note = 2'-O-methyluridine-3'-phosphate
  modified_base 17: mod_base = OTHER; note = 2'-O-methyluridine-3'-phosphate
  modified_base 18: mod_base = OTHER; note = 2'-O-methyluridine-3'-phosphate
  modified_base 19: mod_base = OTHER; note = 2'-O-methyluridine-3'-phosphate
  modified_base 20: mod_base = OTHER; note = 2'-O-methylguanosine-3'-phosphate
  modified_base 21: mod_base = OTHER; note = 2'-O-methylguanosine-3'-phosphorothioate
  modified_base 22: mod_base = OTHER; note = 2'-O-methyladenosine-3'-phosphorothioate
  modified_base 23: mod_base = OTHER; note = 2'-O-methyladenosine-3'-phosphate
  misc_feature 1: note = RNA
  misc_feature 2: note = DNA
  misc_feature 3..4: note = RNA
  misc_feature 5: note = DNA
  misc_feature 6: note = RNA
  misc_feature 7: note = DNA
  misc_feature 8..11: note = RNA
  misc_feature 12: note = DNA
  misc_feature 13..23: note = RNA
atcggttggaattctttttggaa

SEQ ID NO: 2549 - DNA, 23 bp, synthetic construct
  source 1..23: mol_type = other DNA
  modified_base 1: mod_base = OTHER; note = 2'-O-methyladenosine-3'-phosphorothioate
  modified_base 2: mod_base = OTHER; note = 2'-deoxyguanosine-3'-phosphorothioate
  modified_base 3: mod_base = OTHER; note = 2'-O-methyluridine-3'-phosphate
  modified_base 4: mod_base = OTHER; note = 2'-O-methylcytidine-3'-phosphate
  modified_base 6: mod_base = OTHER; note = 2'-O-methylguanosine-3'-phosphate
  modified_base 8: mod_base = OTHER; note = 2'-O-methyluridine-3'-phosphate
  modified_base 9: mod_base = OTHER; note = 2'-O-methylguanosine-3'-phosphate
  modified_base 10: mod_base = OTHER; note = 2'-O-methylguanosine-3'-phosphate
  modified_base 11: mod_base = OTHER; note = 2'-O-methyladenosine-3'-phosphate
  modified_base 13: mod_base = OTHER; note = 2'-O-methyluridine-3'-phosphate
  modified_base 14: mod_base = OTHER; note = 2'-fluorouridine-3'-phosphate
  modified_base 15: mod_base = OTHER; note = 2'-O-methylcytidine-3'-phosphate
  modified_base 16: mod_base = OTHER; note = 2'-O-methyluridine-3'-phosphate
  modified_base 17: mod_base = OTHER; note = 2'-O-methyluridine-3'-phosphate
  modified_base 18: mod_base = OTHER; note = 2'-O-methyluridine-3'-phosphate
  modified_base 19: mod_base = OTHER; note = 2'-O-methyluridine-3'-phosphate
  modified_base 20: mod_base = OTHER; note = 2'-O-methyluridine-3'-phosphate
  modified_base 21: mod_base = OTHER; note = 2'-O-methylguanosine-3'-phosphorothioate
  modified_base 22: mod_base = OTHER; note = 2'-O-methylguanosine-3'-phosphorothioate
  modified_base 23: mod_base = OTHER; note = 2'-O-methyladenosine-3'-phosphate
  misc_feature 1: note = RNA
  misc_feature 2: note = DNA
  misc_feature 3..4: note = RNA
  misc_feature 5: note = DNA
  misc_feature 6: note = RNA
  misc_feature 7: note = DNA
  misc_feature 8..11: note = RNA
  misc_feature 12: note = DNA
  misc_feature 13..23: note = RNA
agtcggttggaattctttttgga

SEQ ID NO: 2550 - DNA, 23 bp, synthetic construct
  source 1..23: mol_type = other DNA
  modified_base 1: mod_base = OTHER; note = 2'-O-methyladenosine-3'-phosphorothioate
  modified_base 2: mod_base = OTHER; note = 2'-deoxyguanosine-3'-phosphorothioate
  modified_base 3: mod_base = OTHER; note = 2'-O-methylguanosine-3'-phosphate
  modified_base 4: mod_base = OTHER; note = 2'-O-methyluridine-3'-phosphate
  modified_base 6: mod_base = OTHER; note = 2'-O-methylguanosine-3'-phosphate
  modified_base 8: mod_base = OTHER; note = 2'-O-methyluridine-3'-phosphate
  modified_base 9: mod_base = OTHER; note = 2'-O-methyluridine-3'-phosphate
  modified_base 10: mod_base = OTHER; note = 2'-O-methylguanosine-3'-phosphate
  modified_base 11: mod_base = OTHER; note = 2'-O-methylguanosine-3'-phosphate
  modified_base 13: mod_base = OTHER; note = 2'-O-methyladenosine-3'-phosphate
  modified_base 14: mod_base = OTHER; note = 2'-fluorouridine-3'-phosphate
  modified_base 15: mod_base = OTHER; note = 2'-O-methyluridine-3'-phosphate
  modified_base 16: mod_base = OTHER; note = 2'-O-methylcytidine-3'-phosphate
  modified_base 17: mod_base = OTHER; note = 2'-O-methyluridine-3'-phosphate
  modified_base 18: mod_base = OTHER; note = 2'-O-methyluridine-3'-phosphate
  modified_base 19: mod_base = OTHER; note = 2'-O-methyluridine-3'-phosphate
  modified_base 20: mod_base = OTHER; note = 2'-O-methyluridine-3'-phosphate
  modified_base 21: mod_base = OTHER; note = 2'-O-methyluridine-3'-phosphorothioate
  modified_base 22: mod_base = OTHER; note = 2'-O-methylguanosine-3'-phosphorothioate
  modified_base 23: mod_base = OTHER; note = 2'-O-methylguanosine-3'-phosphate
  misc_feature 1: note = RNA
  misc_feature 2: note = DNA
  misc_feature 3..4: note = RNA
  misc_feature 5: note = DNA
  misc_feature 6: note = RNA
  misc_feature 7: note = DNA
  misc_feature 8..11: note = RNA
  misc_feature 12: note = DNA
  misc_feature 13..23: note = RNA
aggtcggttggaattctttttgg

SEQ ID NO: 2551 - DNA, 23 bp, synthetic construct
  source 1..23: mol_type = other DNA
  modified_base 1: mod_base = OTHER; note = 2'-O-methyladenosine-3'-phosphorothioate
  modified_base 2: mod_base = OTHER; note = 2'-deoxythimidine-3'-phosphorothioate
  modified_base 3: mod_base = OTHER; note = 2'-O-methylguanosine-3'-phosphate
  modified_base 4: mod_base = OTHER; note = 2'-O-methylguanosine-3'-phosphate
  modified_base 6: mod_base = OTHER; note = 2'-O-methylcytidine-3'-phosphate
  modified_base 8: mod_base = OTHER; note = 2'-O-methylguanosine-3'-phosphate
  modified_base 9: mod_base = OTHER; note = 2'-O-methyluridine-3'-phosphate
  modified_base 10: mod_base = OTHER; note = 2'-O-methyluridine-3'-phosphate
  modified_base 11: mod_base = OTHER; note = 2'-O-methylguanosine-3'-phosphate
  modified_base 13: mod_base = OTHER; note = 2'-O-methyladenosine-3'-phosphate
  modified_base 14: mod_base = OTHER; note = 2'-fluoroadenosine-3'-phosphate
  modified_base 15: mod_base = OTHER; note = 2'-O-methyluridine-3'-phosphate
  modified_base 16: mod_base = OTHER; note = 2'-O-methyluridine-3'-phosphate
  modified_base 17: mod_base = OTHER; note = 2'-O-methylcytidine-3'-phosphate
  modified_base 18: mod_base = OTHER; note = 2'-O-methyluridine-3'-phosphate
  modified_base 19: mod_base = OTHER; note = 2'-O-methyluridine-3'-phosphate
  modified_base 20: mod_base = OTHER; note = 2'-O-methyluridine-3'-phosphate
  modified_base 21: mod_base = OTHER; note = 2'-O-methyluridine-3'-phosphorothioate
  modified_base 22: mod_base = OTHER; note = 2'-O-methyluridine-3'-phosphorothioate
  modified_base 23: mod_base = OTHER; note = 2'-O-methylguanosine-3'-phosphate
  misc_feature 1: note = RNA
  misc_feature 2: note = DNA
  misc_feature 3..4: note = RNA
  misc_feature 5: note = DNA
  misc_feature 6: note = RNA
  misc_feature 7: note = DNA
  misc_feature 8..11: note = RNA
  misc_feature 12: note = DNA
  misc_feature 13..23: note = RNA
atggtcggttggaattctttttg

SEQ ID NO: 2552 - DNA, 23 bp, synthetic construct
  source 1..23: mol_type = other DNA
  modified_base 1: mod_base = OTHER; note = 2'-O-methyladenosine-3'-phosphorothioate
  modified_base 2: mod_base = OTHER; note = 2'-deoxycytidine-3'-phosphorothioate
  modified_base 3: mod_base = OTHER; note = 2'-O-methyluridine-3'-phosphate
  modified_base 4: mod_base = OTHER; note = 2'-O-methylguanosine-3'-phosphate
  modified_base 6: mod_base = OTHER; note = 2'-O-methyluridine-3'-phosphate
  modified_base 8: mod_base = OTHER; note = 2'-O-methylguanosine-3'-phosphate
  modified_base 9: mod_base = OTHER; note = 2'-O-methylguanosine-3'-phosphate
  modified_base 10: mod_base = OTHER; note = 2'-O-methyluridine-3'-phosphate
  modified_base 11: mod_base = OTHER; note = 2'-O-methyluridine-3'-phosphate
  modified_base 13: mod_base = OTHER; note = 2'-O-methylguanosine-3'-phosphate
  modified_base 14: mod_base = OTHER; note = 2'-fluoroadenosine-3'-phosphate
  modified_base 15: mod_base = OTHER; note = 2'-O-methyladenosine-3'-phosphate
  modified_base 16: mod_base = OTHER; note = 2'-O-methyluridine-3'-phosphate
  modified_base 17: mod_base = OTHER; note = 2'-O-methyluridine-3'-phosphate
  modified_base 18: mod_base = OTHER; note = 2'-O-methylcytidine-3'-phosphate
  modified_base 19: mod_base = OTHER; note = 2'-O-methyluridine-3'-phosphate
  modified_base 20: mod_base = OTHER; note = 2'-O-methyluridine-3'-phosphate
  modified_base 21: mod_base = OTHER; note = 2'-O-methyluridine-3'-phosphorothioate
  modified_base 22: mod_base = OTHER; note = 2'-O-methyluridine-3'-phosphorothioate
  modified_base 23: mod_base = OTHER; note = 2'-O-methyluridine-3'-phosphate
  misc_feature 1: note = RNA
  misc_feature 2: note = DNA
  misc_feature 3..4: note = RNA
  misc_feature 5: note = DNA
  misc_feature 6: note = RNA
  misc_feature 7: note = DNA
  misc_feature 8..11: note = RNA
  misc_feature 12: note = DNA
  misc_feature 13..23: note = RNA
actggtcggttggaattcttttt

SEQ ID NO: 2553 - DNA, 23 bp, synthetic construct
  source 1..23: mol_type = other DNA
  modified_base 1: mod_base = OTHER; note = 2'-O-methyladenosine-3'-phosphorothioate
  modified_base 2: mod_base = OTHER; note = 2'-deoxyguanosine-3'-phosphorothioate
  modified_base 3: mod_base = OTHER; note = 2'-O-methylcytidine-3'-phosphate
  modified_base 4: mod_base = OTHER; note = 2'-O-methyluridine-3'-phosphate
  modified_base 6: mod_base = OTHER; note = 2'-O-methylguanosine-3'-phosphate
  modified_base 8: mod_base = OTHER; note = 2'-O-methylcytidine-3'-phosphate
  modified_base 9: mod_base = OTHER; note = 2'-O-methylguanosine-3'-phosphate
  modified_base 10: mod_base = OTHER; note = 2'-O-methylguanosine-3'-phosphate
  modified_base 11: mod_base = OTHER; note = 2'-O-methyluridine-3'-phosphate
  modified_base 13: mod_base = OTHER; note = 2'-O-methylguanosine-3'-phosphate
  modified_base 14: mod_base = OTHER; note = 2'-fluoroguanosine-3'-phosphate
  modified_base 15: mod_base = OTHER; note = 2'-O-methyladenosine-3'-phosphate
  modified_base 16: mod_base = OTHER; note = 2'-O-methyladenosine-3'-phosphate
  modified_base 17: mod_base = OTHER; note = 2'-O-methyluridine-3'-phosphate
  modified_base 18: mod_base = OTHER; note = 2'-O-methyluridine-3'-phosphate
  modified_base 19: mod_base = OTHER; note = 2'-O-methylcytidine-3'-phosphate
  modified_base 20: mod_base = OTHER; note = 2'-O-methyluridine-3'-phosphate
  modified_base 21: mod_base = OTHER; note = 2'-O-methyluridine-3'-phosphorothioate
  modified_base 22: mod_base = OTHER; note = 2'-O-methyluridine-3'-phosphorothioate
  modified_base 23: mod_base = OTHER; note = 2'-O-methyluridine-3'-phosphate
  misc_feature 1: note = RNA
  misc_feature 2: note = DNA
  misc_feature 3..4: note = RNA
  misc_feature 5: note = DNA
  misc_feature 6: note = RNA
  misc_feature 7: note = DNA
  misc_feature 8..11: note = RNA
  misc_feature 12: note = DNA
  misc_feature 13..23: note = RNA
agctggtcggttggaattctttt

SEQ ID NO: 2554 - DNA, 23 bp, synthetic construct
  source 1..23: mol_type = other DNA
  modified_base 1: mod_base = OTHER; note = 2'-O-methyladenosine-3'-phosphorothioate
  modified_base 2: mod_base = OTHER; note = 2'-deoxyadenosine-3'-phosphorothioate
  modified_base 3: mod_base = OTHER; note = 2'-O-methylguanosine-3'-phosphate
  modified_base 4: mod_base = OTHER; note = 2'-O-methylcytidine-3'-phosphate
  modified_base 6: mod_base = OTHER; note = 2'-O-methylguanosine-3'-phosphate
  modified_base 8: mod_base = OTHER; note = 2'-O-methyluridine-3'-phosphate
  modified_base 9: mod_base = OTHER; note = 2'-O-methylcytidine-3'-phosphate
  modified_base 10: mod_base = OTHER; note = 2'-O-methylguanosine-3'-phosphate
  modified_base 11: mod_base = OTHER; note = 2'-O-methylguanosine-3'-phosphate
  modified_base 13: mod_base = OTHER; note = 2'-O-methyluridine-3'-phosphate
  modified_base 14: mod_base = OTHER; note = 2'-fluoroguanosine-3'-phosphate
  modified_base 15: mod_base = OTHER; note = 2'-O-methylguanosine-3'-phosphate
  modified_base 16: mod_base = OTHER; note = 2'-O-methyladenosine-3'-phosphate
  modified_base 17: mod_base = OTHER; note = 2'-O-methyladenosine-3'-phosphate
  modified_base 18: mod_base = OTHER; note = 2'-O-methyluridine-3'-phosphate
  modified_base 19: mod_base = OTHER; note = 2'-O-methyluridine-3'-phosphate
  modified_base 20: mod_base = OTHER; note = 2'-O-methylcytidine-3'-phosphate
  modified_base 21: mod_base = OTHER; note = 2'-O-methyluridine-3'-phosphorothioate
  modified_base 22: mod_base = OTHER; note = 2'-O-methyluridine-3'-phosphorothioate
  modified_base 23: mod_base = OTHER; note = 2'-O-methyluridine-3'-phosphate
  misc_feature 1: note = RNA
  misc_feature 2: note = DNA
  misc_feature 3..4: note = RNA
  misc_feature 5: note = DNA
  misc_feature 6: note = RNA
  misc_feature 7: note = DNA
  misc_feature 8..11: note = RNA
  misc_feature 12: note = DNA
  misc_feature 13..23: note = RNA
aagctggtcggttggaattcttt

SEQ ID NO: 2555 - DNA, 23 bp, synthetic construct
  source 1..23: mol_type = other DNA
  modified_base 1: mod_base = OTHER; note = 2'-O-methyladenosine-3'-phosphorothioate
  modified_base 2: mod_base = OTHER; note = 2'-deoxyadenosine-3'-phosphorothioate
  modified_base 3: mod_base = OTHER; note = 2'-O-methyladenosine-3'-phosphate
  modified_base 4: mod_base = OTHER; note = 2'-O-methylguanosine-3'-phosphate
  modified_base 6: mod_base = OTHER; note = 2'-O-methyluridine-3'-phosphate
  modified_base 8: mod_base = OTHER; note = 2'-O-methylguanosine-3'-phosphate
  modified_base 9: mod_base = OTHER; note = 2'-O-methyluridine-3'-phosphate
  modified_base 10: mod_base = OTHER; note = 2'-O-methylcytidine-3'-phosphate
  modified_base 11: mod_base = OTHER; note = 2'-O-methylguanosine-3'-phosphate
  modified_base 13: mod_base = OTHER; note = 2'-O-methyluridine-3'-phosphate
  modified_base 14: mod_base = OTHER; note = 2'-fluorouridine-3'-phosphate
  modified_base 15: mod_base = OTHER; note = 2'-O-methylguanosine-3'-phosphate
  modified_base 16: mod_base = OTHER; note = 2'-O-methylguanosine-3'-phosphate
  modified_base 17: mod_base = OTHER; note = 2'-O-methyladenosine-3'-phosphate
  modified_base 18: mod_base = OTHER; note = 2'-O-methyladenosine-3'-phosphate
  modified_base 19: mod_base = OTHER; note = 2'-O-methyluridine-3'-phosphate
  modified_base 20: mod_base = OTHER; note = 2'-O-methyluridine-3'-phosphate
  modified_base 21: mod_base = OTHER; note = 2'-O-methylcytidine-3'-phosphorothioate
  modified_base 22: mod_base = OTHER; note = 2'-O-methyluridine-3'-phosphorothioate
  modified_base 23: mod_base = OTHER; note = 2'-O-methyluridine-3'-phosphate
  misc_feature 1: note = RNA
  misc_feature 2: note = DNA
  misc_feature 3..4: note = RNA
  misc_feature 5: note = DNA
  misc_feature 6: note = RNA
  misc_feature 7: note = DNA
  misc_feature 8..11: note = RNA
  misc_feature 12: note = DNA
  misc_feature 13..23: note = RNA
aaagctggtcggttggaattctt

SEQ ID NO: 2556 - DNA, 23 bp, synthetic construct
  source 1..23: mol_type = other DNA
  modified_base 1: mod_base = OTHER; note = 2'-O-methyladenosine-3'-phosphorothioate
  modified_base 2: mod_base = OTHER; note = 2'-deoxycytidine-3'-phosphorothioate
  modified_base 3: mod_base = OTHER; note = 2'-O-methyladenosine-3'-phosphate
  modified_base 4: mod_base = OTHER; note = 2'-O-methyladenosine-3'-phosphate
  modified_base 6: mod_base = OTHER; note = 2'-O-methylcytidine-3'-phosphate
  modified_base 8: mod_base = OTHER; note = 2'-O-methylguanosine-3'-phosphate
  modified_base 9: mod_base = OTHER; note = 2'-O-methylguanosine-3'-phosphate
  modified_base 10: mod_base = OTHER; note = 2'-O-methyluridine-3'-phosphate
  modified_base 11: mod_base = OTHER; note = 2'-O-methylcytidine-3'-phosphate
  modified_base 13: mod_base = OTHER; note = 2'-O-methylguanosine-3'-phosphate
  modified_base 14: mod_base = OTHER; note = 2'-fluorouridine-3'-phosphate
  modified_base 15: mod_base = OTHER; note = 2'-O-methyluridine-3'-phosphate
  modified_base 16: mod_base = OTHER; note = 2'-O-methylguanosine-3'-phosphate
  modified_base 17: mod_base = OTHER; note = 2'-O-methylguanosine-3'-phosphate
  modified_base 18: mod_base = OTHER; note = 2'-O-methyladenosine-3'-phosphate
  modified_base 19: mod_base = OTHER; note = 2'-O-methyladenosine-3'-phosphate
  modified_base 20: mod_base = OTHER; note = 2'-O-methyluridine-3'-phosphate
  modified_base 21: mod_base = OTHER; note = 2'-O-methyluridine-3'-phosphorothioate
  modified_base 22: mod_base = OTHER; note = 2'-O-methylcytidine-3'-phosphorothioate
  modified_base 23: mod_base = OTHER; note = 2'-O-methyluridine-3'-phosphate
  misc_feature 1: note = RNA
  misc_feature 2: note = DNA
  misc_feature 3..4: note = RNA
  misc_feature 5: note = DNA
  misc_feature 6: note = RNA
  misc_feature 7: note = DNA
  misc_feature 8..11: note = RNA
  misc_feature 12: note = DNA
  misc_feature 13..23: note = RNA
acaagctggtcggttggaattct

SEQ ID NO: 2557 - DNA, 23 bp, synthetic construct
  source 1..23: mol_type = other DNA
  modified_base 1: mod_base = OTHER; note = 2'-O-methyladenosine-3'-phosphorothioate
  modified_base 2: mod_base = OTHER; note = 2'-deoxyadenosine-3'-phosphorothioate
  modified_base 3: mod_base = OTHER; note = 2'-O-methylcytidine-3'-phosphate
  modified_base 4: mod_base = OTHER; note = 2'-O-methyladenosine-3'-phosphate
  modified_base 6: mod_base = OTHER; note = 2'-O-methylguanosine-3'-phosphate
  modified_base 8: mod_base = OTHER; note = 2'-O-methyluridine-3'-phosphate
  modified_base 9: mod_base = OTHER; note = 2'-O-methylguanosine-3'-phosphate
  modified_base 10: mod_base = OTHER; note = 2'-O-methylguanosine-3'-phosphate
  modified_base 11: mod_base = OTHER; note = 2'-O-methyluridine-3'-phosphate
  modified_base 13: mod_base = OTHER; note = 2'-O-methylguanosine-3'-phosphate
  modified_base 14: mod_base = OTHER; note = 2'-fluoroguanosine-3'-phosphate
  modified_base 15: mod_base = OTHER; note = 2'-O-methyluridine-3'-phosphate
  modified_base 16: mod_base = OTHER; note = 2'-O-methyluridine-3'-phosphate
  modified_base 17: mod_base = OTHER; note = 2'-O-methylguanosine-3'-phosphate
  modified_base 18: mod_base = OTHER; note = 2'-O-methylguanosine-3'-phosphate
  modified_base 19: mod_base = OTHER; note = 2'-O-methyladenosine-3'-phosphate
  modified_base 20: mod_base = OTHER; note = 2'-O-methyladenosine-3'-phosphate
  modified_base 21: mod_base = OTHER; note = 2'-O-methyluridine-3'-phosphorothioate
  modified_base 22: mod_base = OTHER; note = 2'-O-methyluridine-3'-phosphorothioate
  modified_base 23: mod_base = OTHER; note = 2'-O-methylcytidine-3'-phosphate
  misc_feature 1: note = RNA
  misc_feature 2: note = DNA
  misc_feature 3..4: note = RNA
  misc_feature 5: note = DNA
  misc_feature 6: note = RNA
  misc_feature 7: note = DNA
  misc_feature 8..11: note = RNA
  misc_feature 12: note = DNA
  misc_feature 13..23: note = RNA
aacaagctggtcggttggaattc

SEQ ID NO: 2558 - DNA, 23 bp, synthetic construct
  source 1..23: mol_type = other DNA
  modified_base 1: mod_base = OTHER; note = 2'-O-methyladenosine-3'-phosphorothioate
  modified_base 2: mod_base = OTHER; note = 2'-deoxyadenosine-3'-phosphorothioate
  modified_base 3: mod_base = OTHER; note = 2'-O-methyladenosine-3'-phosphate
  modified_base 4: mod_base = OTHER; note = 2'-O-methylcytidine-3'-phosphate
  modified_base 6: mod_base = OTHER; note = 2'-O-methyladenosine-3'-phosphate
  modified_base 8: mod_base = OTHER; note = 2'-O-methylcytidine-3'-phosphate
  modified_base 9: mod_base = OTHER; note = 2'-O-methyluridine-3'-phosphate
  modified_base 10: mod_base = OTHER; note = 2'-O-methylguanosine-3'-phosphate
  modified_base 11: mod_base = OTHER; note = 2'-O-methylguanosine-3'-phosphate
  modified_base 13: mod_base = OTHER; note = 2'-O-methylcytidine-3'-phosphate
  modified_base 14: mod_base = OTHER; note = 2'-fluoroguanosine-3'-phosphate
  modified_base 15: mod_base = OTHER; note = 2'-O-methylguanosine-3'-phosphate
  modified_base 16: mod_base = OTHER; note = 2'-O-methyluridine-3'-phosphate
  modified_base 17: mod_base = OTHER; note = 2'-O-methyluridine-3'-phosphate
  modified_base 18: mod_base = OTHER; note = 2'-O-methylguanosine-3'-phosphate
  modified_base 19: mod_base = OTHER; note = 2'-O-methylguanosine-3'-phosphate
  modified_base 20: mod_base = OTHER; note = 2'-O-methyladenosine-3'-phosphate
  modified_base 21: mod_base = OTHER; note = 2'-O-methyladenosine-3'-phosphorothioate
  modified_base 22: mod_base = OTHER; note = 2'-O-methyluridine-3'-phosphorothioate
  modified_base 23: mod_base = OTHER; note = 2'-O-methyluridine-3'-phosphate
  misc_feature 1: note = RNA
  misc_feature 2: note = DNA
  misc_feature 3..4: note = RNA
  misc_feature 5: note = DNA
  misc_feature 6: note = RNA
  misc_feature 7: note = DNA
  misc_feature 8..11: note = RNA
  misc_feature 12: note = DNA
  misc_feature 13..23: note = RNA
aaacaagctggtcggttggaatt

SEQ ID NO: 2559 - DNA, 23 bp, synthetic construct
  source 1..23: mol_type = other DNA
  modified_base 1: mod_base = OTHER; note = 2'-O-methyladenosine-3'-phosphorothioate
  modified_base 2: mod_base = OTHER; note = 2'-deoxyadenosine-3'-phosphorothioate
  modified_base 3: mod_base = OTHER; note = 2'-O-methyladenosine-3'-phosphate
  modified_base 4: mod_base = OTHER; note = 2'-O-methyladenosine-3'-phosphate
  modified_base 6: mod_base = OTHER; note = 2'-O-methyladenosine-3'-phosphate
  modified_base 8: mod_base = OTHER; note = 2'-O-methylguanosine-3'-phosphate
  modified_base 9: mod_base = OTHER; note = 2'-O-methylcytidine-3'-phosphate
  modified_base 10: mod_base = OTHER; note = 2'-O-methyluridine-3'-phosphate
  modified_base 11: mod_base = OTHER; note = 2'-O-methylguanosine-3'-phosphate
  modified_base 13: mod_base = OTHER; note = 2'-O-methyluridine-3'-phosphate
  modified_base 14: mod_base = OTHER; note = 2'-fluorocytidine-3'-phosphate
  modified_base 15: mod_base = OTHER; note = 2'-O-methylguanosine-3'-phosphate
  modified_base 16: mod_base = OTHER; note = 2'-O-methylguanosine-3'-phosphate
  modified_base 17: mod_base = OTHER; note = 2'-O-methyluridine-3'-phosphate
  modified_base 18: mod_base = OTHER; note = 2'-O-methyluridine-3'-phosphate
  modified_base 19: mod_base = OTHER; note = 2'-O-methylguanosine-3'-phosphate
  modified_base 20: mod_base = OTHER; note = 2'-O-methylguanosine-3'-phosphate
  modified_base 21: mod_base = OTHER; note = 2'-O-methyladenosine-3'-phosphorothioate
  modified_base 22: mod_base = OTHER; note = 2'-O-methyladenosine-3'-phosphorothioate
  modified_base 23: mod_base = OTHER; note = 2'-O-methyluridine-3'-phosphate
  misc_feature 1: note = RNA
  misc_feature 2: note = DNA
  misc_feature 3..4: note = RNA
  misc_feature 5: note = DNA
  misc_feature 6: note = RNA
  misc_feature 7: note = DNA
  misc_feature 8..11: note = RNA
  misc_feature 12: note = DNA
  misc_feature 13..23: note = RNA
aaaacaagctggtcggttggaat

SEQ ID NO: 2560 - DNA, 23 bp, synthetic construct
  source 1..23: mol_type = other DNA
  modified_base 1: mod_base = OTHER; note = 2'-O-methyladenosine-3'-phosphorothioate
  modified_base 2: mod_base = OTHER; note = 2'-deoxycytidine-3'-phosphorothioate
  modified_base 3: mod_base = OTHER; note = 2'-O-methyladenosine-3'-phosphate
  modified_base 4: mod_base = OTHER; note = 2'-O-methyladenosine-3'-phosphate
  modified_base 6: mod_base = OTHER; note = 2'-O-methylcytidine-3'-phosphate
  modified_base 8: mod_base = OTHER; note = 2'-O-methyladenosine-3'-phosphate
  modified_base 9: mod_base = OTHER; note = 2'-O-methylguanosine-3'-phosphate
  modified_base 10: mod_base = OTHER; note = 2'-O-methylcytidine-3'-phosphate
  modified_base 11: mod_base = OTHER; note = 2'-O-methyluridine-3'-phosphate
  modified_base 13: mod_base = OTHER; note = 2'-O-methylguanosine-3'-phosphate
  modified_base 14: mod_base = OTHER; note = 2'-fluorouridine-3'-phosphate
  modified_base 15: mod_base = OTHER; note = 2'-O-methylcytidine-3'-phosphate
  modified_base 16: mod_base = OTHER; note = 2'-O-methylguanosine-3'-phosphate
  modified_base 17: mod_base = OTHER; note = 2'-O-methylguanosine-3'-phosphate
  modified_base 18: mod_base = OTHER; note = 2'-O-methyluridine-3'-phosphate
  modified_base 19: mod_base = OTHER; note = 2'-O-methyluridine-3'-phosphate
  modified_base 20: mod_base = OTHER; note = 2'-O-methylguanosine-3'-phosphate
  modified_base 21: mod_base = OTHER; note = 2'-O-methylguanosine-3'-phosphorothioate
  modified_base 22: mod_base = OTHER; note = 2'-O-methyladenosine-3'-phosphorothioate
  modified_base 23: mod_base = OTHER; note = 2'-O-methyladenosine-3'-phosphate
  misc_feature 1: note = RNA
  misc_feature 2: note = DNA
  misc_feature 3..4: note = RNA
  misc_feature 5: note = DNA
  misc_feature 6: note = RNA
  misc_feature 7: note = DNA
  misc_feature 8..11: note = RNA
  misc_feature 12: note = DNA
  misc_feature 13..23: note = RNA
acaaacaagctggtcggttggaa

SEQ ID NO: 2561 - DNA, 23 bp, synthetic construct
  source 1..23: mol_type = other DNA
  modified_base 1: mod_base = OTHER; note = 2'-O-methyladenosine-3'-phosphorothioate
  modified_base 2: mod_base = OTHER; note = 2'-deoxyadenosine-3'-phosphorothioate
  modified_base 3: mod_base = OTHER; note = 2'-O-methylcytidine-3'-phosphate
  modified_base 4: mod_base = OTHER; note = 2'-O-methyladenosine-3'-phosphate
  modified_base 6: mod_base = OTHER; note = 2'-O-methyladenosine-3'-phosphate
  modified_base 8: mod_base = OTHER; note = 2'-O-methyladenosine-3'-phosphate
  modified_base 9: mod_base = OTHER; note = 2'-O-methyladenosine-3'-phosphate
  modified_base 10: mod_base = OTHER; note = 2'-O-methylguanosine-3'-phosphate
  modified_base 11: mod_base = OTHER; note = 2'-O-methylcytidine-3'-phosphate
  modified_base 13: mod_base = OTHER; note = 2'-O-methylguanosine-3'-phosphate
  modified_base 14: mod_base = OTHER; note = 2'-fluoroguanosine-3'-phosphate
  modified_base 15: mod_base = OTHER; note = 2'-O-methyluridine-3'-phosphate
  modified_base 16: mod_base = OTHER; note = 2'-O-methylcytidine-3'-phosphate
  modified_base 17: mod_base = OTHER; note = 2'-O-methylguanosine-3'-phosphate
  modified_base 18: mod_base = OTHER; note = 2'-O-methylguanosine-3'-phosphate
  modified_base 19: mod_base = OTHER; note = 2'-O-methyluridine-3'-phosphate
  modified_base 20: mod_base = OTHER; note = 2'-O-methyluridine-3'-phosphate
  modified_base 21: mod_base = OTHER; note = 2'-O-methylguanosine-3'-phosphorothioate
  modified_base 22: mod_base = OTHER; note = 2'-O-methylguanosine-3'-phosphorothioate
  modified_base 23: mod_base = OTHER; note = 2'-O-methyladenosine-3'-phosphate
  misc_feature 1: note = RNA
  misc_feature 2: note = DNA
  misc_feature 3..4: note = RNA
  misc_feature 5: note = DNA
  misc_feature 6: note = RNA
  misc_feature 7: note = DNA
  misc_feature 8..11: note = RNA
  misc_feature 12: note = DNA
  misc_feature 13..23: note = RNA
aacaaacaagctggtcggttgga

SEQ ID NO: 2562 - DNA, 23 bp, synthetic construct
  source 1..23: mol_type = other DNA
  modified_base 1: mod_base = OTHER; note = 2'-O-methyladenosine-3'-phosphorothioate
  modified_base 2: mod_base = OTHER; note = 2'-deoxycytidine-3'-phosphorothioate
  modified_base 3: mod_base = OTHER; note = 2'-O-methyladenosine-3'-phosphate
  modified_base 4: mod_base = OTHER; note = 2'-O-methylcytidine-3'-phosphate
  modified_base 6: mod_base = OTHER; note = 2'-O-methyladenosine-3'-phosphate
  modified_base 8: mod_base = OTHER; note = 2'-O-methylcytidine-3'-phosphate
  modified_base 9: mod_base = OTHER; note = 2'-O-methyladenosine-3'-phosphate
  modified_base 10: mod_base = OTHER; note = 2'-O-methyladenosine-3'-phosphate
  modified_base 11: mod_base = OTHER; note = 2'-O-methylguanosine-3'-phosphate
  modified_base 13: mod_base = OTHER; note = 2'-O-methyluridine-3'-phosphate
  modified_base 14: mod_base = OTHER; note = 2'-fluoroguanosine-3'-phosphate
  modified_base 15: mod_base = OTHER; note = 2'-O-methylguanosine-3'-phosphate
  modified_base 16: mod_base = OTHER; note = 2'-O-methyluridine-3'-phosphate
  modified_base 17: mod_base = OTHER; note = 2'-O-methylcytidine-3'-phosphate
  modified_base 18: mod_base = OTHER; note = 2'-O-methylguanosine-3'-phosphate
  modified_base 19: mod_base = OTHER; note = 2'-O-methylguanosine-3'-phosphate
  modified_base 20: mod_base = OTHER; note = 2'-O-methyluridine-3'-phosphate
  modified_base 21: mod_base = OTHER; note = 2'-O-methyluridine-3'-phosphorothioate
  modified_base 22: mod_base = OTHER; note = 2'-O-methylguanosine-3'-phosphorothioate
  modified_base 23: mod_base = OTHER; note = 2'-O-methylguanosine-3'-phosphate
  misc_feature 1: note = RNA
  misc_feature 2: note = DNA
  misc_feature 3..4: note = RNA
  misc_feature 5: note = DNA
  misc_feature 6: note = RNA
  misc_feature 7: note = DNA
  misc_feature 8..11: note = RNA
  misc_feature 12: note = DNA
  misc_feature 13..23: note = RNA
acacaaacaagctggtcggttgg

SEQ ID NO: 2563 - DNA, 23 bp, synthetic construct
  source 1..23: mol_type = other DNA
  modified_base 1: mod_base = OTHER; note = 2'-O-methyladenosine-3'-phosphorothioate
  modified_base 2: mod_base = OTHER; note = 2'-deoxythimidine-3'-phosphorothioate
  modified_base 3: mod_base = OTHER; note = 2'-O-methylcytidine-3'-phosphate
  modified_base 4: mod_base = OTHER; note = 2'-O-methyladenosine-3'-phosphate
  modified_base 6: mod_base = OTHER; note = 2'-O-methyladenosine-3'-phosphate
  modified_base 8: mod_base = OTHER; note = 2'-O-methyladenosine-3'-phosphate
  modified_base 9: mod_base = OTHER; note = 2'-O-methylcytidine-3'-phosphate
  modified_base 10: mod_base = OTHER; note = 2'-O-methyladenosine-3'-phosphate
  modified_base 11: mod_base = OTHER; note = 2'-O-methyladenosine-3'-phosphate
  modified_base 13: mod_base = OTHER; note = 2'-O-methylcytidine-3'-phosphate
  modified_base 14: mod_base = OTHER; note = 2'-fluorouridine-3'-phosphate
  modified_base 15: mod_base = OTHER; note = 2'-O-methylguanosine-3'-phosphate
  modified_base 16: mod_base = OTHER; note = 2'-O-methylguanosine-3'-phosphate
  modified_base 17: mod_base = OTHER; note = 2'-O-methyluridine-3'-phosphate
  modified_base 18: mod_base = OTHER; note = 2'-O-methylcytidine-3'-phosphate
  modified_base 19: mod_base = OTHER; note = 2'-O-methylguanosine-3'-phosphate
  modified_base 20: mod_base = OTHER; note = 2'-O-methylguanosine-3'-phosphate
  modified_base 21: mod_base = OTHER; note = 2'-O-methyluridine-3'-phosphorothioate
  modified_base 22: mod_base = OTHER; note = 2'-O-methyluridine-3'-phosphorothioate
  modified_base 23: mod_base = OTHER; note = 2'-O-methylguanosine-3'-phosphate
  misc_feature 1: note = RNA
  misc_feature 2: note = DNA
  misc_feature 3..4: note = RNA
  misc_feature 5: note = DNA
  misc_feature 6: note = RNA
  misc_feature 7: note = DNA
  misc_feature 8..11: note = RNA
  misc_feature 12: note = DNA
  misc_feature 13..23: note = RNA
atcacaaacaagctggtcggttg

SEQ ID NO: 2564 - DNA, 23 bp, synthetic construct
  source 1..23: mol_type = other DNA
  modified_base 1: mod_base = OTHER; note = 2'-O-methyladenosine-3'-phosphorothioate
  modified_base 2: mod_base = OTHER; note = 2'-deoxythimidine-3'-phosphorothioate
  modified_base 3: mod_base = OTHER; note = 2'-O-methyluridine-3'-phosphate
  modified_base 4: mod_base = OTHER; note = 2'-O-methylcytidine-3'-phosphate
  modified_base 6: mod_base = OTHER; note = 2'-O-methylcytidine-3'-phosphate
  modified_base 8: mod_base = OTHER; note = 2'-O-methyladenosine-3'-phosphate
  modified_base 9: mod_base = OTHER; note = 2'-O-methyladenosine-3'-phosphate
  modified_base 10: mod_base = OTHER; note = 2'-O-methylcytidine-3'-phosphate
  modified_base 11: mod_base = OTHER; note = 2'-O-methyladenosine-3'-phosphate
  modified_base 13: mod_base = OTHER; note = 2'-O-methylguanosine-3'-phosphate
  modified_base 14: mod_base = OTHER; note = 2'-fluorocytidine-3'-phosphate
  modified_base 15: mod_base = OTHER; note = 2'-O-methyluridine-3'-phosphate
  modified_base 16: mod_base = OTHER; note = 2'-O-methylguanosine-3'-phosphate
  modified_base 17: mod_base = OTHER; note = 2'-O-methylguanosine-3'-phosphate
  modified_base 18: mod_base = OTHER; note = 2'-O-methyluridine-3'-phosphate
  modified_base 19: mod_base = OTHER; note = 2'-O-methylcytidine-3'-phosphate
  modified_base 20: mod_base = OTHER; note = 2'-O-methylguanosine-3'-phosphate
  modified_base 21: mod_base = OTHER; note = 2'-O-methylguanosine-3'-phosphorothioate
  modified_base 22: mod_base = OTHER; note = 2'-O-methyluridine-3'-phosphorothioate
  modified_base 23: mod_base = OTHER; note = 2'-O-methyluridine-3'-phosphate
  misc_feature 1: note = RNA
  misc_feature 2: note = DNA
  misc_feature 3..4: note = RNA
  misc_feature 5: note = DNA
  misc_feature 6: note = RNA
  misc_feature 7: note = DNA
  misc_feature 8..11: note = RNA
  misc_feature 12: note = DNA
  misc_feature 13..23: note = RNA
attcacaaacaagctggtcggtt

SEQ ID NO: 2565 - DNA, 23 bp, synthetic construct
  source 1..23: mol_type = other DNA
  modified_base 1: mod_base = OTHER; note = 2'-O-methyladenosine-3'-phosphorothioate
  modified_base 2: mod_base = OTHER; note = 2'-deoxythimidine-3'-phosphorothioate
  modified_base 3: mod_base = OTHER; note = 2'-O-methyluridine-3'-phosphate
  modified_base 4: mod_base = OTHER; note = 2'-O-methyluridine-3'-phosphate
  modified_base 6: mod_base = OTHER; note = 2'-O-methyladenosine-3'-phosphate
  modified_base 8: mod_base = OTHER; note = 2'-O-methyladenosine-3'-phosphate
  modified_base 9: mod_base = OTHER; note = 2'-O-methyladenosine-3'-phosphate
  modified_base 10: mod_base = OTHER; note = 2'-O-methyladenosine-3'-phosphate
  modified_base 11: mod_base = OTHER; note = 2'-O-methylcytidine-3'-phosphate
  modified_base 13: mod_base = OTHER; note = 2'-O-methyladenosine-3'-phosphate
  modified_base 14: mod_base = OTHER; note = 2'-fluoroguanosine-3'-phosphate
  modified_base 15: mod_base = OTHER; note = 2'-O-methylcytidine-3'-phosphate
  modified_base 16: mod_base = OTHER; note = 2'-O-methyluridine-3'-phosphate
  modified_base 17: mod_base = OTHER; note = 2'-O-methylguanosine-3'-phosphate
  modified_base 18: mod_base = OTHER; note = 2'-O-methylguanosine-3'-phosphate
  modified_base 19: mod_base = OTHER; note = 2'-O-methyluridine-3'-phosphate
  modified_base 20: mod_base = OTHER; note = 2'-O-methylcytidine-3'-phosphate
  modified_base 21: mod_base = OTHER; note = 2'-O-methylguanosine-3'-phosphorothioate
  modified_base 22: mod_base = OTHER; note = 2'-O-methylguanosine-3'-phosphorothioate
  modified_base 23: mod_base = OTHER; note = 2'-O-methyluridine-3'-phosphate
  misc_feature 1: note = RNA
  misc_feature 2: note = DNA
  misc_feature 3..4: note = RNA
  misc_feature 5: note = DNA
  misc_feature 6: note = RNA
  misc_feature 7: note = DNA
  misc_feature 8..11: note = RNA
  misc_feature 12: note = DNA
  misc_feature 13..23: note = RNA
atttcacaaacaagctggtcggt

SEQ ID NO: 2566 - DNA, 23 bp, synthetic construct
  source 1..23: mol_type = other DNA
  modified_base 1: mod_base = OTHER; note = 2'-O-methyladenosine-3'-phosphorothioate
  modified_base 2: mod_base = OTHER; note = 2'-deoxyguanosine-3'-phosphorothioate
  modified_base 3: mod_base = OTHER; note = 2'-O-methyluridine-3'-phosphate
  modified_base 4: mod_base = OTHER; note = 2'-O-methyluridine-3'-phosphate
  modified_base 6: mod_base = OTHER; note = 2'-O-methylcytidine-3'-phosphate
  modified_base 8: mod_base = OTHER; note = 2'-O-methylcytidine-3'-phosphate
  modified_base 9: mod_base = OTHER; note = 2'-O-methyladenosine-3'-phosphate
  modified_base 10: mod_base = OTHER; note = 2'-O-methyladenosine-3'-phosphate
  modified_base 11: mod_base = OTHER; note = 2'-O-methyladenosine-3'-phosphate
  modified_base 13: mod_base = OTHER; note = 2'-O-methyladenosine-3'-phosphate
  modified_base 14: mod_base = OTHER; note = 2'-fluoroadenosine-3'-phosphate
  modified_base 15: mod_base = OTHER; note = 2'-O-methylguanosine-3'-phosphate
  modified_base 16: mod_base = OTHER; note = 2'-O-methylcytidine-3'-phosphate
  modified_base 17: mod_base = OTHER; note = 2'-O-methyluridine-3'-phosphate
  modified_base 18: mod_base = OTHER; note = 2'-O-methylguanosine-3'-phosphate
  modified_base 19: mod_base = OTHER; note = 2'-O-methylguanosine-3'-phosphate
  modified_base 20: mod_base = OTHER; note = 2'-O-methyluridine-3'-phosphate
  modified_base 21: mod_base = OTHER; note = 2'-O-methylcytidine-3'-phosphorothioate
  modified_base 22: mod_base = OTHER; note = 2'-O-methylguanosine-3'-phosphorothioate
  modified_base 23: mod_base = OTHER; note = 2'-O-methylguanosine-3'-phosphate
  misc_feature 1: note = RNA
  misc_feature 2: note = DNA
  misc_feature 3..4: note = RNA
  misc_feature 5: note = DNA
  misc_feature 6: note = RNA
  misc_feature 7: note = DNA
  misc_feature 8..11: note = RNA
  misc_feature 12: note = DNA
  misc_feature 13..23: note = RNA
agtttcacaaacaagctggtcgg

SEQ ID NO: 2567 - DNA, 23 bp, synthetic construct
  source 1..23: mol_type = other DNA
  modified_base 1: mod_base = OTHER; note = 2'-O-methyladenosine-3'-phosphorothioate
  modified_base 2: mod_base = OTHER; note = 2'-deoxythimidine-3'-phosphorothioate
  modified_base 3: mod_base = OTHER; note = 2'-O-methylguanosine-3'-phosphate
  modified_base 4: mod_base = OTHER; note = 2'-O-methyluridine-3'-phosphate
  modified_base 6: mod_base = OTHER; note = 2'-O-methyluridine-3'-phosphate
  modified_base 8: mod_base = OTHER; note = 2'-O-methyladenosine-3'-phosphate
  modified_base 9: mod_base = OTHER; note = 2'-O-methylcytidine-3'-phosphate
  modified_base 10: mod_base = OTHER; note = 2'-O-methyladenosine-3'-phosphate
  modified_base 11: mod_base = OTHER; note = 2'-O-methyladenosine-3'-phosphate
  modified_base 13: mod_base = OTHER; note = 2'-O-methylcytidine-3'-phosphate
  modified_base 14: mod_base = OTHER; note = 2'-fluoroadenosine-3'-phosphate
  modified_base 15: mod_base = OTHER; note = 2'-O-methyladenosine-3'-phosphate
  modified_base 16: mod_base = OTHER; note = 2'-O-methylguanosine-3'-phosphate
  modified_base 17: mod_base = OTHER; note = 2'-O-methylcytidine-3'-phosphate
  modified_base 18: mod_base = OTHER; note = 2'-O-methyluridine-3'-phosphate
  modified_base 19: mod_base = OTHER; note = 2'-O-methylguanosine-3'-phosphate
  modified_base 20: mod_base = OTHER; note = 2'-O-methylguanosine-3'-phosphate
  modified_base 21: mod_base = OTHER; note = 2'-O-methyluridine-3'-phosphorothioate
  modified_base 22: mod_base = OTHER; note = 2'-O-methylcytidine-3'-phosphorothioate
  modified_base 23: mod_base = OTHER; note = 2'-O-methylguanosine-3'-phosphate
  misc_feature 1: note = RNA
  misc_feature 2: note = DNA
  misc_feature 3..4: note = RNA
  misc_feature 5: note = DNA
  misc_feature 6: note = RNA
  misc_feature 7: note = DNA
  misc_feature 8..11: note = RNA
  misc_feature 12: note = DNA
  misc_feature 13..23: note = RNA
atgtttcacaaacaagctggtcg

SEQ ID NO: 2568 - DNA, 23 bp, synthetic construct
  source 1..23: mol_type = other DNA
  modified_base 1: mod_base = OTHER; note = 2'-O-methyladenosine-3'-phosphorothioate
  modified_base 2: mod_base = OTHER; note = 2'-deoxythimidine-3'-phosphorothioate
  modified_base 3: mod_base = OTHER; note = 2'-O-methyluridine-3'-phosphate
  modified_base 4: mod_base = OTHER; note = 2'-O-methylguanosine-3'-phosphate
  modified_base 6: mod_base = OTHER; note = 2'-O-methyluridine-3'-phosphate
  modified_base 8: mod_base = OTHER; note = 2'-O-methylcytidine-3'-phosphate
  modified_base 9: mod_base = OTHER; note = 2'-O-methyladenosine-3'-phosphate
  modified_base 10: mod_base = OTHER; note = 2'-O-methylcytidine-3'-phosphate
  modified_base 11: mod_base = OTHER; note = 2'-O-methyladenosine-3'-phosphate
  modified_base 13: mod_base = OTHER; note = 2'-O-methyladenosine-3'-phosphate
  modified_base 14: mod_base = OTHER; note = 2'-fluorocytidine-3'-phosphate
  modified_base 15: mod_base = OTHER; note = 2'-O-methyladenosine-3'-phosphate
  modified_base 16: mod_base = OTHER; note = 2'-O-methyladenosine-3'-phosphate
  modified_base 17: mod_base = OTHER; note = 2'-O-methylguanosine-3'-phosphate
  modified_base 18: mod_base = OTHER; note = 2'-O-methylcytidine-3'-phosphate
  modified_base 19: mod_base = OTHER; note = 2'-O-methyluridine-3'-phosphate
  modified_base 20: mod_base = OTHER; note = 2'-O-methylguanosine-3'-phosphate
  modified_base 21: mod_base = OTHER; note = 2'-O-methylguanosine-3'-phosphorothioate
  modified_base 22: mod_base = OTHER; note = 2'-O-methyluridine-3'-phosphorothioate
  modified_base 23: mod_base = OTHER; note = 2'-O-methylcytidine-3'-phosphate
  misc_feature 1: note = RNA
  misc_feature 2: note = DNA
  misc_feature 3..4: note = RNA
  misc_feature 5: note = DNA
  misc_feature 6: note = RNA
  misc_feature 7: note = DNA
  misc_feature 8..11: note = RNA
  misc_feature 12: note = DNA
  misc_feature 13..23: note = RNA
attgtttcacaaacaagctggtc

SEQ ID NO: 2569 - DNA, 23 bp, synthetic construct
  source 1..23: mol_type = other DNA
  modified_base 1: mod_base = OTHER; note = 2'-O-methyladenosine-3'-phosphorothioate
  modified_base 2: mod_base = OTHER; note = 2'-deoxythimidine-3'-phosphorothioate
  modified_base 3: mod_base = OTHER; note = 2'-O-methyluridine-3'-phosphate
  modified_base 4: mod_base = OTHER; note = 2'-O-methyluridine-3'-phosphate
  modified_base 6: mod_base = OTHER; note = 2'-O-methyluridine-3'-phosphate
  modified_base 8: mod_base = OTHER; note = 2'-O-methyluridine-3'-phosphate
  modified_base 9: mod_base = OTHER; note = 2'-O-methylcytidine-3'-phosphate
  modified_base 10: mod_base = OTHER; note = 2'-O-methyladenosine-3'-phosphate
  modified_base 11: mod_base = OTHER; note = 2'-O-methylcytidine-3'-phosphate
  modified_base 13: mod_base = OTHER; note = 2'-O-methyladenosine-3'-phosphate
  modified_base 14: mod_base = OTHER; note = 2'-fluoroadenosine-3'-phosphate
  modified_base 15: mod_base = OTHER; note = 2'-O-methylcytidine-3'-phosphate
  modified_base 16: mod_base = OTHER; note = 2'-O-methyladenosine-3'-phosphate
  modified_base 17: mod_base = OTHER; note = 2'-O-methyladenosine-3'-phosphate
  modified_base 18: mod_base = OTHER; note = 2'-O-methylguanosine-3'-phosphate
  modified_base 19: mod_base = OTHER; note = 2'-O-methylcytidine-3'-phosphate
  modified_base 20: mod_base = OTHER; note = 2'-O-methyluridine-3'-phosphate
  modified_base 21: mod_base = OTHER; note = 2'-O-methylguanosine-3'-phosphorothioate
  modified_base 22: mod_base = OTHER; note = 2'-O-methylguanosine-3'-phosphorothioate
  modified_base 23: mod_base = OTHER; note = 2'-O-methyluridine-3'-phosphate
  misc_feature 1: note = RNA
  misc_feature 2: note = DNA
  misc_feature 3..4: note = RNA
  misc_feature 5: note = DNA
  misc_feature 6: note = RNA
  misc_feature 7: note = DNA
  misc_feature 8..11: note = RNA
  misc_feature 12: note = DNA
  misc_feature 13..23: note = RNA
atttgtttcacaaacaagctggt

SEQ ID NO: 2570 - DNA, 23 bp, synthetic construct
  source 1..23: mol_type = other DNA
  modified_base 1: mod_base = OTHER; note = 2'-O-methyladenosine-3'-phosphorothioate
  modified_base 2: mod_base = OTHER; note = 2'-deoxythimidine-3'-phosphorothioate
  modified_base 3: mod_base = OTHER; note = 2'-O-methyluridine-3'-phosphate
  modified_base 4: mod_base = OTHER; note = 2'-O-methyluridine-3'-phosphate
  modified_base 6: mod_base = OTHER; note = 2'-O-methylguanosine-3'-phosphate
  modified_base 8: mod_base = OTHER; note = 2'-O-methyluridine-3'-phosphate
  modified_base 9: mod_base = OTHER; note = 2'-O-methyluridine-3'-phosphate
  modified_base 10: mod_base = OTHER; note = 2'-O-methylcytidine-3'-phosphate
  modified_base 11: mod_base = OTHER; note = 2'-O-methyladenosine-3'-phosphate
  modified_base 13: mod_base = OTHER; note = 2'-O-methyladenosine-3'-phosphate
  modified_base 14: mod_base = OTHER; note = 2'-fluoroadenosine-3'-phosphate
  modified_base 15: mod_base = OTHER; note = 2'-O-methyladenosine-3'-phosphate
  modified_base 16: mod_base = OTHER; note = 2'-O-methylcytidine-3'-phosphate
  modified_base 17: mod_base = OTHER; note = 2'-O-methyladenosine-3'-phosphate
  modified_base 18: mod_base = OTHER; note = 2'-O-methyladenosine-3'-phosphate
  modified_base 19: mod_base = OTHER; note = 2'-O-methylguanosine-3'-phosphate
  modified_base 20: mod_base = OTHER; note = 2'-O-methylcytidine-3'-phosphate
  modified_base 21: mod_base = OTHER; note = 2'-O-methyluridine-3'-phosphorothioate
  modified_base 22: mod_base = OTHER; note = 2'-O-methylguanosine-3'-phosphorothioate
  modified_base 23: mod_base = OTHER; note = 2'-O-methylguanosine-3'-phosphate
  misc_feature 1: note = RNA
  misc_feature 2: note = DNA
  misc_feature 3..4: note = RNA
  misc_feature 5: note = DNA
  misc_feature 6: note = RNA
  misc_feature 7: note = DNA
  misc_feature 8..11: note = RNA
  misc_feature 12: note = DNA
  misc_feature 13..23: note = RNA
attttgtttcacaaacaagctgg

SEQ ID NO: 2571 - DNA, 23 bp, synthetic construct
  source 1..23: mol_type = other DNA
  modified_base 1: mod_base = OTHER; note = 2'-O-methyladenosine-3'-phosphorothioate
  modified_base 2: mod_base = OTHER; note = 2'-deoxythimidine-3'-phosphorothioate
  modified_base 3: mod_base = OTHER; note = 2'-O-methyluridine-3'-phosphate
  modified_base 4: mod_base = OTHER; note = 2'-O-methyluridine-3'-phosphate
  modified_base 6: mod_base = OTHER; note = 2'-O-methyluridine-3'-phosphate
  modified_base 8: mod_base = OTHER; note = 2'-O-methylguanosine-3'-phosphate
  modified_base 9: mod_base = OTHER; note = 2'-O-methyluridine-3'-phosphate
  modified_base 10: mod_base = OTHER; note = 2'-O-methyluridine-3'-phosphate
  modified_base 11: mod_base = OTHER; note = 2'-O-methyluridine-3'-phosphate
  modified_base 13: mod_base = OTHER; note = 2'-O-methyladenosine-3'-phosphate
  modified_base 14: mod_base = OTHER; note = 2'-fluorocytidine-3'-phosphate
  modified_base 15: mod_base = OTHER; note = 2'-O-methyladenosine-3'-phosphate
  modified_base 16: mod_base = OTHER; note = 2'-O-methyladenosine-3'-phosphate
  modified_base 17: mod_base = OTHER; note = 2'-O-methyladenosine-3'-phosphate
  modified_base 18: mod_base = OTHER; note = 2'-O-methylcytidine-3'-phosphate
  modified_base 19: mod_base = OTHER; note = 2'-O-methyladenosine-3'-phosphate
  modified_base 20: mod_base = OTHER; note = 2'-O-methyladenosine-3'-phosphate
  modified_base 21: mod_base = OTHER; note = 2'-O-methylguanosine-3'-phosphorothioate
  modified_base 22: mod_base = OTHER; note = 2'-O-methylcytidine-3'-phosphorothioate
  modified_base 23: mod_base = OTHER; note = 2'-O-methyluridine-3'-phosphate
  misc_feature 1: note = RNA
  misc_feature 2: note = DNA
  misc_feature 3..4: note = RNA
  misc_feature 5: note = DNA
  misc_feature 6: note = RNA
  misc_feature 7: note = DNA
  misc_feature 8..11: note = RNA
  misc_feature 12: note = DNA
  misc_feature 13..23: note = RNA
attttttgtttcacaaacaagct

SEQ ID NO: 2572 - DNA, 23 bp, synthetic construct
  source 1..23: mol_type = other DNA
  modified_base 1: mod_base = OTHER; note = 2'-O-methyladenosine-3'-phosphorothioate
  modified_base 2: mod_base = OTHER; note = 2'-deoxycytidine-3'-phosphorothioate
  modified_base 3: mod_base = OTHER; note = 2'-O-methyluridine-3'-phosphate
  modified_base 4: mod_base = OTHER; note = 2'-O-methyluridine-3'-phosphate
  modified_base 6: mod_base = OTHER; note = 2'-O-methyluridine-3'-phosphate
  modified_base 8: mod_base = OTHER; note = 2'-O-methyluridine-3'-phosphate
  modified_base 9: mod_base = OTHER; note = 2'-O-methylguanosine-3'-phosphate
  modified_base 10: mod_base = OTHER; note = 2'-O-methyluridine-3'-phosphate
  modified_base 11: mod_base = OTHER; note = 2'-O-methyluridine-3'-phosphate
  modified_base 13: mod_base = OTHER; note = 2'-O-methylcytidine-3'-phosphate
  modified_base 14: mod_base = OTHER; note = 2'-fluoroadenosine-3'-phosphate
  modified_base 15: mod_base = OTHER; note = 2'-O-methylcytidine-3'-phosphate
  modified_base 16: mod_base = OTHER; note = 2'-O-methyladenosine-3'-phosphate
  modified_base 17: mod_base = OTHER; note = 2'-O-methyladenosine-3'-phosphate
  modified_base 18: mod_base = OTHER; note = 2'-O-methyladenosine-3'-phosphate
  modified_base 19: mod_base = OTHER; note = 2'-O-methylcytidine-3'-phosphate
  modified_base 20: mod_base = OTHER; note = 2'-O-methyladenosine-3'-phosphate
  modified_base 21: mod_base = OTHER; note = 2'-O-methyladenosine-3'-phosphorothioate
  modified_base 22: mod_base = OTHER; note = 2'-O-methylguanosine-3'-phosphorothioate
  modified_base 23: mod_base = OTHER; note = 2'-O-methylcytidine-3'-phosphate
  misc_feature 1: note = RNA
  misc_feature 2: note = DNA
  misc_feature 3..4: note = RNA
  misc_feature 5: note = DNA
  misc_feature 6: note = RNA
  misc_feature 7: note = DNA
  misc_feature 8..11: note = RNA
  misc_feature 12: note = DNA
  misc_feature 13..23: note = RNA
acttttttgtttcacaaacaagc

SEQ ID NO: 2573 - DNA, 23 bp, synthetic construct
  source 1..23: mol_type = other DNA
  modified_base 1: mod_base = OTHER; note = 2'-O-methyladenosine-3'-phosphorothioate
  modified_base 2: mod_base = OTHER; note = 2'-deoxycytidine-3'-phosphorothioate
  modified_base 3: mod_base = OTHER; note = 2'-O-methyluridine-3'-phosphate
  modified_base 4: mod_base = OTHER; note = 2'-O-methylcytidine-3'-phosphate
  modified_base 6: mod_base = OTHER; note = 2'-O-methyladenosine-3'-phosphate
  modified_base 8: mod_base = OTHER; note = 2'-O-methyluridine-3'-phosphate
  modified_base 9: mod_base = OTHER; note = 2'-O-methyluridine-3'-phosphate
  modified_base 10: mod_base = OTHER; note = 2'-O-methylguanosine-3'-phosphate
  modified_base 11: mod_base = OTHER; note = 2'-O-methyladenosine-3'-phosphate
  modified_base 13: mod_base = OTHER; note = 2'-O-methyladenosine-3'-phosphate
  modified_base 14: mod_base = OTHER; note = 2'-fluoroadenosine-3'-phosphate
  modified_base 15: mod_base = OTHER; note = 2'-O-methylguanosine-3'-phosphate
  modified_base 16: mod_base = OTHER; note = 2'-O-methylguanosine-3'-phosphate
  modified_base 17: mod_base = OTHER; note = 2'-O-methylguanosine-3'-phosphate
  modified_base 18: mod_base = OTHER; note = 2'-O-methyladenosine-3'-phosphate
  modified_base 19: mod_base = OTHER; note = 2'-O-methyladenosine-3'-phosphate
  modified_base 20: mod_base = OTHER; note = 2'-O-methylcytidine-3'-phosphate
  modified_base 21: mod_base = OTHER; note = 2'-O-methyladenosine-3'-phosphorothioate
  modified_base 22: mod_base = OTHER; note = 2'-O-methylcytidine-3'-phosphorothioate
  modified_base 23: mod_base = OTHER; note = 2'-O-methyluridine-3'-phosphate
  misc_feature 1: note = RNA
  misc_feature 2: note = DNA
  misc_feature 3..4: note = RNA
  misc_feature 5: note = DNA
  misc_feature 6: note = RNA
  misc_feature 7: note = DNA
  misc_feature 8..11: note = RNA
  misc_feature 12: note = DNA
  misc_feature 13..23: note = RNA
actcaacttgaaaagggaacact

SEQ ID NO: 2574 - DNA, 23 bp, synthetic construct
  source 1..23: mol_type = other DNA
  modified_base 1: mod_base = OTHER; note = 2'-O-methyladenosine-3'-phosphorothioate
  modified_base 2: mod_base = OTHER; note = 2'-deoxythimidine-3'-phosphorothioate
  modified_base 3: mod_base = OTHER; note = 2'-O-methylcytidine-3'-phosphate
  modified_base 4: mod_base = OTHER; note = 2'-O-methyluridine-3'-phosphate
  modified_base 6: mod_base = OTHER; note = 2'-O-methyladenosine-3'-phosphate
  modified_base 8: mod_base = OTHER; note = 2'-O-methylcytidine-3'-phosphate
  modified_base 9: mod_base = OTHER; note = 2'-O-methyluridine-3'-phosphate
  modified_base 10: mod_base = OTHER; note = 2'-O-methyluridine-3'-phosphate
  modified_base 11: mod_base = OTHER; note = 2'-O-methylguanosine-3'-phosphate
  modified_base 13: mod_base = OTHER; note = 2'-O-methyladenosine-3'-phosphate
  modified_base 14: mod_base = OTHER; note = 2'-fluoroadenosine-3'-phosphate
  modified_base 15: mod_base = OTHER; note = 2'-O-methyladenosine-3'-phosphate
  modified_base 16: mod_base = OTHER; note = 2'-O-methylguanosine-3'-phosphate
  modified_base 17: mod_base = OTHER; note = 2'-O-methylguanosine-3'-phosphate
  modified_base 18: mod_base = OTHER; note = 2'-O-methylguanosine-3'-phosphate
  modified_base 19: mod_base = OTHER; note = 2'-O-methyladenosine-3'-phosphate
  modified_base 20: mod_base = OTHER; note = 2'-O-methyladenosine-3'-phosphate
  modified_base 21: mod_base = OTHER; note = 2'-O-methylcytidine-3'-phosphorothioate
  modified_base 22: mod_base = OTHER; note = 2'-O-methyladenosine-3'-phosphorothioate
  modified_base 23: mod_base = OTHER; note = 2'-O-methylcytidine-3'-phosphate
  misc_feature 1: note = RNA
  misc_feature 2: note = DNA
  misc_feature 3..4: note = RNA
  misc_feature 5: note = DNA
  misc_feature 6: note = RNA
  misc_feature 7: note = DNA
  misc_feature 8..11: note = RNA
  misc_feature 12: note = DNA
  misc_feature 13..23: note = RNA
atctcaacttgaaaagggaacac

SEQ ID NO: 2575 - DNA, 23 bp, synthetic construct
  source 1..23: mol_type = other DNA
  modified_base 1: mod_base = OTHER; note = 2'-O-methyladenosine-3'-phosphorothioate
  modified_base 2: mod_base = OTHER; note = 2'-deoxythimidine-3'-phosphorothioate
  modified_base 3: mod_base = OTHER; note = 2'-O-methyluridine-3'-phosphate
  modified_base 4: mod_base = OTHER; note = 2'-O-methylcytidine-3'-phosphate
  modified_base 6: mod_base = OTHER; note = 2'-O-methylcytidine-3'-phosphate
  modified_base 8: mod_base = OTHER; note = 2'-O-methyladenosine-3'-phosphate
  modified_base 9: mod_base = OTHER; note = 2'-O-methylcytidine-3'-phosphate
  modified_base 10: mod_base = OTHER; note = 2'-O-methyluridine-3'-phosphate
  modified_base 11: mod_base = OTHER; note = 2'-O-methyluridine-3'-phosphate
  modified_base 13: mod_base = OTHER; note = 2'-O-methyladenosine-3'-phosphate
  modified_base 14: mod_base = OTHER; note = 2'-fluoroadenosine-3'-phosphate
  modified_base 15: mod_base = OTHER; note = 2'-O-methyladenosine-3'-phosphate
  modified_base 16: mod_base = OTHER; note = 2'-O-methyladenosine-3'-phosphate
  modified_base 17: mod_base = OTHER; note = 2'-O-methylguanosine-3'-phosphate
  modified_base 18: mod_base = OTHER; note = 2'-O-methylguanosine-3'-phosphate
  modified_base 19: mod_base = OTHER; note = 2'-O-methylguanosine-3'-phosphate
  modified_base 20: mod_base = OTHER; note = 2'-O-methyladenosine-3'-phosphate
  modified_base 21: mod_base = OTHER; note = 2'-O-methyladenosine-3'-phosphorothioate
  modified_base 22: mod_base = OTHER; note = 2'-O-methylcytidine-3'-phosphorothioate
  modified_base 23: mod_base = OTHER; note = 2'-O-methyladenosine-3'-phosphate
  misc_feature 1: note = RNA
  misc_feature 2: note = DNA
  misc_feature 3..4: note = RNA
  misc_feature 5: note = DNA
  misc_feature 6: note = RNA
  misc_feature 7: note = DNA
  misc_feature 8..11: note = RNA
  misc_feature 12: note = DNA
  misc_feature 13..23: note = RNA
attctcaacttgaaaagggaaca

SEQ ID NO: 2576 - DNA, 23 bp, synthetic construct
  source 1..23: mol_type = other DNA
  modified_base 1: mod_base = OTHER; note = 2'-O-methyladenosine-3'-phosphorothioate
  modified_base 2: mod_base = OTHER; note = 2'-deoxycytidine-3'-phosphorothioate
  modified_base 3: mod_base = OTHER; note = 2'-O-methyladenosine-3'-phosphate
  modified_base 4: mod_base = OTHER; note = 2'-O-methyladenosine-3'-phosphate
  modified_base 6: mod_base = OTHER; note = 2'-O-methyluridine-3'-phosphate
  modified_base 8: mod_base = OTHER; note = 2'-O-methyluridine-3'-phosphate
  modified_base 9: mod_base = OTHER; note = 2'-O-methyluridine-3'-phosphate
  modified_base 10: mod_base = OTHER; note = 2'-O-methylguanosine-3'-phosphate
  modified_base 11: mod_base = OTHER; note = 2'-O-methyluridine-3'-phosphate
  modified_base 13: mod_base = OTHER; note = 2'-O-methylcytidine-3'-phosphate
  modified_base 14: mod_base = OTHER; note = 2'-fluorouridine-3'-phosphate
  modified_base 15: mod_base = OTHER; note = 2'-O-methylcytidine-3'-phosphate
  modified_base 16: mod_base = OTHER; note = 2'-O-methyladenosine-3'-phosphate
  modified_base 17: mod_base = OTHER; note = 2'-O-methyladenosine-3'-phosphate
  modified_base 18: mod_base = OTHER; note = 2'-O-methylcytidine-3'-phosphate
  modified_base 19: mod_base = OTHER; note = 2'-O-methyluridine-3'-phosphate
  modified_base 20: mod_base = OTHER; note = 2'-O-methyluridine-3'-phosphate
  modified_base 21: mod_base = OTHER; note = 2'-O-methylguanosine-3'-phosphorothioate
  modified_base 22: mod_base = OTHER; note = 2'-O-methyladenosine-3'-phosphorothioate
  modified_base 23: mod_base = OTHER; note = 2'-O-methyladenosine-3'-phosphate
  misc_feature 1: note = RNA
  misc_feature 2: note = DNA
  misc_feature 3..4: note = RNA
  misc_feature 5: note = DNA
  misc_feature 6: note = RNA
  misc_feature 7: note = DNA
  misc_feature 8..11: note = RNA
  misc_feature 12: note = DNA
  misc_feature 13..23: note = RNA
acaatttttgttctcaacttgaa

SEQ ID NO: 2577 - DNA, 23 bp, synthetic construct
  source 1..23: mol_type = other DNA
  modified_base 1: mod_base = OTHER; note = 2'-O-methyladenosine-3'-phosphorothioate
  modified_base 2: mod_base = OTHER; note = 2'-deoxycytidine-3'-phosphorothioate
  modified_base 3: mod_base = OTHER; note = 2'-O-methylcytidine-3'-phosphate
  modified_base 4: mod_base = OTHER; note = 2'-O-methyladenosine-3'-phosphate
  modified_base 6: mod_base = OTHER; note = 2'-O-methyluridine-3'-phosphate
  modified_base 8: mod_base = OTHER; note = 2'-O-methyluridine-3'-phosphate
  modified_base 9: mod_base = OTHER; note = 2'-O-methyluridine-3'-phosphate
  modified_base 10: mod_base = OTHER; note = 2'-O-methyluridine-3'-phosphate
  modified_base 11: mod_base = OTHER; note = 2'-O-methylguanosine-3'-phosphate
  modified_base 13: mod_base = OTHER; note = 2'-O-methyluridine-3'-phosphate
  modified_base 14: mod_base = OTHER; note = 2'-fluorocytidine-3'-phosphate
  modified_base 15: mod_base = OTHER; note = 2'-O-methyluridine-3'-phosphate
  modified_base 16: mod_base = OTHER; note = 2'-O-methylcytidine-3'-phosphate
  modified_base 17: mod_base = OTHER; note = 2'-O-methyladenosine-3'-phosphate
  modified_base 18: mod_base = OTHER; note = 2'-O-methyladenosine-3'-phosphate
  modified_base 19: mod_base = OTHER; note = 2'-O-methylcytidine-3'-phosphate
  modified_base 20: mod_base = OTHER; note = 2'-O-methyluridine-3'-phosphate
  modified_base 21: mod_base = OTHER; note = 2'-O-methyluridine-3'-phosphorothioate
  modified_base 22: mod_base = OTHER; note = 2'-O-methylguanosine-3'-phosphorothioate
  modified_base 23: mod_base = OTHER; note = 2'-O-methyladenosine-3'-phosphate
  misc_feature 1: note = RNA
  misc_feature 2: note = DNA
  misc_feature 3..4: note = RNA
  misc_feature 5: note = DNA
  misc_feature 6: note = RNA
  misc_feature 7: note = DNA
  misc_feature 8..11: note = RNA
  misc_feature 12: note = DNA
  misc_feature 13..23: note = RNA
accaatttttgttctcaacttga

SEQ ID NO: 2578 - DNA, 23 bp, synthetic construct
  source 1..23: mol_type = other DNA
  modified_base 1: mod_base = OTHER; note = 2'-O-methyladenosine-3'-phosphorothioate
  modified_base 2: mod_base = OTHER; note = 2'-deoxycytidine-3'-phosphorothioate
  modified_base 3: mod_base = OTHER; note = 2'-O-methylcytidine-3'-phosphate
  modified_base 4: mod_base = OTHER; note = 2'-O-methylcytidine-3'-phosphate
  modified_base 6: mod_base = OTHER; note = 2'-O-methyladenosine-3'-phosphate
  modified_base 8: mod_base = OTHER; note = 2'-O-methyluridine-3'-phosphate
  modified_base 9: mod_base = OTHER; note = 2'-O-methyluridine-3'-phosphate
  modified_base 10: mod_base = OTHER; note = 2'-O-methyluridine-3'-phosphate
  modified_base 11: mod_base = OTHER; note = 2'-O-methyluridine-3'-phosphate
  modified_base 13: mod_base = OTHER; note = 2'-O-methyluridine-3'-phosphate
  modified_base 14: mod_base = OTHER; note = 2'-fluorouridine-3'-phosphate
  modified_base 15: mod_base = OTHER; note = 2'-O-methylcytidine-3'-phosphate
  modified_base 16: mod_base = OTHER; note = 2'-O-methyluridine-3'-phosphate
  modified_base 17: mod_base = OTHER; note = 2'-O-methylcytidine-3'-phosphate
  modified_base 18: mod_base = OTHER; note = 2'-O-methyladenosine-3'-phosphate
  modified_base 19: mod_base = OTHER; note = 2'-O-methyladenosine-3'-phosphate
  modified_base 20: mod_base = OTHER; note = 2'-O-methylcytidine-3'-phosphate
  modified_base 21: mod_base = OTHER; note = 2'-O-methyluridine-3'-phosphorothioate
  modified_base 22: mod_base = OTHER; note = 2'-O-methyluridine-3'-phosphorothioate
  modified_base 23: mod_base = OTHER; note = 2'-O-methylguanosine-3'-phosphate
  misc_feature 1: note = RNA
  misc_feature 2: note = DNA
  misc_feature 3..4: note = RNA
  misc_feature 5: note = DNA
  misc_feature 6: note = RNA
  misc_feature 7: note = DNA
  misc_feature 8..11: note = RNA
  misc_feature 12: note = DNA
  misc_feature 13..23: note = RNA
acccaatttttgttctcaacttg

SEQ ID NO: 2579 - DNA, 23 bp, synthetic construct
  source 1..23: mol_type = other DNA
  modified_base 1: mod_base = OTHER; note = 2'-O-methyladenosine-3'-phosphorothioate
  modified_base 2: mod_base = OTHER; note = 2'-deoxyadenosine-3'-phosphorothioate
  modified_base 3: mod_base = OTHER; note = 2'-O-methylcytidine-3'-phosphate
  modified_base 4: mod_base = OTHER; note = 2'-O-methylcytidine-3'-phosphate
  modified_base 6: mod_base = OTHER; note = 2'-O-methyladenosine-3'-phosphate
  modified_base 8: mod_base = OTHER; note = 2'-O-methyluridine-3'-phosphate
  modified_base 9: mod_base = OTHER; note = 2'-O-methyluridine-3'-phosphate
  modified_base 10: mod_base = OTHER; note = 2'-O-methyluridine-3'-phosphate
  modified_base 11: mod_base = OTHER; note = 2'-O-methyluridine-3'-phosphate
  modified_base 13: mod_base = OTHER; note = 2'-O-methylguanosine-3'-phosphate
  modified_base 14: mod_base = OTHER; note = 2'-fluorouridine-3'-phosphate
  modified_base 15: mod_base = OTHER; note = 2'-O-methyluridine-3'-phosphate
  modified_base 16: mod_base = OTHER; note = 2'-O-methylcytidine-3'-phosphate
  modified_base 17: mod_base = OTHER; note = 2'-O-methyluridine-3'-phosphate
  modified_base 18: mod_base = OTHER; note = 2'-O-methylcytidine-3'-phosphate
  modified_base 19: mod_base = OTHER; note = 2'-O-methyladenosine-3'-phosphate
  modified_base 20: mod_base = OTHER; note = 2'-O-methyladenosine-3'-phosphate
  modified_base 21: mod_base = OTHER; note = 2'-O-methylcytidine-3'-phosphorothioate
  modified_base 22: mod_base = OTHER; note = 2'-O-methyluridine-3'-phosphorothioate
  modified_base 23: mod_base = OTHER; note = 2'-O-methyluridine-3'-phosphate
  misc_feature 1: note = RNA
  misc_feature 2: note = DNA
  misc_feature 3..4: note = RNA
  misc_feature 5: note = DNA
  misc_feature 6: note = RNA
  misc_feature 7: note = DNA
  misc_feature 8..11: note = RNA
  misc_feature 12: note = DNA
  misc_feature 13..23: note = RNA
aacccaatttttgttctcaactt

SEQ ID NO: 2580 - DNA, 23 bp, synthetic construct
  source 1..23: mol_type = other DNA
  modified_base 1: mod_base = OTHER; note = 2'-O-methyladenosine-3'-phosphorothioate
  modified_base 2: mod_base = OTHER; note = 2'-deoxyadenosine-3'-phosphorothioate
  modified_base 3: mod_base = OTHER; note = 2'-O-methyladenosine-3'-phosphate
  modified_base 4: mod_base = OTHER; note = 2'-O-methylcytidine-3'-phosphate
  modified_base 6: mod_base = OTHER; note = 2'-O-methylcytidine-3'-phosphate
  modified_base 8: mod_base = OTHER; note = 2'-O-methyladenosine-3'-phosphate
  modified_base 9: mod_base = OTHER; note = 2'-O-methyluridine-3'-phosphate
  modified_base 10: mod_base = OTHER; note = 2'-O-methyluridine-3'-phosphate
  modified_base 11: mod_base = OTHER; note = 2'-O-methyluridine-3'-phosphate
  modified_base 13: mod_base = OTHER; note = 2'-O-methyluridine-3'-phosphate
  modified_base 14: mod_base = OTHER; note = 2'-fluoroguanosine-3'-phosphate
  modified_base 15: mod_base = OTHER; note = 2'-O-methyluridine-3'-phosphate
  modified_base 16: mod_base = OTHER; note = 2'-O-methyluridine-3'-phosphate
  modified_base 17: mod_base = OTHER; note = 2'-O-methylcytidine-3'-phosphate
  modified_base 18: mod_base = OTHER; note = 2'-O-methyluridine-3'-phosphate
  modified_base 19: mod_base = OTHER; note = 2'-O-methylcytidine-3'-phosphate
  modified_base 20: mod_base = OTHER; note = 2'-O-methyladenosine-3'-phosphate
  modified_base 21: mod_base = OTHER; note = 2'-O-methyladenosine-3'-phosphorothioate
  modified_base 22: mod_base = OTHER; note = 2'-O-methylcytidine-3'-phosphorothioate
  modified_base 23: mod_base = OTHER; note = 2'-O-methyluridine-3'-phosphate
  misc_feature 1: note = RNA
  misc_feature 2: note = DNA
  misc_feature 3..4: note = RNA
  misc_feature 5: note = DNA
  misc_feature 6: note = RNA
  misc_feature 7: note = DNA
  misc_feature 8..11: note = RNA
  misc_feature 12: note = DNA
  misc_feature 13..23: note = RNA
aaacccaatttttgttctcaact

SEQ ID NO: 2581 - DNA, 23 bp, synthetic construct
  source 1..23: mol_type = other DNA
  modified_base 1: mod_base = OTHER; note = 2'-O-methyladenosine-3'-phosphorothioate
  modified_base 2: mod_base = OTHER; note = 2'-deoxyadenosine-3'-phosphorothioate
  modified_base 3: mod_base = OTHER; note = 2'-O-methyladenosine-3'-phosphate
  modified_base 4: mod_base = OTHER; note = 2'-O-methyladenosine-3'-phosphate
  modified_base 6: mod_base = OTHER; note = 2'-O-methylcytidine-3'-phosphate
  modified_base 8: mod_base = OTHER; note = 2'-O-methyladenosine-3'-phosphate
  modified_base 9: mod_base = OTHER; note = 2'-O-methyladenosine-3'-phosphate
  modified_base 10: mod_base = OTHER; note = 2'-O-methyluridine-3'-phosphate
  modified_base 11: mod_base = OTHER; note = 2'-O-methyluridine-3'-phosphate
  modified_base 13: mod_base = OTHER; note = 2'-O-methyluridine-3'-phosphate
  modified_base 14: mod_base = OTHER; note = 2'-fluorouridine-3'-phosphate
  modified_base 15: mod_base = OTHER; note = 2'-O-methylguanosine-3'-phosphate
  modified_base 16: mod_base = OTHER; note = 2'-O-methyluridine-3'-phosphate
  modified_base 17: mod_base = OTHER; note = 2'-O-methyluridine-3'-phosphate
  modified_base 18: mod_base = OTHER; note = 2'-O-methylcytidine-3'-phosphate
  modified_base 19: mod_base = OTHER; note = 2'-O-methyluridine-3'-phosphate
  modified_base 20: mod_base = OTHER; note = 2'-O-methylcytidine-3'-phosphate
  modified_base 21: mod_base = OTHER; note = 2'-O-methyladenosine-3'-phosphorothioate
  modified_base 22: mod_base = OTHER; note = 2'-O-methyladenosine-3'-phosphorothioate
  modified_base 23: mod_base = OTHER; note = 2'-O-methylcytidine-3'-phosphate
  misc_feature 1: note = RNA
  misc_feature 2: note = DNA
  misc_feature 3..4: note = RNA
  misc_feature 5: note = DNA
  misc_feature 6: note = RNA
  misc_feature 7: note = DNA
  misc_feature 8..11: note = RNA
  misc_feature 12: note = DNA
  misc_feature 13..23: note = RNA
aaaacccaatttttgttctcaac

SEQ ID NO: 2582 - DNA, 23 bp, synthetic construct
  source 1..23: mol_type = other DNA
  modified_base 1: mod_base = OTHER; note = 2'-O-methyladenosine-3'-phosphorothioate
  modified_base 2: mod_base = OTHER; note = 2'-deoxyadenosine-3'-phosphorothioate
  modified_base 3: mod_base = OTHER; note = 2'-O-methyladenosine-3'-phosphate
  modified_base 4: mod_base = OTHER; note = 2'-O-methyladenosine-3'-phosphate
  modified_base 6: mod_base = OTHER; note = 2'-O-methylcytidine-3'-phosphate
  modified_base 8: mod_base = OTHER; note = 2'-O-methylcytidine-3'-phosphate
  modified_base 9: mod_base = OTHER; note = 2'-O-methyladenosine-3'-phosphate
  modified_base 10: mod_base = OTHER; note = 2'-O-methyladenosine-3'-phosphate
  modified_base 11: mod_base = OTHER; note = 2'-O-methyluridine-3'-phosphate
  modified_base 13: mod_base = OTHER; note = 2'-O-methyluridine-3'-phosphate
  modified_base 14: mod_base = OTHER; note = 2'-fluorouridine-3'-phosphate
  modified_base 15: mod_base = OTHER; note = 2'-O-methyluridine-3'-phosphate
  modified_base 16: mod_base = OTHER; note = 2'-O-methylguanosine-3'-phosphate
  modified_base 17: mod_base = OTHER; note = 2'-O-methyluridine-3'-phosphate
  modified_base 18: mod_base = OTHER; note = 2'-O-methyluridine-3'-phosphate
  modified_base 19: mod_base = OTHER; note = 2'-O-methylcytidine-3'-phosphate
  modified_base 20: mod_base = OTHER; note = 2'-O-methyluridine-3'-phosphate
  modified_base 21: mod_base = OTHER; note = 2'-O-methylcytidine-3'-phosphorothioate
  modified_base 22: mod_base = OTHER; note = 2'-O-methyladenosine-3'-phosphorothioate
  modified_base 23: mod_base = OTHER; note = 2'-O-methyladenosine-3'-phosphate
  misc_feature 1: note = RNA
  misc_feature 2: note = DNA
  misc_feature 3..4: note = RNA
  misc_feature 5: note = DNA
  misc_feature 6: note = RNA
  misc_feature 7: note = DNA
  misc_feature 8..11: note = RNA
  misc_feature 12: note = DNA
  misc_feature 13..23: note = RNA
aaaaacccaatttttgttctcaa

SEQ ID NO: 2583 - DNA, 23 bp, synthetic construct
  source 1..23: mol_type = other DNA
  modified_base 1: mod_base = OTHER; note = 2'-O-methyladenosine-3'-phosphorothioate
  modified_base 2: mod_base = OTHER; note = 2'-deoxythimidine-3'-phosphorothioate
  modified_base 3: mod_base = OTHER; note = 2'-O-methyladenosine-3'-phosphate
  modified_base 4: mod_base = OTHER; note = 2'-O-methyladenosine-3'-phosphate
  modified_base 6: mod_base = OTHER; note = 2'-O-methyladenosine-3'-phosphate
  modified_base 8: mod_base = OTHER; note = 2'-O-methylcytidine-3'-phosphate
  modified_base 9: mod_base = OTHER; note = 2'-O-methylcytidine-3'-phosphate
  modified_base 10: mod_base = OTHER; note = 2'-O-methyladenosine-3'-phosphate
  modified_base 11: mod_base = OTHER; note = 2'-O-methyladenosine-3'-phosphate
  modified_base 13: mod_base = OTHER; note = 2'-O-methyluridine-3'-phosphate
  modified_base 14: mod_base = OTHER; note = 2'-fluorouridine-3'-phosphate
  modified_base 15: mod_base = OTHER; note = 2'-O-methyluridine-3'-phosphate
  modified_base 16: mod_base = OTHER; note = 2'-O-methyluridine-3'-phosphate
  modified_base 17: mod_base = OTHER; note = 2'-O-methylguanosine-3'-phosphate
  modified_base 18: mod_base = OTHER; note = 2'-O-methyluridine-3'-phosphate
  modified_base 19: mod_base = OTHER; note = 2'-O-methyluridine-3'-phosphate
  modified_base 20: mod_base = OTHER; note = 2'-O-methylcytidine-3'-phosphate
  modified_base 21: mod_base = OTHER; note = 2'-O-methyluridine-3'-phosphorothioate
  modified_base 22: mod_base = OTHER; note = 2'-O-methylcytidine-3'-phosphorothioate
  modified_base 23: mod_base = OTHER; note = 2'-O-methyladenosine-3'-phosphate
  misc_feature 1: note = RNA
  misc_feature 2: note = DNA
  misc_feature 3..4: note = RNA
  misc_feature 5: note = DNA
  misc_feature 6: note = RNA
  misc_feature 7: note = DNA
  misc_feature 8..11: note = RNA
  misc_feature 12: note = DNA
  misc_feature 13..23: note = RNA
ataaaacccaatttttgttctca

SEQ ID NO: 2584 - DNA, 23 bp, synthetic construct
  source 1..23: mol_type = other DNA
  modified_base 1: mod_base = OTHER; note = 2'-O-methyladenosine-3'-phosphorothioate
  modified_base 2: mod_base = OTHER; note = 2'-deoxythimidine-3'-phosphorothioate
  modified_base 3: mod_base = OTHER; note = 2'-O-methyluridine-3'-phosphate
  modified_base 4: mod_base = OTHER; note = 2'-O-methyladenosine-3'-phosphate
  modified_base 6: mod_base = OTHER; note = 2'-O-methyladenosine-3'-phosphate
  modified_base 8: mod_base = OTHER; note = 2'-O-methylcytidine-3'-phosphate
  modified_base 9: mod_base = OTHER; note = 2'-O-methylcytidine-3'-phosphate
  modified_base 10: mod_base = OTHER; note = 2'-O-methylcytidine-3'-phosphate
  modified_base 11: mod_base = OTHER; note = 2'-O-methyladenosine-3'-phosphate
  modified_base 13: mod_base = OTHER; note = 2'-O-methyluridine-3'-phosphate
  modified_base 14: mod_base = OTHER; note = 2'-fluorouridine-3'-phosphate
  modified_base 15: mod_base = OTHER; note = 2'-O-methyluridine-3'-phosphate
  modified_base 16: mod_base = OTHER; note = 2'-O-methyluridine-3'-phosphate
  modified_base 17: mod_base = OTHER; note = 2'-O-methyluridine-3'-phosphate
  modified_base 18: mod_base = OTHER; note = 2'-O-methylguanosine-3'-phosphate
  modified_base 19: mod_base = OTHER; note = 2'-O-methyluridine-3'-phosphate
  modified_base 20: mod_base = OTHER; note = 2'-O-methyluridine-3'-phosphate
  modified_base 21: mod_base = OTHER; note = 2'-O-methylcytidine-3'-phosphorothioate
  modified_base 22: mod_base = OTHER; note = 2'-O-methyluridine-3'-phosphorothioate
  modified_base 23: mod_base = OTHER; note = 2'-O-methylcytidine-3'-phosphate
  misc_feature 1: note = RNA
  misc_feature 2: note = DNA
  misc_feature 3..4: note = RNA
  misc_feature 5: note = DNA
  misc_feature 6: note = RNA
  misc_feature 7: note = DNA
  misc_feature 8..11: note = RNA
  misc_feature 12: note = DNA
  misc_feature 13..23: note = RNA
attaaaacccaatttttgttctc

SEQ ID NO: 2585 - DNA, 23 bp, synthetic construct
  source 1..23: mol_type = other DNA
  modified_base 1: mod_base = OTHER; note = 2'-O-methyladenosine-3'-phosphorothioate
  modified_base 2: mod_base = OTHER; note = 2'-deoxythimidine-3'-phosphorothioate
  modified_base 3: mod_base = OTHER; note = 2'-O-methyluridine-3'-phosphate
  modified_base 4: mod_base = OTHER; note = 2'-O-methyluridine-3'-phosphate
  modified_base 6: mod_base = OTHER; note = 2'-O-methyladenosine-3'-phosphate
  modified_base 8: mod_base = OTHER; note = 2'-O-methyladenosine-3'-phosphate
  modified_base 9: mod_base = OTHER; note = 2'-O-methylcytidine-3'-phosphate
  modified_base 10: mod_base = OTHER; note = 2'-O-methylcytidine-3'-phosphate
  modified_base 11: mod_base = OTHER; note = 2'-O-methylcytidine-3'-phosphate
  modified_base 13: mod_base = OTHER; note = 2'-O-methyladenosine-3'-phosphate
  modified_base 14: mod_base = OTHER; note = 2'-fluorouridine-3'-phosphate
  modified_base 15: mod_base = OTHER; note = 2'-O-methyluridine-3'-phosphate
  modified_base 16: mod_base = OTHER; note = 2'-O-methyluridine-3'-phosphate
  modified_base 17: mod_base = OTHER; note = 2'-O-methyluridine-3'-phosphate
  modified_base 18: mod_base = OTHER; note = 2'-O-methyluridine-3'-phosphate
  modified_base 19: mod_base = OTHER; note = 2'-O-methylguanosine-3'-phosphate
  modified_base 20: mod_base = OTHER; note = 2'-O-methyluridine-3'-phosphate
  modified_base 21: mod_base = OTHER; note = 2'-O-methyluridine-3'-phosphorothioate
  modified_base 22: mod_base = OTHER; note = 2'-O-methylcytidine-3'-phosphorothioate
  modified_base 23: mod_base = OTHER; note = 2'-O-methyluridine-3'-phosphate
  misc_feature 1: note = RNA
  misc_feature 2: note = DNA
  misc_feature 3..4: note = RNA
  misc_feature 5: note = DNA
  misc_feature 6: note = RNA
  misc_feature 7: note = DNA
  misc_feature 8..11: note = RNA
  misc_feature 12: note = DNA
  misc_feature 13..23: note = RNA
atttaaaacccaatttttgttct

SEQ ID NO: 2586 - DNA, 23 bp, synthetic construct
  source 1..23: mol_type = other DNA
  modified_base 1: mod_base = OTHER; note = 2'-O-methyladenosine-3'-phosphorothioate
  modified_base 2: mod_base = OTHER; note = 2'-deoxyguanosine-3'-phosphorothioate
  modified_base 3: mod_base = OTHER; note = 2'-O-methylcytidine-3'-phosphate
  modified_base 4: mod_base = OTHER; note = 2'-O-methyladenosine-3'-phosphate
  modified_base 6: mod_base = OTHER; note = 2'-O-methyluridine-3'-phosphate
  modified_base 8: mod_base = OTHER; note = 2'-O-methylcytidine-3'-phosphate
  modified_base 9: mod_base = OTHER; note = 2'-O-methyladenosine-3'-phosphate
  modified_base 10: mod_base = OTHER; note = 2'-O-methyladenosine-3'-phosphate
  modified_base 11: mod_base = OTHER; note = 2'-O-methyladenosine-3'-phosphate
  modified_base 13: mod_base = OTHER; note = 2'-O-methyladenosine-3'-phosphate
  modified_base 14: mod_base = OTHER; note = 2'-fluorouridine-3'-phosphate
  modified_base 15: mod_base = OTHER; note = 2'-O-methylguanosine-3'-phosphate
  modified_base 16: mod_base = OTHER; note = 2'-O-methyluridine-3'-phosphate
  modified_base 17: mod_base = OTHER; note = 2'-O-methyladenosine-3'-phosphate
  modified_base 18: mod_base = OTHER; note = 2'-O-methyluridine-3'-phosphate
  modified_base 19: mod_base = OTHER; note = 2'-O-methyladenosine-3'-phosphate
  modified_base 20: mod_base = OTHER; note = 2'-O-methylcytidine-3'-phosphate
  modified_base 21: mod_base = OTHER; note = 2'-O-methyluridine-3'-phosphorothioate
  modified_base 22: mod_base = OTHER; note = 2'-O-methyluridine-3'-phosphorothioate
  modified_base 23: mod_base = OTHER; note = 2'-O-methyluridine-3'-phosphate
  misc_feature 1: note = RNA
  misc_feature 2: note = DNA
  misc_feature 3..4: note = RNA
  misc_feature 5: note = DNA
  misc_feature 6: note = RNA
  misc_feature 7: note = DNA
  misc_feature 8..11: note = RNA
  misc_feature 12: note = DNA
  misc_feature 13..23: note = RNA
agcaatgcaaaaatgtatacttt

SEQ ID NO: 2587 - DNA, 23 bp, synthetic construct
  source 1..23: mol_type = other DNA
  modified_base 1: mod_base = OTHER; note = 2'-O-methyladenosine-3'-phosphorothioate
  modified_base 2: mod_base = OTHER; note = 2'-deoxyguanosine-3'-phosphorothioate
  modified_base 3: mod_base = OTHER; note = 2'-O-methylguanosine-3'-phosphate
  modified_base 4: mod_base = OTHER; note = 2'-O-methylcytidine-3'-phosphate
  modified_base 6: mod_base = OTHER; note = 2'-O-methyladenosine-3'-phosphate
  modified_base 8: mod_base = OTHER; note = 2'-O-methylguanosine-3'-phosphate
  modified_base 9: mod_base = OTHER; note = 2'-O-methylcytidine-3'-phosphate
  modified_base 10: mod_base = OTHER; note = 2'-O-methyladenosine-3'-phosphate
  modified_base 11: mod_base = OTHER; note = 2'-O-methyladenosine-3'-phosphate
  modified_base 13: mod_base = OTHER; note = 2'-O-methyladenosine-3'-phosphate
  modified_base 14: mod_base = OTHER; note = 2'-fluoroadenosine-3'-phosphate
  modified_base 15: mod_base = OTHER; note = 2'-O-methyluridine-3'-phosphate
  modified_base 16: mod_base = OTHER; note = 2'-O-methylguanosine-3'-phosphate
  modified_base 17: mod_base = OTHER; note = 2'-O-methyluridine-3'-phosphate
  modified_base 18: mod_base = OTHER; note = 2'-O-methyladenosine-3'-phosphate
  modified_base 19: mod_base = OTHER; note = 2'-O-methyluridine-3'-phosphate
  modified_base 20: mod_base = OTHER; note = 2'-O-methyladenosine-3'-phosphate
  modified_base 21: mod_base = OTHER; note = 2'-O-methylcytidine-3'-phosphorothioate
  modified_base 22: mod_base = OTHER; note = 2'-O-methyluridine-3'-phosphorothioate
  modified_base 23: mod_base = OTHER; note = 2'-O-methyluridine-3'-phosphate
  misc_feature 1: note = RNA
  misc_feature 2: note = DNA
  misc_feature 3..4: note = RNA
  misc_feature 5: note = DNA
  misc_feature 6: note = RNA
  misc_feature 7: note = DNA
  misc_feature 8..11: note = RNA
  misc_feature 12: note = DNA
  misc_feature 13..23: note = RNA
aggcaatgcaaaaatgtatactt

SEQ ID NO: 2588 - DNA, 23 bp, synthetic construct
  source 1..23: mol_type = other DNA
  modified_base 1: mod_base = OTHER; note = 2'-O-methyladenosine-3'-phosphorothioate
  modified_base 2: mod_base = OTHER; note = 2'-deoxyadenosine-3'-phosphorothioate
  modified_base 3: mod_base = OTHER; note = 2'-O-methylguanosine-3'-phosphate
  modified_base 4: mod_base = OTHER; note = 2'-O-methylguanosine-3'-phosphate
  modified_base 6: mod_base = OTHER; note = 2'-O-methyladenosine-3'-phosphate
  modified_base 8: mod_base = OTHER; note = 2'-O-methyluridine-3'-phosphate
  modified_base 9: mod_base = OTHER; note = 2'-O-methylguanosine-3'-phosphate
  modified_base 10: mod_base = OTHER; note = 2'-O-methylcytidine-3'-phosphate
  modified_base 11: mod_base = OTHER; note = 2'-O-methyladenosine-3'-phosphate
  modified_base 13: mod_base = OTHER; note = 2'-O-methyladenosine-3'-phosphate
  modified_base 14: mod_base = OTHER; note = 2'-fluoroadenosine-3'-phosphate
  modified_base 15: mod_base = OTHER; note = 2'-O-methyladenosine-3'-phosphate
  modified_base 16: mod_base = OTHER; note = 2'-O-methyluridine-3'-phosphate
  modified_base 17: mod_base = OTHER; note = 2'-O-methylguanosine-3'-phosphate
  modified_base 18: mod_base = OTHER; note = 2'-O-methyluridine-3'-phosphate
  modified_base 19: mod_base = OTHER; note = 2'-O-methyladenosine-3'-phosphate
  modified_base 20: mod_base = OTHER; note = 2'-O-methyluridine-3'-phosphate
  modified_base 21: mod_base = OTHER; note = 2'-O-methyladenosine-3'-phosphorothioate
  modified_base 22: mod_base = OTHER; note = 2'-O-methylcytidine-3'-phosphorothioate
  modified_base 23: mod_base = OTHER; note = 2'-O-methyluridine-3'-phosphate
  misc_feature 1: note = RNA
  misc_feature 2: note = DNA
  misc_feature 3..4: note = RNA
  misc_feature 5: note = DNA
  misc_feature 6: note = RNA
  misc_feature 7: note = DNA
  misc_feature 8..11: note = RNA
  misc_feature 12: note = DNA
  misc_feature 13..23: note = RNA
aaggcaatgcaaaaatgtatact

SEQ ID NO: 2589 - DNA, 23 bp, synthetic construct
  source 1..23: mol_type = other DNA
  modified_base 1: mod_base = OTHER; note = 2'-O-methyladenosine-3'-phosphorothioate
  modified_base 2: mod_base = OTHER; note = 2'-deoxyadenosine-3'-phosphorothioate
  modified_base 3: mod_base = OTHER; note = 2'-O-methyladenosine-3'-phosphate
  modified_base 4: mod_base = OTHER; note = 2'-O-methylguanosine-3'-phosphate
  modified_base 6: mod_base = OTHER; note = 2'-O-methylcytidine-3'-phosphate
  modified_base 8: mod_base = OTHER; note = 2'-O-methyladenosine-3'-phosphate
  modified_base 9: mod_base = OTHER; note = 2'-O-methyluridine-3'-phosphate
  modified_base 10: mod_base = OTHER; note = 2'-O-methylguanosine-3'-phosphate
  modified_base 11: mod_base = OTHER; note = 2'-O-methylcytidine-3'-phosphate
  modified_base 13: mod_base = OTHER; note = 2'-O-methyladenosine-3'-phosphate
  modified_base 14: mod_base = OTHER; note = 2'-fluoroadenosine-3'-phosphate
  modified_base 15: mod_base = OTHER; note = 2'-O-methyladenosine-3'-phosphate
  modified_base 16: mod_base = OTHER; note = 2'-O-methyladenosine-3'-phosphate
  modified_base 17: mod_base = OTHER; note = 2'-O-methyluridine-3'-phosphate
  modified_base 18: mod_base = OTHER; note = 2'-O-methylguanosine-3'-phosphate
  modified_base 19: mod_base = OTHER; note = 2'-O-methyluridine-3'-phosphate
  modified_base 20: mod_base = OTHER; note = 2'-O-methyladenosine-3'-phosphate
  modified_base 21: mod_base = OTHER; note = 2'-O-methyluridine-3'-phosphorothioate
  modified_base 22: mod_base = OTHER; note = 2'-O-methyladenosine-3'-phosphorothioate
  modified_base 23: mod_base = OTHER; note = 2'-O-methylcytidine-3'-phosphate
  misc_feature 1: note = RNA
  misc_feature 2: note = DNA
  misc_feature 3..4: note = RNA
  misc_feature 5: note = DNA
  misc_feature 6: note = RNA
  misc_feature 7: note = DNA
  misc_feature 8..11: note = RNA
  misc_feature 12: note = DNA
  misc_feature 13..23: note = RNA
aaaggcaatgcaaaaatgtatac

SEQ ID NO: 2590 - DNA, 23 bp, synthetic construct
  source 1..23: mol_type = other DNA
  modified_base 1: mod_base = OTHER; note = 2'-O-methyladenosine-3'-phosphorothioate
  modified_base 2: mod_base = OTHER; note = 2'-deoxycytidine-3'-phosphorothioate
  modified_base 3: mod_base = OTHER; note = 2'-O-methylcytidine-3'-phosphate
  modified_base 4: mod_base = OTHER; note = 2'-O-methylguanosine-3'-phosphate
  modified_base 6: mod_base = OTHER; note = 2'-O-methyladenosine-3'-phosphate
  modified_base 8: mod_base = OTHER; note = 2'-O-methylguanosine-3'-phosphate
  modified_base 9: mod_base = OTHER; note = 2'-O-methylcytidine-3'-phosphate
  modified_base 10: mod_base = OTHER; note = 2'-O-methyladenosine-3'-phosphate
  modified_base 11: mod_base = OTHER; note = 2'-O-methyladenosine-3'-phosphate
  modified_base 13: mod_base = OTHER; note = 2'-O-methylguanosine-3'-phosphate
  modified_base 14: mod_base = OTHER; note = 2'-fluorocytidine-3'-phosphate
  modified_base 15: mod_base = OTHER; note = 2'-O-methyladenosine-3'-phosphate
  modified_base 16: mod_base = OTHER; note = 2'-O-methyladenosine-3'-phosphate
  modified_base 17: mod_base = OTHER; note = 2'-O-methyladenosine-3'-phosphate
  modified_base 18: mod_base = OTHER; note = 2'-O-methyladenosine-3'-phosphate
  modified_base 19: mod_base = OTHER; note = 2'-O-methyladenosine-3'-phosphate
  modified_base 20: mod_base = OTHER; note = 2'-O-methyluridine-3'-phosphate
  modified_base 21: mod_base = OTHER; note = 2'-O-methylguanosine-3'-phosphorothioate
  modified_base 22: mod_base = OTHER; note = 2'-O-methyluridine-3'-phosphorothioate
  modified_base 23: mod_base = OTHER; note = 2'-O-methyladenosine-3'-phosphate
  misc_feature 1: note = RNA
  misc_feature 2: note = DNA
  misc_feature 3..4: note = RNA
  misc_feature 5: note = DNA
  misc_feature 6: note = RNA
  misc_feature 7: note = DNA
  misc_feature 8..11: note = RNA
  misc_feature 12: note = DNA
  misc_feature 13..23: note = RNA
accgaaggcaatgcaaaaatgta

SEQ ID NO: 2591 - DNA, 23 bp, synthetic construct
  source 1..23: mol_type = other DNA
  modified_base 1: mod_base = OTHER; note = 2'-O-methyladenosine-3'-phosphorothioate
  modified_base 2: mod_base = OTHER; note = 2'-deoxyadenosine-3'-phosphorothioate
  modified_base 3: mod_base = OTHER; note = 2'-O-methylcytidine-3'-phosphate
  modified_base 4: mod_base = OTHER; note = 2'-O-methylcytidine-3'-phosphate
  modified_base 6: mod_base = OTHER; note = 2'-O-methyladenosine-3'-phosphate
  modified_base 8: mod_base = OTHER; note = 2'-O-methylguanosine-3'-phosphate
  modified_base 9: mod_base = OTHER; note = 2'-O-methylguanosine-3'-phosphate
  modified_base 10: mod_base = OTHER; note = 2'-O-methylcytidine-3'-phosphate
  modified_base 11: mod_base = OTHER; note = 2'-O-methyladenosine-3'-phosphate
  modified_base 13: mod_base = OTHER; note = 2'-O-methyluridine-3'-phosphate
  modified_base 14: mod_base = OTHER; note = 2'-fluoroguanosine-3'-phosphate
  modified_base 15: mod_base = OTHER; note = 2'-O-methylcytidine-3'-phosphate
  modified_base 16: mod_base = OTHER; note = 2'-O-methyladenosine-3'-phosphate
  modified_base 17: mod_base = OTHER; note = 2'-O-methyladenosine-3'-phosphate
  modified_base 18: mod_base = OTHER; note = 2'-O-methyladenosine-3'-phosphate
  modified_base 19: mod_base = OTHER; note = 2'-O-methyladenosine-3'-phosphate
  modified_base 20: mod_base = OTHER; note = 2'-O-methyladenosine-3'-phosphate
  modified_base 21: mod_base = OTHER; note = 2'-O-methyluridine-3'-phosphorothioate
  modified_base 22: mod_base = OTHER; note = 2'-O-methylguanosine-3'-phosphorothioate
  modified_base 23: mod_base = OTHER; note = 2'-O-methyluridine-3'-phosphate
  misc_feature 1: note = RNA
  misc_feature 2: note = DNA
  misc_feature 3..4: note = RNA
  misc_feature 5: note = DNA
  misc_feature 6: note = RNA
  misc_feature 7: note = DNA
  misc_feature 8..11: note = RNA
  misc_feature 12: note = DNA
  misc_feature 13..23: note = RNA
aaccgaaggcaatgcaaaaatgt

SEQ ID NO: 2592 - DNA, 23 bp, synthetic construct
  source 1..23: mol_type = other DNA
  modified_base 1: mod_base = OTHER; note = 2'-O-methyladenosine-3'-phosphorothioate
  modified_base 2: mod_base = OTHER; note = 2'-deoxyadenosine-3'-phosphorothioate
  modified_base 3: mod_base = OTHER; note = 2'-O-methyladenosine-3'-phosphate
  modified_base 4: mod_base = OTHER; note = 2'-O-methylcytidine-3'-phosphate
  modified_base 6: mod_base = OTHER; note = 2'-O-methylguanosine-3'-phosphate
  modified_base 8: mod_base = OTHER; note = 2'-O-methyladenosine-3'-phosphate
  modified_base 9: mod_base = OTHER; note = 2'-O-methylguanosine-3'-phosphate
  modified_base 10: mod_base = OTHER; note = 2'-O-methylguanosine-3'-phosphate
  modified_base 11: mod_base = OTHER; note = 2'-O-methylcytidine-3'-phosphate
  modified_base 13: mod_base = OTHER; note = 2'-O-methyladenosine-3'-phosphate
  modified_base 14: mod_base = OTHER; note = 2'-fluorouridine-3'-phosphate
  modified_base 15: mod_base = OTHER; note = 2'-O-methylguanosine-3'-phosphate
  modified_base 16: mod_base = OTHER; note = 2'-O-methylcytidine-3'-phosphate
  modified_base 17: mod_base = OTHER; note = 2'-O-methyladenosine-3'-phosphate
  modified_base 18: mod_base = OTHER; note = 2'-O-methyladenosine-3'-phosphate
  modified_base 19: mod_base = OTHER; note = 2'-O-methyladenosine-3'-phosphate
  modified_base 20: mod_base = OTHER; note = 2'-O-methyladenosine-3'-phosphate
  modified_base 21: mod_base = OTHER; note = 2'-O-methyladenosine-3'-phosphorothioate
  modified_base 22: mod_base = OTHER; note = 2'-O-methyluridine-3'-phosphorothioate
  modified_base 23: mod_base = OTHER; note = 2'-O-methylguanosine-3'-phosphate
  misc_feature 1: note = RNA
  misc_feature 2: note = DNA
  misc_feature 3..4: note = RNA
  misc_feature 5: note = DNA
  misc_feature 6: note = RNA
  misc_feature 7: note = DNA
  misc_feature 8..11: note = RNA
  misc_feature 12: note = DNA
  misc_feature 13..23: note = RNA
aaaccgaaggcaatgcaaaaatg

SEQ ID NO: 2593 - DNA, 23 bp, synthetic construct
  source 1..23: mol_type = other DNA
  modified_base 1: mod_base = OTHER; note = 2'-O-methyladenosine-3'-phosphorothioate
  modified_base 2: mod_base = OTHER; note = 2'-deoxyadenosine-3'-phosphorothioate
  modified_base 3: mod_base = OTHER; note = 2'-O-methyladenosine-3'-phosphate
  modified_base 4: mod_base = OTHER; note = 2'-O-methyladenosine-3'-phosphate
  modified_base 6: mod_base = OTHER; note = 2'-O-methylcytidine-3'-phosphate
  modified_base 8: mod_base = OTHER; note = 2'-O-methyladenosine-3'-phosphate
  modified_base 9: mod_base = OTHER; note = 2'-O-methyladenosine-3'-phosphate
  modified_base 10: mod_base = OTHER; note = 2'-O-methylguanosine-3'-phosphate
  modified_base 11: mod_base = OTHER; note = 2'-O-methylguanosine-3'-phosphate
  modified_base 13: mod_base = OTHER; note = 2'-O-methyladenosine-3'-phosphate
  modified_base 14: mod_base = OTHER; note = 2'-fluoroadenosine-3'-phosphate
  modified_base 15: mod_base = OTHER; note = 2'-O-methyluridine-3'-phosphate
  modified_base 16: mod_base = OTHER; note = 2'-O-methylguanosine-3'-phosphate
  modified_base 17: mod_base = OTHER; note = 2'-O-methylcytidine-3'-phosphate
  modified_base 18: mod_base = OTHER; note = 2'-O-methyladenosine-3'-phosphate
  modified_base 19: mod_base = OTHER; note = 2'-O-methyladenosine-3'-phosphate
  modified_base 20: mod_base = OTHER; note = 2'-O-methyladenosine-3'-phosphate
  modified_base 21: mod_base = OTHER; note = 2'-O-methyladenosine-3'-phosphorothioate
  modified_base 22: mod_base = OTHER; note = 2'-O-methyladenosine-3'-phosphorothioate
  modified_base 23: mod_base = OTHER; note = 2'-O-methyluridine-3'-phosphate
  misc_feature 1: note = RNA
  misc_feature 2: note = DNA
  misc_feature 3..4: note = RNA
  misc_feature 5: note = DNA
  misc_feature 6: note = RNA
  misc_feature 7: note = DNA
  misc_feature 8..11: note = RNA
  misc_feature 12: note = DNA
  misc_feature 13..23: note = RNA
aaaaccgaaggcaatgcaaaaat

SEQ ID NO: 2594 - DNA, 23 bp, synthetic construct
  source 1..23: mol_type = other DNA
  modified_base 1: mod_base = OTHER; note = 2'-O-methyladenosine-3'-phosphorothioate
  modified_base 2: mod_base = OTHER; note = 2'-deoxycytidine-3'-phosphorothioate
  modified_base 3: mod_base = OTHER; note = 2'-O-methyladenosine-3'-phosphate
  modified_base 4: mod_base = OTHER; note = 2'-O-methyladenosine-3'-phosphate
  modified_base 6: mod_base = OTHER; note = 2'-O-methylcytidine-3'-phosphate
  modified_base 8: mod_base = OTHER; note = 2'-O-methylguanosine-3'-phosphate
  modified_base 9: mod_base = OTHER; note = 2'-O-methyladenosine-3'-phosphate
  modified_base 10: mod_base = OTHER; note = 2'-O-methyladenosine-3'-phosphate
  modified_base 11: mod_base = OTHER; note = 2'-O-methylguanosine-3'-phosphate
  modified_base 13: mod_base = OTHER; note = 2'-O-methylcytidine-3'-phosphate
  modified_base 14: mod_base = OTHER; note = 2'-fluoroadenosine-3'-phosphate
  modified_base 15: mod_base = OTHER; note = 2'-O-methyladenosine-3'-phosphate
  modified_base 16: mod_base = OTHER; note = 2'-O-methyluridine-3'-phosphate
  modified_base 17: mod_base = OTHER; note = 2'-O-methylguanosine-3'-phosphate
  modified_base 18: mod_base = OTHER; note = 2'-O-methylcytidine-3'-phosphate
  modified_base 19: mod_base = OTHER; note = 2'-O-methyladenosine-3'-phosphate
  modified_base 20: mod_base = OTHER; note = 2'-O-methyladenosine-3'-phosphate
  modified_base 21: mod_base = OTHER; note = 2'-O-methyladenosine-3'-phosphorothioate
  modified_base 22: mod_base = OTHER; note = 2'-O-methyladenosine-3'-phosphorothioate
  modified_base 23: mod_base = OTHER; note = 2'-O-methyladenosine-3'-phosphate
  misc_feature 1: note = RNA
  misc_feature 2: note = DNA
  misc_feature 3..4: note = RNA
  misc_feature 5: note = DNA
  misc_feature 6: note = RNA
  misc_feature 7: note = DNA
  misc_feature 8..11: note = RNA
  misc_feature 12: note = DNA
  misc_feature 13..23: note = RNA
acaaaccgaaggcaatgcaaaaa

SEQ ID NO: 2595 - DNA, 23 bp, synthetic construct
  source 1..23: mol_type = other DNA
  modified_base 1: mod_base = OTHER; note = 2'-O-methyladenosine-3'-phosphorothioate
  modified_base 2: mod_base = OTHER; note = 2'-deoxyadenosine-3'-phosphorothioate
  modified_base 3: mod_base = OTHER; note = 2'-O-methylcytidine-3'-phosphate
  modified_base 4: mod_base = OTHER; note = 2'-O-methyladenosine-3'-phosphate
  modified_base 6: mod_base = OTHER; note = 2'-O-methyladenosine-3'-phosphate
  modified_base 8: mod_base = OTHER; note = 2'-O-methylcytidine-3'-phosphate
  modified_base 9: mod_base = OTHER; note = 2'-O-methylguanosine-3'-phosphate
  modified_base 10: mod_base = OTHER; note = 2'-O-methyladenosine-3'-phosphate
  modified_base 11: mod_base = OTHER; note = 2'-O-methyladenosine-3'-phosphate
  modified_base 13: mod_base = OTHER; note = 2'-O-methylguanosine-3'-phosphate
  modified_base 14: mod_base = OTHER; note = 2'-fluorocytidine-3'-phosphate
  modified_base 15: mod_base = OTHER; note = 2'-O-methyladenosine-3'-phosphate
  modified_base 16: mod_base = OTHER; note = 2'-O-methyladenosine-3'-phosphate
  modified_base 17: mod_base = OTHER; note = 2'-O-methyluridine-3'-phosphate
  modified_base 18: mod_base = OTHER; note = 2'-O-methylguanosine-3'-phosphate
  modified_base 19: mod_base = OTHER; note = 2'-O-methylcytidine-3'-phosphate
  modified_base 20: mod_base = OTHER; note = 2'-O-methyladenosine-3'-phosphate
  modified_base 21: mod_base = OTHER; note = 2'-O-methyladenosine-3'-phosphorothioate
  modified_base 22: mod_base = OTHER; note = 2'-O-methyladenosine-3'-phosphorothioate
  modified_base 23: mod_base = OTHER; note = 2'-O-methyladenosine-3'-phosphate
  misc_feature 1: note = RNA
  misc_feature 2: note = DNA
  misc_feature 3..4: note = RNA
  misc_feature 5: note = DNA
  misc_feature 6: note = RNA
  misc_feature 7: note = DNA
  misc_feature 8..11: note = RNA
  misc_feature 12: note = DNA
  misc_feature 13..23: note = RNA
aacaaaccgaaggcaatgcaaaa

SEQ ID NO: 2596 - DNA, 23 bp, synthetic construct
  source 1..23: mol_type = other DNA
  modified_base 1: mod_base = OTHER; note = 2'-O-methyladenosine-3'-phosphorothioate
  modified_base 2: mod_base = OTHER; note = 2'-deoxythimidine-3'-phosphorothioate
  modified_base 3: mod_base = OTHER; note = 2'-O-methyladenosine-3'-phosphate
  modified_base 4: mod_base = OTHER; note = 2'-O-methylcytidine-3'-phosphate
  modified_base 6: mod_base = OTHER; note = 2'-O-methyladenosine-3'-phosphate
  modified_base 8: mod_base = OTHER; note = 2'-O-methylcytidine-3'-phosphate
  modified_base 9: mod_base = OTHER; note = 2'-O-methylcytidine-3'-phosphate
  modified_base 10: mod_base = OTHER; note = 2'-O-methylguanosine-3'-phosphate
  modified_base 11: mod_base = OTHER; note = 2'-O-methyladenosine-3'-phosphate
  modified_base 13: mod_base = OTHER; note = 2'-O-methylguanosine-3'-phosphate
  modified_base 14: mod_base = OTHER; note = 2'-fluoroguanosine-3'-phosphate
  modified_base 15: mod_base = OTHER; note = 2'-O-methylcytidine-3'-phosphate
  modified_base 16: mod_base = OTHER; note = 2'-O-methyladenosine-3'-phosphate
  modified_base 17: mod_base = OTHER; note = 2'-O-methyladenosine-3'-phosphate
  modified_base 18: mod_base = OTHER; note = 2'-O-methyluridine-3'-phosphate
  modified_base 19: mod_base = OTHER; note = 2'-O-methylguanosine-3'-phosphate
  modified_base 20: mod_base = OTHER; note = 2'-O-methylcytidine-3'-phosphate
  modified_base 21: mod_base = OTHER; note = 2'-O-methyladenosine-3'-phosphorothioate
  modified_base 22: mod_base = OTHER; note = 2'-O-methyladenosine-3'-phosphorothioate
  modified_base 23: mod_base = OTHER; note = 2'-O-methyladenosine-3'-phosphate
  misc_feature 1: note = RNA
  misc_feature 2: note = DNA
  misc_feature 3..4: note = RNA
  misc_feature 5: note = DNA
  misc_feature 6: note = RNA
  misc_feature 7: note = DNA
  misc_feature 8..11: note = RNA
  misc_feature 12: note = DNA
  misc_feature 13..23: note = RNA
atacaaaccgaaggcaatgcaaa

SEQ ID NO: 2597 - DNA, 23 bp, synthetic construct
  source 1..23: mol_type = other DNA
  modified_base 1: mod_base = OTHER; note = 2'-O-methyladenosine-3'-phosphorothioate
  modified_base 2: mod_base = OTHER; note = 2'-deoxyadenosine-3'-phosphorothioate
  modified_base 3: mod_base = OTHER; note = 2'-O-methyluridine-3'-phosphate
  modified_base 4: mod_base = OTHER; note = 2'-O-methyladenosine-3'-phosphate
  modified_base 6: mod_base = OTHER; note = 2'-O-methyladenosine-3'-phosphate
  modified_base 8: mod_base = OTHER; note = 2'-O-methyladenosine-3'-phosphate
  modified_base 9: mod_base = OTHER; note = 2'-O-methylcytidine-3'-phosphate
  modified_base 10: mod_base = OTHER; note = 2'-O-methylcytidine-3'-phosphate
  modified_base 11: mod_base = OTHER; note = 2'-O-methylguanosine-3'-phosphate
  modified_base 13: mod_base = OTHER; note = 2'-O-methyladenosine-3'-phosphate
  modified_base 14: mod_base = OTHER; note = 2'-fluoroguanosine-3'-phosphate
  modified_base 15: mod_base = OTHER; note = 2'-O-methylguanosine-3'-phosphate
  modified_base 16: mod_base = OTHER; note = 2'-O-methylcytidine-3'-phosphate
  modified_base 17: mod_base = OTHER; note = 2'-O-methyladenosine-3'-phosphate
  modified_base 18: mod_base = OTHER; note = 2'-O-methyladenosine-3'-phosphate
  modified_base 19: mod_base = OTHER; note = 2'-O-methyluridine-3'-phosphate
  modified_base 20: mod_base = OTHER; note = 2'-O-methylguanosine-3'-phosphate
  modified_base 21: mod_base = OTHER; note = 2'-O-methylcytidine-3'-phosphorothioate
  modified_base 22: mod_base = OTHER; note = 2'-O-methyladenosine-3'-phosphorothioate
  modified_base 23: mod_base = OTHER; note = 2'-O-methyladenosine-3'-phosphate
  misc_feature 1: note = RNA
  misc_feature 2: note = DNA
  misc_feature 3..4: note = RNA
  misc_feature 5: note = DNA
  misc_feature 6: note = RNA
  misc_feature 7: note = DNA
  misc_feature 8..11: note = RNA
  misc_feature 12: note = DNA
  misc_feature 13..23: note = RNA
aatacaaaccgaaggcaatgcaa

SEQ ID NO: 2598 - DNA, 23 bp, synthetic construct
  source 1..23: mol_type = other DNA
  modified_base 1: mod_base = OTHER; note = 2'-O-methyladenosine-3'-phosphorothioate
  modified_base 2: mod_base = OTHER; note = 2'-deoxyadenosine-3'-phosphorothioate
  modified_base 3: mod_base = OTHER; note = 2'-O-methyladenosine-3'-phosphate
  modified_base 4: mod_base = OTHER; note = 2'-O-methyluridine-3'-phosphate
  modified_base 6: mod_base = OTHER; note = 2'-O-methylcytidine-3'-phosphate
  modified_base 8: mod_base = OTHER; note = 2'-O-methyladenosine-3'-phosphate
  modified_base 9: mod_base = OTHER; note = 2'-O-methyladenosine-3'-phosphate
  modified_base 10: mod_base = OTHER; note = 2'-O-methylcytidine-3'-phosphate
  modified_base 11: mod_base = OTHER; note = 2'-O-methylcytidine-3'-phosphate
  modified_base 13: mod_base = OTHER; note = 2'-O-methyladenosine-3'-phosphate
  modified_base 14: mod_base = OTHER; note = 2'-fluoroadenosine-3'-phosphate
  modified_base 15: mod_base = OTHER; note = 2'-O-methylguanosine-3'-phosphate
  modified_base 16: mod_base = OTHER; note = 2'-O-methylguanosine-3'-phosphate
  modified_base 17: mod_base = OTHER; note = 2'-O-methylcytidine-3'-phosphate
  modified_base 18: mod_base = OTHER; note = 2'-O-methyladenosine-3'-phosphate
  modified_base 19: mod_base = OTHER; note = 2'-O-methyladenosine-3'-phosphate
  modified_base 20: mod_base = OTHER; note = 2'-O-methyluridine-3'-phosphate
  modified_base 21: mod_base = OTHER; note = 2'-O-methylguanosine-3'-phosphorothioate
  modified_base 22: mod_base = OTHER; note = 2'-O-methylcytidine-3'-phosphorothioate
  modified_base 23: mod_base = OTHER; note = 2'-O-methyladenosine-3'-phosphate
  misc_feature 1: note = RNA
  misc_feature 2: note = DNA
  misc_feature 3..4: note = RNA
  misc_feature 5: note = DNA
  misc_feature 6: note = RNA
  misc_feature 7: note = DNA
  misc_feature 8..11: note = RNA
  misc_feature 12: note = DNA
  misc_feature 13..23: note = RNA
aaatacaaaccgaaggcaatgca

SEQ ID NO: 2599 - DNA, 23 bp, synthetic construct
  source 1..23: mol_type = other DNA
  modified_base 1: mod_base = OTHER; note = 2'-O-methyladenosine-3'-phosphorothioate
  modified_base 2: mod_base = OTHER; note = 2'-deoxyadenosine-3'-phosphorothioate
  modified_base 3: mod_base = OTHER; note = 2'-O-methyladenosine-3'-phosphate
  modified_base 4: mod_base = OTHER; note = 2'-O-methyladenosine-3'-phosphate
  modified_base 6: mod_base = OTHER; note = 2'-O-methyladenosine-3'-phosphate
  modified_base 8: mod_base = OTHER; note = 2'-O-methyladenosine-3'-phosphate
  modified_base 9: mod_base = OTHER; note = 2'-O-methyladenosine-3'-phosphate
  modified_base 10: mod_base = OTHER; note = 2'-O-methyladenosine-3'-phosphate
  modified_base 11: mod_base = OTHER; note = 2'-O-methylcytidine-3'-phosphate
  modified_base 13: mod_base = OTHER; note = 2'-O-methylguanosine-3'-phosphate
  modified_base 14: mod_base = OTHER; note = 2'-fluoroadenosine-3'-phosphate
  modified_base 15: mod_base = OTHER; note = 2'-O-methyladenosine-3'-phosphate
  modified_base 16: mod_base = OTHER; note = 2'-O-methylguanosine-3'-phosphate
  modified_base 17: mod_base = OTHER; note = 2'-O-methylguanosine-3'-phosphate
  modified_base 18: mod_base = OTHER; note = 2'-O-methylcytidine-3'-phosphate
  modified_base 19: mod_base = OTHER; note = 2'-O-methyladenosine-3'-phosphate
  modified_base 20: mod_base = OTHER; note = 2'-O-methyladenosine-3'-phosphate
  modified_base 21: mod_base = OTHER; note = 2'-O-methyluridine-3'-phosphorothioate
  modified_base 22: mod_base = OTHER; note = 2'-O-methylguanosine-3'-phosphorothioate
  modified_base 23: mod_base = OTHER; note = 2'-O-methylcytidine-3'-phosphate
  misc_feature 1: note = RNA
  misc_feature 2: note = DNA
  misc_feature 3..4: note = RNA
  misc_feature 5: note = DNA
  misc_feature 6: note = RNA
  misc_feature 7: note = DNA
  misc_feature 8..11: note = RNA
  misc_feature 12: note = DNA
  misc_feature 13..23: note = RNA
aaaatacaaaccgaaggcaatgc

SEQ ID NO: 2600 - DNA, 23 bp, synthetic construct
  source 1..23: mol_type = other DNA
  modified_base 1: mod_base = OTHER; note = 2'-O-methyladenosine-3'-phosphorothioate
  modified_base 2: mod_base = OTHER; note = 2'-deoxythimidine-3'-phosphorothioate
  modified_base 3: mod_base = OTHER; note = 2'-O-methyladenosine-3'-phosphate
  modified_base 4: mod_base = OTHER; note = 2'-O-methyladenosine-3'-phosphate
  modified_base 6: mod_base = OTHER; note = 2'-O-methyluridine-3'-phosphate
  modified_base 8: mod_base = OTHER; note = 2'-O-methylcytidine-3'-phosphate
  modified_base 9: mod_base = OTHER; note = 2'-O-methyladenosine-3'-phosphate
  modified_base 10: mod_base = OTHER; note = 2'-O-methyladenosine-3'-phosphate
  modified_base 11: mod_base = OTHER; note = 2'-O-methyladenosine-3'-phosphate
  modified_base 13: mod_base = OTHER; note = 2'-O-methylcytidine-3'-phosphate
  modified_base 14: mod_base = OTHER; note = 2'-fluoroguanosine-3'-phosphate
  modified_base 15: mod_base = OTHER; note = 2'-O-methyladenosine-3'-phosphate
  modified_base 16: mod_base = OTHER; note = 2'-O-methyladenosine-3'-phosphate
  modified_base 17: mod_base = OTHER; note = 2'-O-methylguanosine-3'-phosphate
  modified_base 18: mod_base = OTHER; note = 2'-O-methylguanosine-3'-phosphate
  modified_base 19: mod_base = OTHER; note = 2'-O-methylcytidine-3'-phosphate
  modified_base 20: mod_base = OTHER; note = 2'-O-methyladenosine-3'-phosphate
  modified_base 21: mod_base = OTHER; note = 2'-O-methyladenosine-3'-phosphorothioate
  modified_base 22: mod_base = OTHER; note = 2'-O-methyluridine-3'-phosphorothioate
  modified_base 23: mod_base = OTHER; note = 2'-O-methylguanosine-3'-phosphate
  misc_feature 1: note = RNA
  misc_feature 2: note = DNA
  misc_feature 3..4: note = RNA
  misc_feature 5: note = DNA
  misc_feature 6: note = RNA
  misc_feature 7: note = DNA
  misc_feature 8..11: note = RNA
  misc_feature 12: note = DNA
  misc_feature 13..23: note = RNA
ataaatacaaaccgaaggcaatg

SEQ ID NO: 2601 - DNA, 23 bp, synthetic construct
  source 1..23: mol_type = other DNA
  modified_base 1: mod_base = OTHER; note = 2'-O-methyladenosine-3'-phosphorothioate
  modified_base 2: mod_base = OTHER; note = 2'-deoxycytidine-3'-phosphorothioate
  modified_base 3: mod_base = OTHER; note = 2'-O-methyluridine-3'-phosphate
  modified_base 4: mod_base = OTHER; note = 2'-O-methyladenosine-3'-phosphate
  modified_base 6: mod_base = OTHER; note = 2'-O-methyladenosine-3'-phosphate
  modified_base 8: mod_base = OTHER; note = 2'-O-methyladenosine-3'-phosphate
  modified_base 9: mod_base = OTHER; note = 2'-O-methylcytidine-3'-phosphate
  modified_base 10: mod_base = OTHER; note = 2'-O-methyladenosine-3'-phosphate
  modified_base 11: mod_base = OTHER; note = 2'-O-methyladenosine-3'-phosphate
  modified_base 13: mod_base = OTHER; note = 2'-O-methylcytidine-3'-phosphate
  modified_base 14: mod_base = OTHER; note = 2'-fluorocytidine-3'-phosphate
  modified_base 15: mod_base = OTHER; note = 2'-O-methylguanosine-3'-phosphate
  modified_base 16: mod_base = OTHER; note = 2'-O-methyladenosine-3'-phosphate
  modified_base 17: mod_base = OTHER; note = 2'-O-methyladenosine-3'-phosphate
  modified_base 18: mod_base = OTHER; note = 2'-O-methylguanosine-3'-phosphate
  modified_base 19: mod_base = OTHER; note = 2'-O-methylguanosine-3'-phosphate
  modified_base 20: mod_base = OTHER; note = 2'-O-methylcytidine-3'-phosphate
  modified_base 21: mod_base = OTHER; note = 2'-O-methyladenosine-3'-phosphorothioate
  modified_base 22: mod_base = OTHER; note = 2'-O-methyladenosine-3'-phosphorothioate
  modified_base 23: mod_base = OTHER; note = 2'-O-methyluridine-3'-phosphate
  misc_feature 1: note = RNA
  misc_feature 2: note = DNA
  misc_feature 3..4: note = RNA
  misc_feature 5: note = DNA
  misc_feature 6: note = RNA
  misc_feature 7: note = DNA
  misc_feature 8..11: note = RNA
  misc_feature 12: note = DNA
  misc_feature 13..23: note = RNA
actaaatacaaaccgaaggcaat

SEQ ID NO: 2602 - DNA, 23 bp, synthetic construct
  source 1..23: mol_type = other DNA
  modified_base 1: mod_base = OTHER; note = 2'-O-methyladenosine-3'-phosphorothioate
  modified_base 2: mod_base = OTHER; note = 2'-deoxyadenosine-3'-phosphorothioate
  modified_base 3: mod_base = OTHER; note = 2'-O-methylcytidine-3'-phosphate
  modified_base 4: mod_base = OTHER; note = 2'-O-methyluridine-3'-phosphate
  modified_base 6: mod_base = OTHER; note = 2'-O-methyladenosine-3'-phosphate
  modified_base 8: mod_base = OTHER; note = 2'-O-methyluridine-3'-phosphate
  modified_base 9: mod_base = OTHER; note = 2'-O-methyladenosine-3'-phosphate
  modified_base 10: mod_base = OTHER; note = 2'-O-methylcytidine-3'-phosphate
  modified_base 11: mod_base = OTHER; note = 2'-O-methyladenosine-3'-phosphate
  modified_base 13: mod_base = OTHER; note = 2'-O-methyladenosine-3'-phosphate
  modified_base 14: mod_base = OTHER; note = 2'-fluorocytidine-3'-phosphate
  modified_base 15: mod_base = OTHER; note = 2'-O-methylcytidine-3'-phosphate
  modified_base 16: mod_base = OTHER; note = 2'-O-methylguanosine-3'-phosphate
  modified_base 17: mod_base = OTHER; note = 2'-O-methyladenosine-3'-phosphate
  modified_base 18: mod_base = OTHER; note = 2'-O-methyladenosine-3'-phosphate
  modified_base 19: mod_base = OTHER; note = 2'-O-methylguanosine-3'-phosphate
  modified_base 20: mod_base = OTHER; note = 2'-O-methylguanosine-3'-phosphate
  modified_base 21: mod_base = OTHER; note = 2'-O-methylcytidine-3'-phosphorothioate
  modified_base 22: mod_base = OTHER; note = 2'-O-methyladenosine-3'-phosphorothioate
  modified_base 23: mod_base = OTHER; note = 2'-O-methyladenosine-3'-phosphate
  misc_feature 1: note = RNA
  misc_feature 2: note = DNA
  misc_feature 3..4: note = RNA
  misc_feature 5: note = DNA
  misc_feature 6: note = RNA
  misc_feature 7: note = DNA
  misc_feature 8..11: note = RNA
  misc_feature 12: note = DNA
  misc_feature 13..23: note = RNA
aactaaatacaaaccgaaggcaa

SEQ ID NO: 2603 - DNA, 23 bp, synthetic construct
  source 1..23: mol_type = other DNA
  modified_base 1: mod_base = OTHER; note = 2'-O-methyladenosine-3'-phosphorothioate
  modified_base 2: mod_base = OTHER; note = 2'-deoxycytidine-3'-phosphorothioate
  modified_base 3: mod_base = OTHER; note = 2'-O-methyladenosine-3'-phosphate
  modified_base 4: mod_base = OTHER; note = 2'-O-methylcytidine-3'-phosphate
  modified_base 6: mod_base = OTHER; note = 2'-O-methyladenosine-3'-phosphate
  modified_base 8: mod_base = OTHER; note = 2'-O-methyladenosine-3'-phosphate
  modified_base 9: mod_base = OTHER; note = 2'-O-methyluridine-3'-phosphate
  modified_base 10: mod_base = OTHER; note = 2'-O-methyladenosine-3'-phosphate
  modified_base 11: mod_base = OTHER; note = 2'-O-methylcytidine-3'-phosphate
  modified_base 13: mod_base = OTHER; note = 2'-O-methyladenosine-3'-phosphate
  modified_base 14: mod_base = OTHER; note = 2'-fluoroadenosine-3'-phosphate
  modified_base 15: mod_base = OTHER; note = 2'-O-methylcytidine-3'-phosphate
  modified_base 16: mod_base = OTHER; note = 2'-O-methylcytidine-3'-phosphate
  modified_base 17: mod_base = OTHER; note = 2'-O-methylguanosine-3'-phosphate
  modified_base 18: mod_base = OTHER; note = 2'-O-methyladenosine-3'-phosphate
  modified_base 19: mod_base = OTHER; note = 2'-O-methyladenosine-3'-phosphate
  modified_base 20: mod_base = OTHER; note = 2'-O-methylguanosine-3'-phosphate
  modified_base 21: mod_base = OTHER; note = 2'-O-methylguanosine-3'-phosphorothioate
  modified_base 22: mod_base = OTHER; note = 2'-O-methylcytidine-3'-phosphorothioate
  modified_base 23: mod_base = OTHER; note = 2'-O-methyladenosine-3'-phosphate
  misc_feature 1: note = RNA
  misc_feature 2: note = DNA
  misc_feature 3..4: note = RNA
  misc_feature 5: note = DNA
  misc_feature 6: note = RNA
  misc_feature 7: note = DNA
  misc_feature 8..11: note = RNA
  misc_feature 12: note = DNA
  misc_feature 13..23: note = RNA
acactaaatacaaaccgaaggca

SEQ ID NO: 2604 - DNA, 23 bp, synthetic construct
  source 1..23: mol_type = other DNA
  modified_base 1: mod_base = OTHER; note = 2'-O-methyladenosine-3'-phosphorothioate
  modified_base 2: mod_base = OTHER; note = 2'-deoxyadenosine-3'-phosphorothioate
  modified_base 3: mod_base = OTHER; note = 2'-O-methylcytidine-3'-phosphate
  modified_base 4: mod_base = OTHER; note = 2'-O-methyladenosine-3'-phosphate
  modified_base 6: mod_base = OTHER; note = 2'-O-methyluridine-3'-phosphate
  modified_base 8: mod_base = OTHER; note = 2'-O-methyladenosine-3'-phosphate
  modified_base 9: mod_base = OTHER; note = 2'-O-methyladenosine-3'-phosphate
  modified_base 10: mod_base = OTHER; note = 2'-O-methyluridine-3'-phosphate
  modified_base 11: mod_base = OTHER; note = 2'-O-methyladenosine-3'-phosphate
  modified_base 13: mod_base = OTHER; note = 2'-O-methyladenosine-3'-phosphate
  modified_base 14: mod_base = OTHER; note = 2'-fluoroadenosine-3'-phosphate
  modified_base 15: mod_base = OTHER; note = 2'-O-methyladenosine-3'-phosphate
  modified_base 16: mod_base = OTHER; note = 2'-O-methylcytidine-3'-phosphate
  modified_base 17: mod_base = OTHER; note = 2'-O-methylcytidine-3'-phosphate
  modified_base 18: mod_base = OTHER; note = 2'-O-methylguanosine-3'-phosphate
  modified_base 19: mod_base = OTHER; note = 2'-O-methyladenosine-3'-phosphate
  modified_base 20: mod_base = OTHER; note = 2'-O-methyladenosine-3'-phosphate
  modified_base 21: mod_base = OTHER; note = 2'-O-methylguanosine-3'-phosphorothioate
  modified_base 22: mod_base = OTHER; note = 2'-O-methylguanosine-3'-phosphorothioate
  modified_base 23: mod_base = OTHER; note = 2'-O-methylcytidine-3'-phosphate
  misc_feature 1: note = RNA
  misc_feature 2: note = DNA
  misc_feature 3..4: note = RNA
  misc_feature 5: note = DNA
  misc_feature 6: note = RNA
  misc_feature 7: note = DNA
  misc_feature 8..11: note = RNA
  misc_feature 12: note = DNA
  misc_feature 13..23: note = RNA
aacactaaatacaaaccgaaggc

SEQ ID NO: 2605 - DNA, 23 bp, synthetic construct
  source 1..23: mol_type = other DNA
  modified_base 1: mod_base = OTHER; note = 2'-O-methyladenosine-3'-phosphorothioate
  modified_base 2: mod_base = OTHER; note = 2'-deoxyguanosine-3'-phosphorothioate
  modified_base 3: mod_base = OTHER; note = 2'-O-methyladenosine-3'-phosphate
  modified_base 4: mod_base = OTHER; note = 2'-O-methylcytidine-3'-phosphate
  modified_base 6: mod_base = OTHER; note = 2'-O-methylcytidine-3'-phosphate
  modified_base 8: mod_base = OTHER; note = 2'-O-methyladenosine-3'-phosphate
  modified_base 9: mod_base = OTHER; note = 2'-O-methyladenosine-3'-phosphate
  modified_base 10: mod_base = OTHER; note = 2'-O-methyladenosine-3'-phosphate
  modified_base 11: mod_base = OTHER; note = 2'-O-methyluridine-3'-phosphate
  modified_base 13: mod_base = OTHER; note = 2'-O-methylcytidine-3'-phosphate
  modified_base 14: mod_base = OTHER; note = 2'-fluoroadenosine-3'-phosphate
  modified_base 15: mod_base = OTHER; note = 2'-O-methyladenosine-3'-phosphate
  modified_base 16: mod_base = OTHER; note = 2'-O-methyladenosine-3'-phosphate
  modified_base 17: mod_base = OTHER; note = 2'-O-methylcytidine-3'-phosphate
  modified_base 18: mod_base = OTHER; note = 2'-O-methylcytidine-3'-phosphate
  modified_base 19: mod_base = OTHER; note = 2'-O-methylguanosine-3'-phosphate
  modified_base 20: mod_base = OTHER; note = 2'-O-methyladenosine-3'-phosphate
  modified_base 21: mod_base = OTHER; note = 2'-O-methyladenosine-3'-phosphorothioate
  modified_base 22: mod_base = OTHER; note = 2'-O-methylguanosine-3'-phosphorothioate
  modified_base 23: mod_base = OTHER; note = 2'-O-methylguanosine-3'-phosphate
  misc_feature 1: note = RNA
  misc_feature 2: note = DNA
  misc_feature 3..4: note = RNA
  misc_feature 5: note = DNA
  misc_feature 6: note = RNA
  misc_feature 7: note = DNA
  misc_feature 8..11: note = RNA
  misc_feature 12: note = DNA
  misc_feature 13..23: note = RNA
agacactaaatacaaaccgaagg

SEQ ID NO: 2606 - DNA, 23 bp, synthetic construct
  source 1..23: mol_type = other DNA
  modified_base 1: mod_base = OTHER; note = 2'-O-methyladenosine-3'-phosphorothioate
  modified_base 2: mod_base = OTHER; note = 2'-deoxyadenosine-3'-phosphorothioate
  modified_base 3: mod_base = OTHER; note = 2'-O-methylguanosine-3'-phosphate
  modified_base 4: mod_base = OTHER; note = 2'-O-methyladenosine-3'-phosphate
  modified_base 6: mod_base = OTHER; note = 2'-O-methyladenosine-3'-phosphate
  modified_base 8: mod_base = OTHER; note = 2'-O-methyluridine-3'-phosphate
  modified_base 9: mod_base = OTHER; note = 2'-O-methyladenosine-3'-phosphate
  modified_base 10: mod_base = OTHER; note = 2'-O-methyladenosine-3'-phosphate
  modified_base 11: mod_base = OTHER; note = 2'-O-methyladenosine-3'-phosphate
  modified_base 13: mod_base = OTHER; note = 2'-O-methyladenosine-3'-phosphate
  modified_base 14: mod_base = OTHER; note = 2'-fluorocytidine-3'-phosphate
  modified_base 15: mod_base = OTHER; note = 2'-O-methyladenosine-3'-phosphate
  modified_base 16: mod_base = OTHER; note = 2'-O-methyladenosine-3'-phosphate
  modified_base 17: mod_base = OTHER; note = 2'-O-methyladenosine-3'-phosphate
  modified_base 18: mod_base = OTHER; note = 2'-O-methylcytidine-3'-phosphate
  modified_base 19: mod_base = OTHER; note = 2'-O-methylcytidine-3'-phosphate
  modified_base 20: mod_base = OTHER; note = 2'-O-methylguanosine-3'-phosphate
  modified_base 21: mod_base = OTHER; note = 2'-O-methyladenosine-3'-phosphorothioate
  modified_base 22: mod_base = OTHER; note = 2'-O-methyladenosine-3'-phosphorothioate
  modified_base 23: mod_base = OTHER; note = 2'-O-methylguanosine-3'-phosphate
  misc_feature 1: note = RNA
  misc_feature 2: note = DNA
  misc_feature 3..4: note = RNA
  misc_feature 5: note = DNA
  misc_feature 6: note = RNA
  misc_feature 7: note = DNA
  misc_feature 8..11: note = RNA
  misc_feature 12: note = DNA
  misc_feature 13..23: note = RNA
aagacactaaatacaaaccgaag

SEQ ID NO: 2607 - DNA, 23 bp, synthetic construct
  source 1..23: mol_type = other DNA
  modified_base 1: mod_base = OTHER; note = 2'-O-methyladenosine-3'-phosphorothioate
  modified_base 2: mod_base = OTHER; note = 2'-deoxyadenosine-3'-phosphorothioate
  modified_base 3: mod_base = OTHER; note = 2'-O-methyladenosine-3'-phosphate
  modified_base 4: mod_base = OTHER; note = 2'-O-methylguanosine-3'-phosphate
  modified_base 6: mod_base = OTHER; note = 2'-O-methylcytidine-3'-phosphate
  modified_base 8: mod_base = OTHER; note = 2'-O-methylcytidine-3'-phosphate
  modified_base 9: mod_base = OTHER; note = 2'-O-methyluridine-3'-phosphate
  modified_base 10: mod_base = OTHER; note = 2'-O-methyladenosine-3'-phosphate
  modified_base 11: mod_base = OTHER; note = 2'-O-methyladenosine-3'-phosphate
  modified_base 13: mod_base = OTHER; note = 2'-O-methyluridine-3'-phosphate
  modified_base 14: mod_base = OTHER; note = 2'-fluoroadenosine-3'-phosphate
  modified_base 15: mod_base = OTHER; note = 2'-O-methylcytidine-3'-phosphate
  modified_base 16: mod_base = OTHER; note = 2'-O-methyladenosine-3'-phosphate
  modified_base 17: mod_base = OTHER; note = 2'-O-methyladenosine-3'-phosphate
  modified_base 18: mod_base = OTHER; note = 2'-O-methyladenosine-3'-phosphate
  modified_base 19: mod_base = OTHER; note = 2'-O-methylcytidine-3'-phosphate
  modified_base 20: mod_base = OTHER; note = 2'-O-methylcytidine-3'-phosphate
  modified_base 21: mod_base = OTHER; note = 2'-O-methylguanosine-3'-phosphorothioate
  modified_base 22: mod_base = OTHER; note = 2'-O-methyladenosine-3'-phosphorothioate
  modified_base 23: mod_base = OTHER; note = 2'-O-methyladenosine-3'-phosphate
  misc_feature 1: note = RNA
  misc_feature 2: note = DNA
  misc_feature 3..4: note = RNA
  misc_feature 5: note = DNA
  misc_feature 6: note = RNA
  misc_feature 7: note = DNA
  misc_feature 8..11: note = RNA
  misc_feature 12: note = DNA
  misc_feature 13..23: note = RNA
aaagacactaaatacaaaccgaa

SEQ ID NO: 2608 - DNA, 23 bp, synthetic construct
  source 1..23: mol_type = other DNA
  modified_base 1: mod_base = OTHER; note = 2'-O-methyladenosine-3'-phosphorothioate
  modified_base 2: mod_base = OTHER; note = 2'-deoxycytidine-3'-phosphorothioate
  modified_base 3: mod_base = OTHER; note = 2'-O-methyladenosine-3'-phosphate
  modified_base 4: mod_base = OTHER; note = 2'-O-methyladenosine-3'-phosphate
  modified_base 6: mod_base = OTHER; note = 2'-O-methyladenosine-3'-phosphate
  modified_base 8: mod_base = OTHER; note = 2'-O-methyladenosine-3'-phosphate
  modified_base 9: mod_base = OTHER; note = 2'-O-methylcytidine-3'-phosphate
  modified_base 10: mod_base = OTHER; note = 2'-O-methyluridine-3'-phosphate
  modified_base 11: mod_base = OTHER; note = 2'-O-methyladenosine-3'-phosphate
  modified_base 13: mod_base = OTHER; note = 2'-O-methyladenosine-3'-phosphate
  modified_base 14: mod_base = OTHER; note = 2'-fluorouridine-3'-phosphate
  modified_base 15: mod_base = OTHER; note = 2'-O-methyladenosine-3'-phosphate
  modified_base 16: mod_base = OTHER; note = 2'-O-methylcytidine-3'-phosphate
  modified_base 17: mod_base = OTHER; note = 2'-O-methyladenosine-3'-phosphate
  modified_base 18: mod_base = OTHER; note = 2'-O-methyladenosine-3'-phosphate
  modified_base 19: mod_base = OTHER; note = 2'-O-methyladenosine-3'-phosphate
  modified_base 20: mod_base = OTHER; note = 2'-O-methylcytidine-3'-phosphate
  modified_base 21: mod_base = OTHER; note = 2'-O-methylcytidine-3'-phosphorothioate
  modified_base 22: mod_base = OTHER; note = 2'-O-methylguanosine-3'-phosphorothioate
  modified_base 23: mod_base = OTHER; note = 2'-O-methyladenosine-3'-phosphate
  misc_feature 1: note = RNA
  misc_feature 2: note = DNA
  misc_feature 3..4: note = RNA
  misc_feature 5: note = DNA
  misc_feature 6: note = RNA
  misc_feature 7: note = DNA
  misc_feature 8..11: note = RNA
  misc_feature 12: note = DNA
  misc_feature 13..23: note = RNA
acaagacactaaatacaaaccga

SEQ ID NO: 2609 - DNA, 23 bp, synthetic construct
  source 1..23: mol_type = other DNA
  modified_base 1: mod_base = OTHER; note = 2'-O-methyladenosine-3'-phosphorothioate
  modified_base 2: mod_base = OTHER; note = 2'-deoxythimidine-3'-phosphorothioate
  modified_base 3: mod_base = OTHER; note = 2'-O-methylcytidine-3'-phosphate
  modified_base 4: mod_base = OTHER; note = 2'-O-methyladenosine-3'-phosphate
  modified_base 6: mod_base = OTHER; note = 2'-O-methylguanosine-3'-phosphate
  modified_base 8: mod_base = OTHER; note = 2'-O-methylcytidine-3'-phosphate
  modified_base 9: mod_base = OTHER; note = 2'-O-methyladenosine-3'-phosphate
  modified_base 10: mod_base = OTHER; note = 2'-O-methylcytidine-3'-phosphate
  modified_base 11: mod_base = OTHER; note = 2'-O-methyluridine-3'-phosphate
  modified_base 13: mod_base = OTHER; note = 2'-O-methyladenosine-3'-phosphate
  modified_base 14: mod_base = OTHER; note = 2'-fluoroadenosine-3'-phosphate
  modified_base 15: mod_base = OTHER; note = 2'-O-methyluridine-3'-phosphate
  modified_base 16: mod_base = OTHER; note = 2'-O-methyladenosine-3'-phosphate
  modified_base 17: mod_base = OTHER; note = 2'-O-methylcytidine-3'-phosphate
  modified_base 18: mod_base = OTHER; note = 2'-O-methyladenosine-3'-phosphate
  modified_base 19: mod_base = OTHER; note = 2'-O-methyladenosine-3'-phosphate
  modified_base 20: mod_base = OTHER; note = 2'-O-methyladenosine-3'-phosphate
  modified_base 21: mod_base = OTHER; note = 2'-O-methylcytidine-3'-phosphorothioate
  modified_base 22: mod_base = OTHER; note = 2'-O-methylcytidine-3'-phosphorothioate
  modified_base 23: mod_base = OTHER; note = 2'-O-methylguanosine-3'-phosphate
  misc_feature 1: note = RNA
  misc_feature 2: note = DNA
  misc_feature 3..4: note = RNA
  misc_feature 5: note = DNA
  misc_feature 6: note = RNA
  misc_feature 7: note = DNA
  misc_feature 8..11: note = RNA
  misc_feature 12: note = DNA
  misc_feature 13..23: note = RNA
atcaagacactaaatacaaaccg

SEQ ID NO: 2610 - DNA, 23 bp, synthetic construct
  source 1..23: mol_type = other DNA
  modified_base 1: mod_base = OTHER; note = 2'-O-methyladenosine-3'-phosphorothioate
  modified_base 2: mod_base = OTHER; note = 2'-deoxythimidine-3'-phosphorothioate
  modified_base 3: mod_base = OTHER; note = 2'-O-methyluridine-3'-phosphate
  modified_base 4: mod_base = OTHER; note = 2'-O-methylcytidine-3'-phosphate
  modified_base 6: mod_base = OTHER; note = 2'-O-methyladenosine-3'-phosphate
  modified_base 8: mod_base = OTHER; note = 2'-O-methyladenosine-3'-phosphate
  modified_base 9: mod_base = OTHER; note = 2'-O-methylcytidine-3'-phosphate
  modified_base 10: mod_base = OTHER; note = 2'-O-methyladenosine-3'-phosphate
  modified_base 11: mod_base = OTHER; note = 2'-O-methylcytidine-3'-phosphate
  modified_base 13: mod_base = OTHER; note = 2'-O-methyladenosine-3'-phosphate
  modified_base 14: mod_base = OTHER; note = 2'-fluoroadenosine-3'-phosphate
  modified_base 15: mod_base = OTHER; note = 2'-O-methyladenosine-3'-phosphate
  modified_base 16: mod_base = OTHER; note = 2'-O-methyluridine-3'-phosphate
  modified_base 17: mod_base = OTHER; note = 2'-O-methyladenosine-3'-phosphate
  modified_base 18: mod_base = OTHER; note = 2'-O-methylcytidine-3'-phosphate
  modified_base 19: mod_base = OTHER; note = 2'-O-methyladenosine-3'-phosphate
  modified_base 20: mod_base = OTHER; note = 2'-O-methyladenosine-3'-phosphate
  modified_base 21: mod_base = OTHER; note = 2'-O-methyladenosine-3'-phosphorothioate
  modified_base 22: mod_base = OTHER; note = 2'-O-methylcytidine-3'-phosphorothioate
  modified_base 23: mod_base = OTHER; note = 2'-O-methylcytidine-3'-phosphate
  misc_feature 1: note = RNA
  misc_feature 2: note = DNA
  misc_feature 3..4: note = RNA
  misc_feature 5: note = DNA
  misc_feature 6: note = RNA
  misc_feature 7: note = DNA
  misc_feature 8..11: note = RNA
  misc_feature 12: note = DNA
  misc_feature 13..23: note = RNA
attcaagacactaaatacaaacc

SEQ ID NO: 2611 - DNA, 23 bp, synthetic construct
  source 1..23: mol_type = other DNA
  modified_base 1: mod_base = OTHER; note = 2'-O-methyladenosine-3'-phosphorothioate
  modified_base 2: mod_base = OTHER; note = 2'-deoxyadenosine-3'-phosphorothioate
  modified_base 3: mod_base = OTHER; note = 2'-O-methyluridine-3'-phosphate
  modified_base 4: mod_base = OTHER; note = 2'-O-methyluridine-3'-phosphate
  modified_base 6: mod_base = OTHER; note = 2'-O-methyladenosine-3'-phosphate
  modified_base 8: mod_base = OTHER; note = 2'-O-methylguanosine-3'-phosphate
  modified_base 9: mod_base = OTHER; note = 2'-O-methyladenosine-3'-phosphate
  modified_base 10: mod_base = OTHER; note = 2'-O-methylcytidine-3'-phosphate
  modified_base 11: mod_base = OTHER; note = 2'-O-methyladenosine-3'-phosphate
  modified_base 13: mod_base = OTHER; note = 2'-O-methyluridine-3'-phosphate
  modified_base 14: mod_base = OTHER; note = 2'-fluoroadenosine-3'-phosphate
  modified_base 15: mod_base = OTHER; note = 2'-O-methyladenosine-3'-phosphate
  modified_base 16: mod_base = OTHER; note = 2'-O-methyladenosine-3'-phosphate
  modified_base 17: mod_base = OTHER; note = 2'-O-methyluridine-3'-phosphate
  modified_base 18: mod_base = OTHER; note = 2'-O-methyladenosine-3'-phosphate
  modified_base 19: mod_base = OTHER; note = 2'-O-methylcytidine-3'-phosphate
  modified_base 20: mod_base = OTHER; note = 2'-O-methyladenosine-3'-phosphate
  modified_base 21: mod_base = OTHER; note = 2'-O-methyladenosine-3'-phosphorothioate
  modified_base 22: mod_base = OTHER; note = 2'-O-methyladenosine-3'-phosphorothioate
  modified_base 23: mod_base = OTHER; note = 2'-O-methylcytidine-3'-phosphate
  misc_feature 1: note = RNA
  misc_feature 2: note = DNA
  misc_feature 3..4: note = RNA
  misc_feature 5: note = DNA
  misc_feature 6: note = RNA
  misc_feature 7: note = DNA
  misc_feature 8..11: note = RNA
  misc_feature 12: note = DNA
  misc_feature 13..23: note = RNA
aattcaagacactaaatacaaac

SEQ ID NO: 2612 - DNA, 23 bp, synthetic construct
  source 1..23: mol_type = other DNA
  modified_base 1: mod_base = OTHER; note = 2'-O-methyladenosine-3'-phosphorothioate
  modified_base 2: mod_base = OTHER; note = 2'-deoxycytidine-3'-phosphorothioate
  modified_base 3: mod_base = OTHER; note = 2'-O-methyladenosine-3'-phosphate
  modified_base 4: mod_base = OTHER; note = 2'-O-methyluridine-3'-phosphate
  modified_base 6: mod_base = OTHER; note = 2'-O-methylcytidine-3'-phosphate
  modified_base 8: mod_base = OTHER; note = 2'-O-methyladenosine-3'-phosphate
  modified_base 9: mod_base = OTHER; note = 2'-O-methylguanosine-3'-phosphate
  modified_base 10: mod_base = OTHER; note = 2'-O-methyladenosine-3'-phosphate
  modified_base 11: mod_base = OTHER; note = 2'-O-methylcytidine-3'-phosphate
  modified_base 13: mod_base = OTHER; note = 2'-O-methylcytidine-3'-phosphate
  modified_base 14: mod_base = OTHER; note = 2'-fluorouridine-3'-phosphate
  modified_base 15: mod_base = OTHER; note = 2'-O-methyladenosine-3'-phosphate
  modified_base 16: mod_base = OTHER; note = 2'-O-methyladenosine-3'-phosphate
  modified_base 17: mod_base = OTHER; note = 2'-O-methyladenosine-3'-phosphate
  modified_base 18: mod_base = OTHER; note = 2'-O-methyluridine-3'-phosphate
  modified_base 19: mod_base = OTHER; note = 2'-O-methyladenosine-3'-phosphate
  modified_base 20: mod_base = OTHER; note = 2'-O-methylcytidine-3'-phosphate
  modified_base 21: mod_base = OTHER; note = 2'-O-methyladenosine-3'-phosphorothioate
  modified_base 22: mod_base = OTHER; note = 2'-O-methyladenosine-3'-phosphorothioate
  modified_base 23: mod_base = OTHER; note = 2'-O-methyladenosine-3'-phosphate
  misc_feature 1: note = RNA
  misc_feature 2: note = DNA
  misc_feature 3..4: note = RNA
  misc_feature 5: note = DNA
  misc_feature 6: note = RNA
  misc_feature 7: note = DNA
  misc_feature 8..11: note = RNA
  misc_feature 12: note = DNA
  misc_feature 13..23: note = RNA
acattcaagacactaaatacaaa

SEQ ID NO: 2613 - DNA, 23 bp, synthetic construct
  source 1..23: mol_type = other DNA
  modified_base 1: mod_base = OTHER; note = 2'-O-methyladenosine-3'-phosphorothioate
  modified_base 2: mod_base = OTHER; note = 2'-deoxyadenosine-3'-phosphorothioate
  modified_base 3: mod_base = OTHER; note = 2'-O-methylcytidine-3'-phosphate
  modified_base 4: mod_base = OTHER; note = 2'-O-methyladenosine-3'-phosphate
  modified_base 6: mod_base = OTHER; note = 2'-O-methyluridine-3'-phosphate
  modified_base 8: mod_base = OTHER; note = 2'-O-methyladenosine-3'-phosphate
  modified_base 9: mod_base = OTHER; note = 2'-O-methyladenosine-3'-phosphate
  modified_base 10: mod_base = OTHER; note = 2'-O-methylguanosine-3'-phosphate
  modified_base 11: mod_base = OTHER; note = 2'-O-methyladenosine-3'-phosphate
  modified_base 13: mod_base = OTHER; note = 2'-O-methyladenosine-3'-phosphate
  modified_base 14: mod_base = OTHER; note = 2'-fluorocytidine-3'-phosphate
  modified_base 15: mod_base = OTHER; note = 2'-O-methyluridine-3'-phosphate
  modified_base 16: mod_base = OTHER; note = 2'-O-methyladenosine-3'-phosphate
  modified_base 17: mod_base = OTHER; note = 2'-O-methyladenosine-3'-phosphate
  modified_base 18: mod_base = OTHER; note = 2'-O-methyladenosine-3'-phosphate
  modified_base 19: mod_base = OTHER; note = 2'-O-methyluridine-3'-phosphate
  modified_base 20: mod_base = OTHER; note = 2'-O-methyladenosine-3'-phosphate
  modified_base 21: mod_base = OTHER; note = 2'-O-methylcytidine-3'-phosphorothioate
  modified_base 22: mod_base = OTHER; note = 2'-O-methyladenosine-3'-phosphorothioate
  modified_base 23: mod_base = OTHER; note = 2'-O-methyladenosine-3'-phosphate
  misc_feature 1: note = RNA
  misc_feature 2: note = DNA
  misc_feature 3..4: note = RNA
  misc_feature 5: note = DNA
  misc_feature 6: note = RNA
  misc_feature 7: note = DNA
  misc_feature 8..11: note = RNA
  misc_feature 12: note = DNA
  misc_feature 13..23: note = RNA
aacattcaagacactaaatacaa

SEQ ID NO: 2614 - DNA, 23 bp, synthetic construct
  source 1..23: mol_type = other DNA
  modified_base 1: mod_base = OTHER; note = 2'-O-methyladenosine-3'-phosphorothioate
  modified_base 2: mod_base = OTHER; note = 2'-deoxythimidine-3'-phosphorothioate
  modified_base 3: mod_base = OTHER; note = 2'-O-methyladenosine-3'-phosphate
  modified_base 4: mod_base = OTHER; note = 2'-O-methylcytidine-3'-phosphate
  modified_base 6: mod_base = OTHER; note = 2'-O-methyluridine-3'-phosphate
  modified_base 8: mod_base = OTHER; note = 2'-O-methylcytidine-3'-phosphate
  modified_base 9: mod_base = OTHER; note = 2'-O-methyladenosine-3'-phosphate
  modified_base 10: mod_base = OTHER; note = 2'-O-methyladenosine-3'-phosphate
  modified_base 11: mod_base = OTHER; note = 2'-O-methylguanosine-3'-phosphate
  modified_base 13: mod_base = OTHER; note = 2'-O-methylcytidine-3'-phosphate
  modified_base 14: mod_base = OTHER; note = 2'-fluoroadenosine-3'-phosphate
  modified_base 15: mod_base = OTHER; note = 2'-O-methylcytidine-3'-phosphate
  modified_base 16: mod_base = OTHER; note = 2'-O-methyluridine-3'-phosphate
  modified_base 17: mod_base = OTHER; note = 2'-O-methyladenosine-3'-phosphate
  modified_base 18: mod_base = OTHER; note = 2'-O-methyladenosine-3'-phosphate
  modified_base 19: mod_base = OTHER; note = 2'-O-methyladenosine-3'-phosphate
  modified_base 20: mod_base = OTHER; note = 2'-O-methyluridine-3'-phosphate
  modified_base 21: mod_base = OTHER; note = 2'-O-methyladenosine-3'-phosphorothioate
  modified_base 22: mod_base = OTHER; note = 2'-O-methylcytidine-3'-phosphorothioate
  modified_base 23: mod_base = OTHER; note = 2'-O-methyladenosine-3'-phosphate
  misc_feature 1: note = RNA
  misc_feature 2: note = DNA
  misc_feature 3..4: note = RNA
  misc_feature 5: note = DNA
  misc_feature 6: note = RNA
  misc_feature 7: note = DNA
  misc_feature 8..11: note = RNA
  misc_feature 12: note = DNA
  misc_feature 13..23: note = RNA
atacattcaagacactaaataca

SEQ ID NO: 2615 - DNA, 23 bp, synthetic construct
  source 1..23: mol_type = other DNA
  modified_base 1: mod_base = OTHER; note = 2'-O-methyladenosine-3'-phosphorothioate
  modified_base 2: mod_base = OTHER; note = 2'-deoxythimidine-3'-phosphorothioate
  modified_base 3: mod_base = OTHER; note = 2'-O-methyluridine-3'-phosphate
  modified_base 4: mod_base = OTHER; note = 2'-O-methyladenosine-3'-phosphate
  modified_base 6: mod_base = OTHER; note = 2'-O-methyladenosine-3'-phosphate
  modified_base 8: mod_base = OTHER; note = 2'-O-methyluridine-3'-phosphate
  modified_base 9: mod_base = OTHER; note = 2'-O-methylcytidine-3'-phosphate
  modified_base 10: mod_base = OTHER; note = 2'-O-methyladenosine-3'-phosphate
  modified_base 11: mod_base = OTHER; note = 2'-O-methyladenosine-3'-phosphate
  modified_base 13: mod_base = OTHER; note = 2'-O-methyladenosine-3'-phosphate
  modified_base 14: mod_base = OTHER; note = 2'-fluorocytidine-3'-phosphate
  modified_base 15: mod_base = OTHER; note = 2'-O-methyladenosine-3'-phosphate
  modified_base 16: mod_base = OTHER; note = 2'-O-methylcytidine-3'-phosphate
  modified_base 17: mod_base = OTHER; note = 2'-O-methyluridine-3'-phosphate
  modified_base 18: mod_base = OTHER; note = 2'-O-methyladenosine-3'-phosphate
  modified_base 19: mod_base = OTHER; note = 2'-O-methyladenosine-3'-phosphate
  modified_base 20: mod_base = OTHER; note = 2'-O-methyladenosine-3'-phosphate
  modified_base 21: mod_base = OTHER; note = 2'-O-methyluridine-3'-phosphorothioate
  modified_base 22: mod_base = OTHER; note = 2'-O-methyladenosine-3'-phosphorothioate
  modified_base 23: mod_base = OTHER; note = 2'-O-methylcytidine-3'-phosphate
  misc_feature 1: note = RNA
  misc_feature 2: note = DNA
  misc_feature 3..4: note = RNA
  misc_feature 5: note = DNA
  misc_feature 6: note = RNA
  misc_feature 7: note = DNA
  misc_feature 8..11: note = RNA
  misc_feature 12: note = DNA
  misc_feature 13..23: note = RNA
attacattcaagacactaaatac

SEQ ID NO: 2616 - DNA, 23 bp, synthetic construct
  source 1..23: mol_type = other DNA
  modified_base 1: mod_base = OTHER; note = 2'-O-methyladenosine-3'-phosphorothioate
  modified_base 2: mod_base = OTHER; note = 2'-deoxycytidine-3'-phosphorothioate
  modified_base 3: mod_base = OTHER; note = 2'-O-methyluridine-3'-phosphate
  modified_base 4: mod_base = OTHER; note = 2'-O-methyluridine-3'-phosphate
  modified_base 6: mod_base = OTHER; note = 2'-O-methylcytidine-3'-phosphate
  modified_base 8: mod_base = OTHER; note = 2'-O-methyluridine-3'-phosphate
  modified_base 9: mod_base = OTHER; note = 2'-O-methyluridine-3'-phosphate
  modified_base 10: mod_base = OTHER; note = 2'-O-methylcytidine-3'-phosphate
  modified_base 11: mod_base = OTHER; note = 2'-O-methyladenosine-3'-phosphate
  modified_base 13: mod_base = OTHER; note = 2'-O-methylguanosine-3'-phosphate
  modified_base 14: mod_base = OTHER; note = 2'-fluoroadenosine-3'-phosphate
  modified_base 15: mod_base = OTHER; note = 2'-O-methylcytidine-3'-phosphate
  modified_base 16: mod_base = OTHER; note = 2'-O-methyladenosine-3'-phosphate
  modified_base 17: mod_base = OTHER; note = 2'-O-methylcytidine-3'-phosphate
  modified_base 18: mod_base = OTHER; note = 2'-O-methyluridine-3'-phosphate
  modified_base 19: mod_base = OTHER; note = 2'-O-methyladenosine-3'-phosphate
  modified_base 20: mod_base = OTHER; note = 2'-O-methyladenosine-3'-phosphate
  modified_base 21: mod_base = OTHER; note = 2'-O-methyladenosine-3'-phosphorothioate
  modified_base 22: mod_base = OTHER; note = 2'-O-methyluridine-3'-phosphorothioate
  modified_base 23: mod_base = OTHER; note = 2'-O-methyladenosine-3'-phosphate
  misc_feature 1: note = RNA
  misc_feature 2: note = DNA
  misc_feature 3..4: note = RNA
  misc_feature 5: note = DNA
  misc_feature 6: note = RNA
  misc_feature 7: note = DNA
  misc_feature 8..11: note = RNA
  misc_feature 12: note = DNA
  misc_feature 13..23: note = RNA
acttacattcaagacactaaata

SEQ ID NO: 2617 - DNA, 23 bp, synthetic construct
  source 1..23: mol_type = other DNA
  modified_base 1: mod_base = OTHER; note = 2'-O-methyladenosine-3'-phosphorothioate
  modified_base 2: mod_base = OTHER; note = 2'-deoxythimidine-3'-phosphorothioate
  modified_base 3: mod_base = OTHER; note = 2'-O-methylcytidine-3'-phosphate
  modified_base 4: mod_base = OTHER; note = 2'-O-methyluridine-3'-phosphate
  modified_base 6: mod_base = OTHER; note = 2'-O-methyladenosine-3'-phosphate
  modified_base 8: mod_base = OTHER; note = 2'-O-methyladenosine-3'-phosphate
  modified_base 9: mod_base = OTHER; note = 2'-O-methyluridine-3'-phosphate
  modified_base 10: mod_base = OTHER; note = 2'-O-methyluridine-3'-phosphate
  modified_base 11: mod_base = OTHER; note = 2'-O-methylcytidine-3'-phosphate
  modified_base 13: mod_base = OTHER; note = 2'-O-methyladenosine-3'-phosphate
  modified_base 14: mod_base = OTHER; note = 2'-fluoroguanosine-3'-phosphate
  modified_base 15: mod_base = OTHER; note = 2'-O-methyladenosine-3'-phosphate
  modified_base 16: mod_base = OTHER; note = 2'-O-methylcytidine-3'-phosphate
  modified_base 17: mod_base = OTHER; note = 2'-O-methyladenosine-3'-phosphate
  modified_base 18: mod_base = OTHER; note = 2'-O-methylcytidine-3'-phosphate
  modified_base 19: mod_base = OTHER; note = 2'-O-methyluridine-3'-phosphate
  modified_base 20: mod_base = OTHER; note = 2'-O-methyladenosine-3'-phosphate
  modified_base 21: mod_base = OTHER; note = 2'-O-methyladenosine-3'-phosphorothioate
  modified_base 22: mod_base = OTHER; note = 2'-O-methyladenosine-3'-phosphorothioate
  modified_base 23: mod_base = OTHER; note = 2'-O-methyluridine-3'-phosphate
  misc_feature 1: note = RNA
  misc_feature 2: note = DNA
  misc_feature 3..4: note = RNA
  misc_feature 5: note = DNA
  misc_feature 6: note = RNA
  misc_feature 7: note = DNA
  misc_feature 8..11: note = RNA
  misc_feature 12: note = DNA
  misc_feature 13..23: note = RNA
atcttacattcaagacactaaat

SEQ ID NO: 2618 - DNA, 23 bp, synthetic construct
  source 1..23: mol_type = other DNA
  modified_base 1: mod_base = OTHER; note = 2'-O-methyladenosine-3'-phosphorothioate
  modified_base 2: mod_base = OTHER; note = 2'-deoxythimidine-3'-phosphorothioate
  modified_base 3: mod_base = OTHER; note = 2'-O-methyluridine-3'-phosphate
  modified_base 4: mod_base = OTHER; note = 2'-O-methylcytidine-3'-phosphate
  modified_base 6: mod_base = OTHER; note = 2'-O-methyluridine-3'-phosphate
  modified_base 8: mod_base = OTHER; note = 2'-O-methylcytidine-3'-phosphate
  modified_base 9: mod_base = OTHER; note = 2'-O-methyladenosine-3'-phosphate
  modified_base 10: mod_base = OTHER; note = 2'-O-methyluridine-3'-phosphate
  modified_base 11: mod_base = OTHER; note = 2'-O-methyluridine-3'-phosphate
  modified_base 13: mod_base = OTHER; note = 2'-O-methyladenosine-3'-phosphate
  modified_base 14: mod_base = OTHER; note = 2'-fluoroadenosine-3'-phosphate
  modified_base 15: mod_base = OTHER; note = 2'-O-methylguanosine-3'-phosphate
  modified_base 16: mod_base = OTHER; note = 2'-O-methyladenosine-3'-phosphate
  modified_base 17: mod_base = OTHER; note = 2'-O-methylcytidine-3'-phosphate
  modified_base 18: mod_base = OTHER; note = 2'-O-methyladenosine-3'-phosphate
  modified_base 19: mod_base = OTHER; note = 2'-O-methylcytidine-3'-phosphate
  modified_base 20: mod_base = OTHER; note = 2'-O-methyluridine-3'-phosphate
  modified_base 21: mod_base = OTHER; note = 2'-O-methyladenosine-3'-phosphorothioate
  modified_base 22: mod_base = OTHER; note = 2'-O-methyladenosine-3'-phosphorothioate
  modified_base 23: mod_base = OTHER; note = 2'-O-methyladenosine-3'-phosphate
  misc_feature 1: note = RNA
  misc_feature 2: note = DNA
  misc_feature 3..4: note = RNA
  misc_feature 5: note = DNA
  misc_feature 6: note = RNA
  misc_feature 7: note = DNA
  misc_feature 8..11: note = RNA
  misc_feature 12: note = DNA
  misc_feature 13..23: note = RNA
attcttacattcaagacactaaa

SEQ ID NO: 2619 - DNA, 23 bp, synthetic construct
  source 1..23: mol_type = other DNA
  modified_base 1: mod_base = OTHER; note = 2'-O-methyladenosine-3'-phosphorothioate
  modified_base 2: mod_base = OTHER; note = 2'-deoxyguanosine-3'-phosphorothioate
  modified_base 3: mod_base = OTHER; note = 2'-O-methyluridine-3'-phosphate
  modified_base 4: mod_base = OTHER; note = 2'-O-methyluridine-3'-phosphate
  modified_base 6: mod_base = OTHER; note = 2'-O-methyluridine-3'-phosphate
  modified_base 8: mod_base = OTHER; note = 2'-O-methyladenosine-3'-phosphate
  modified_base 9: mod_base = OTHER; note = 2'-O-methylcytidine-3'-phosphate
  modified_base 10: mod_base = OTHER; note = 2'-O-methyladenosine-3'-phosphate
  modified_base 11: mod_base = OTHER; note = 2'-O-methyluridine-3'-phosphate
  modified_base 13: mod_base = OTHER; note = 2'-O-methylcytidine-3'-phosphate
  modified_base 14: mod_base = OTHER; note = 2'-fluoroadenosine-3'-phosphate
  modified_base 15: mod_base = OTHER; note = 2'-O-methyladenosine-3'-phosphate
  modified_base 16: mod_base = OTHER; note = 2'-O-methylguanosine-3'-phosphate
  modified_base 17: mod_base = OTHER; note = 2'-O-methyladenosine-3'-phosphate
  modified_base 18: mod_base = OTHER; note = 2'-O-methylcytidine-3'-phosphate
  modified_base 19: mod_base = OTHER; note = 2'-O-methyladenosine-3'-phosphate
  modified_base 20: mod_base = OTHER; note = 2'-O-methylcytidine-3'-phosphate
  modified_base 21: mod_base = OTHER; note = 2'-O-methyluridine-3'-phosphorothioate
  modified_base 22: mod_base = OTHER; note = 2'-O-methyladenosine-3'-phosphorothioate
  modified_base 23: mod_base = OTHER; note = 2'-O-methyladenosine-3'-phosphate
  misc_feature 1: note = RNA
  misc_feature 2: note = DNA
  misc_feature 3..4: note = RNA
  misc_feature 5: note = DNA
  misc_feature 6: note = RNA
  misc_feature 7: note = DNA
  misc_feature 8..11: note = RNA
  misc_feature 12: note = DNA
  misc_feature 13..23: note = RNA
agttcttacattcaagacactaa

SEQ ID NO: 2620 - DNA, 23 bp, synthetic construct
  source 1..23: mol_type = other DNA
  modified_base 1: mod_base = OTHER; note = 2'-O-methyladenosine-3'-phosphorothioate
  modified_base 2: mod_base = OTHER; note = 2'-deoxyadenosine-3'-phosphorothioate
  modified_base 3: mod_base = OTHER; note = 2'-O-methyluridine-3'-phosphate
  modified_base 4: mod_base = OTHER; note = 2'-O-methylguanosine-3'-phosphate
  modified_base 6: mod_base = OTHER; note = 2'-O-methyluridine-3'-phosphate
  modified_base 8: mod_base = OTHER; note = 2'-O-methyluridine-3'-phosphate
  modified_base 9: mod_base = OTHER; note = 2'-O-methyluridine-3'-phosphate
  modified_base 10: mod_base = OTHER; note = 2'-O-methyladenosine-3'-phosphate
  modified_base 11: mod_base = OTHER; note = 2'-O-methylcytidine-3'-phosphate
  modified_base 13: mod_base = OTHER; note = 2'-O-methyluridine-3'-phosphate
  modified_base 14: mod_base = OTHER; note = 2'-fluorouridine-3'-phosphate
  modified_base 15: mod_base = OTHER; note = 2'-O-methylcytidine-3'-phosphate
  modified_base 16: mod_base = OTHER; note = 2'-O-methyladenosine-3'-phosphate
  modified_base 17: mod_base = OTHER; note = 2'-O-methyladenosine-3'-phosphate
  modified_base 18: mod_base = OTHER; note = 2'-O-methylguanosine-3'-phosphate
  modified_base 19: mod_base = OTHER; note = 2'-O-methyladenosine-3'-phosphate
  modified_base 20: mod_base = OTHER; note = 2'-O-methylcytidine-3'-phosphate
  modified_base 21: mod_base = OTHER; note = 2'-O-methyladenosine-3'-phosphorothioate
  modified_base 22: mod_base = OTHER; note = 2'-O-methylcytidine-3'-phosphorothioate
  modified_base 23: mod_base = OTHER; note = 2'-O-methyluridine-3'-phosphate
  misc_feature 1: note = RNA
  misc_feature 2: note = DNA
  misc_feature 3..4: note = RNA
  misc_feature 5: note = DNA
  misc_feature 6: note = RNA
  misc_feature 7: note = DNA
  misc_feature 8..11: note = RNA
  misc_feature 12: note = DNA
  misc_feature 13..23: note = RNA
aatgttcttacattcaagacact

SEQ ID NO: 2621 - DNA, 23 bp, synthetic construct
  source 1..23: mol_type = other DNA
  modified_base 1: mod_base = OTHER; note = 2'-O-methyladenosine-3'-phosphorothioate
  modified_base 2: mod_base = OTHER; note = 2'-deoxycytidine-3'-phosphorothioate
  modified_base 3: mod_base = OTHER; note = 2'-O-methyladenosine-3'-phosphate
  modified_base 4: mod_base = OTHER; note = 2'-O-methyluridine-3'-phosphate
  modified_base 6: mod_base = OTHER; note = 2'-O-methyluridine-3'-phosphate
  modified_base 8: mod_base = OTHER; note = 2'-O-methylcytidine-3'-phosphate
  modified_base 9: mod_base = OTHER; note = 2'-O-methyluridine-3'-phosphate
  modified_base 10: mod_base = OTHER; note = 2'-O-methyluridine-3'-phosphate
  modified_base 11: mod_base = OTHER; note = 2'-O-methyladenosine-3'-phosphate
  modified_base 13: mod_base = OTHER; note = 2'-O-methyladenosine-3'-phosphate
  modified_base 14: mod_base = OTHER; note = 2'-fluorouridine-3'-phosphate
  modified_base 15: mod_base = OTHER; note = 2'-O-methyluridine-3'-phosphate
  modified_base 16: mod_base = OTHER; note = 2'-O-methylcytidine-3'-phosphate
  modified_base 17: mod_base = OTHER; note = 2'-O-methyladenosine-3'-phosphate
  modified_base 18: mod_base = OTHER; note = 2'-O-methyladenosine-3'-phosphate
  modified_base 19: mod_base = OTHER; note = 2'-O-methylguanosine-3'-phosphate
  modified_base 20: mod_base = OTHER; note = 2'-O-methyladenosine-3'-phosphate
  modified_base 21: mod_base = OTHER; note = 2'-O-methylcytidine-3'-phosphorothioate
  modified_base 22: mod_base = OTHER; note = 2'-O-methyladenosine-3'-phosphorothioate
  modified_base 23: mod_base = OTHER; note = 2'-O-methylcytidine-3'-phosphate
  misc_feature 1: note = RNA
  misc_feature 2: note = DNA
  misc_feature 3..4: note = RNA
  misc_feature 5: note = DNA
  misc_feature 6: note = RNA
  misc_feature 7: note = DNA
  misc_feature 8..11: note = RNA
  misc_feature 12: note = DNA
  misc_feature 13..23: note = RNA
acatgttcttacattcaagacac

SEQ ID NO: 2622 - DNA, 23 bp, synthetic construct
  source 1..23: mol_type = other DNA
  modified_base 1: mod_base = OTHER; note = 2'-O-methyladenosine-3'-phosphorothioate
  modified_base 2: mod_base = OTHER; note = 2'-deoxyguanosine-3'-phosphorothioate
  modified_base 3: mod_base = OTHER; note = 2'-O-methylguanosine-3'-phosphate
  modified_base 4: mod_base = OTHER; note = 2'-O-methyluridine-3'-phosphate
  modified_base 6: mod_base = OTHER; note = 2'-O-methyladenosine-3'-phosphate
  modified_base 8: mod_base = OTHER; note = 2'-O-methylguanosine-3'-phosphate
  modified_base 9: mod_base = OTHER; note = 2'-O-methyluridine-3'-phosphate
  modified_base 10: mod_base = OTHER; note = 2'-O-methyluridine-3'-phosphate
  modified_base 11: mod_base = OTHER; note = 2'-O-methylcytidine-3'-phosphate
  modified_base 13: mod_base = OTHER; note = 2'-O-methyluridine-3'-phosphate
  modified_base 14: mod_base = OTHER; note = 2'-fluoroadenosine-3'-phosphate
  modified_base 15: mod_base = OTHER; note = 2'-O-methylcytidine-3'-phosphate
  modified_base 16: mod_base = OTHER; note = 2'-O-methyladenosine-3'-phosphate
  modified_base 17: mod_base = OTHER; note = 2'-O-methyluridine-3'-phosphate
  modified_base 18: mod_base = OTHER; note = 2'-O-methyluridine-3'-phosphate
  modified_base 19: mod_base = OTHER; note = 2'-O-methylcytidine-3'-phosphate
  modified_base 20: mod_base = OTHER; note = 2'-O-methyladenosine-3'-phosphate
  modified_base 21: mod_base = OTHER; note = 2'-O-methyladenosine-3'-phosphorothioate
  modified_base 22: mod_base = OTHER; note = 2'-O-methylguanosine-3'-phosphorothioate
  modified_base 23: mod_base = OTHER; note = 2'-O-methyladenosine-3'-phosphate
  misc_feature 1: note = RNA
  misc_feature 2: note = DNA
  misc_feature 3..4: note = RNA
  misc_feature 5: note = DNA
  misc_feature 6: note = RNA
  misc_feature 7: note = DNA
  misc_feature 8..11: note = RNA
  misc_feature 12: note = DNA
  misc_feature 13..23: note = RNA
aggtcatgttcttacattcaaga

SEQ ID NO: 2623 - DNA, 23 bp, synthetic construct
  source 1..23: mol_type = other DNA
  modified_base 1: mod_base = OTHER; note = 2'-O-methyladenosine-3'-phosphorothioate
  modified_base 2: mod_base = OTHER; note = 2'-deoxycytidine-3'-phosphorothioate
  modified_base 3: mod_base = OTHER; note = 2'-O-methyladenosine-3'-phosphate
  modified_base 4: mod_base = OTHER; note = 2'-O-methylcytidine-3'-phosphate
  modified_base 6: mod_base = OTHER; note = 2'-O-methylguanosine-3'-phosphate
  modified_base 8: mod_base = OTHER; note = 2'-O-methylguanosine-3'-phosphate
  modified_base 9: mod_base = OTHER; note = 2'-O-methylguanosine-3'-phosphate
  modified_base 10: mod_base = OTHER; note = 2'-O-methyluridine-3'-phosphate
  modified_base 11: mod_base = OTHER; note = 2'-O-methylcytidine-3'-phosphate
  modified_base 13: mod_base = OTHER; note = 2'-O-methyluridine-3'-phosphate
  modified_base 14: mod_base = OTHER; note = 2'-fluoroguanosine-3'-phosphate
  modified_base 15: mod_base = OTHER; note = 2'-O-methyluridine-3'-phosphate
  modified_base 16: mod_base = OTHER; note = 2'-O-methyluridine-3'-phosphate
  modified_base 17: mod_base = OTHER; note = 2'-O-methylcytidine-3'-phosphate
  modified_base 18: mod_base = OTHER; note = 2'-O-methyluridine-3'-phosphate
  modified_base 19: mod_base = OTHER; note = 2'-O-methyluridine-3'-phosphate
  modified_base 20: mod_base = OTHER; note = 2'-O-methyladenosine-3'-phosphate
  modified_base 21: mod_base = OTHER; note = 2'-O-methylcytidine-3'-phosphorothioate
  modified_base 22: mod_base = OTHER; note = 2'-O-methyladenosine-3'-phosphorothioate
  modified_base 23: mod_base = OTHER; note = 2'-O-methyluridine-3'-phosphate
  misc_feature 1: note = RNA
  misc_feature 2: note = DNA
  misc_feature 3..4: note = RNA
  misc_feature 5: note = DNA
  misc_feature 6: note = RNA
  misc_feature 7: note = DNA
  misc_feature 8..11: note = RNA
  misc_feature 12: note = DNA
  misc_feature 13..23: note = RNA
acacggaggtcatgttcttacat

SEQ ID NO: 2624 - DNA, 23 bp, synthetic construct
  source 1..23: mol_type = other DNA
  modified_base 1: mod_base = OTHER; note = 2'-O-methyladenosine-3'-phosphorothioate
  modified_base 2: mod_base = OTHER; note = 2'-deoxyadenosine-3'-phosphorothioate
  modified_base 3: mod_base = OTHER; note = 2'-O-methylcytidine-3'-phosphate
  modified_base 4: mod_base = OTHER; note = 2'-O-methyladenosine-3'-phosphate
  modified_base 6: mod_base = OTHER; note = 2'-O-methylguanosine-3'-phosphate
  modified_base 8: mod_base = OTHER; note = 2'-O-methyladenosine-3'-phosphate
  modified_base 9: mod_base = OTHER; note = 2'-O-methylguanosine-3'-phosphate
  modified_base 10: mod_base = OTHER; note = 2'-O-methylguanosine-3'-phosphate
  modified_base 11: mod_base = OTHER; note = 2'-O-methyluridine-3'-phosphate
  modified_base 13: mod_base = OTHER; note = 2'-O-methyladenosine-3'-phosphate
  modified_base 14: mod_base = OTHER; note = 2'-fluorouridine-3'-phosphate
  modified_base 15: mod_base = OTHER; note = 2'-O-methylguanosine-3'-phosphate
  modified_base 16: mod_base = OTHER; note = 2'-O-methyluridine-3'-phosphate
  modified_base 17: mod_base = OTHER; note = 2'-O-methyluridine-3'-phosphate
  modified_base 18: mod_base = OTHER; note = 2'-O-methylcytidine-3'-phosphate
  modified_base 19: mod_base = OTHER; note = 2'-O-methyluridine-3'-phosphate
  modified_base 20: mod_base = OTHER; note = 2'-O-methyluridine-3'-phosphate
  modified_base 21: mod_base = OTHER; note = 2'-O-methyladenosine-3'-phosphorothioate
  modified_base 22: mod_base = OTHER; note = 2'-O-methylcytidine-3'-phosphorothioate
  modified_base 23: mod_base = OTHER; note = 2'-O-methyladenosine-3'-phosphate
  misc_feature 1: note = RNA
  misc_feature 2: note = DNA
  misc_feature 3..4: note = RNA
  misc_feature 5: note = DNA
  misc_feature 6: note = RNA
  misc_feature 7: note = DNA
  misc_feature 8..11: note = RNA
  misc_feature 12: note = DNA
  misc_feature 13..23: note = RNA
aacacggaggtcatgttcttaca

SEQ ID NO: 2625 - DNA, 23 bp, synthetic construct
  source 1..23: mol_type = other DNA
  modified_base 1: mod_base = OTHER; note = 2'-O-methyladenosine-3'-phosphorothioate
  modified_base 2: mod_base = OTHER; note = 2'-deoxythimidine-3'-phosphorothioate
  modified_base 3: mod_base = OTHER; note = 2'-O-methyladenosine-3'-phosphate
  modified_base 4: mod_base = OTHER; note = 2'-O-methylcytidine-3'-phosphate
  modified_base 6: mod_base = OTHER; note = 2'-O-methylcytidine-3'-phosphate
  modified_base 8: mod_base = OTHER; note = 2'-O-methylguanosine-3'-phosphate
  modified_base 9: mod_base = OTHER; note = 2'-O-methyladenosine-3'-phosphate
  modified_base 10: mod_base = OTHER; note = 2'-O-methylguanosine-3'-phosphate
  modified_base 11: mod_base = OTHER; note = 2'-O-methylguanosine-3'-phosphate
  modified_base 13: mod_base = OTHER; note = 2'-O-methylcytidine-3'-phosphate
  modified_base 14: mod_base = OTHER; note = 2'-fluoroadenosine-3'-phosphate
  modified_base 15: mod_base = OTHER; note = 2'-O-methyluridine-3'-phosphate
  modified_base 16: mod_base = OTHER; note = 2'-O-methylguanosine-3'-phosphate
  modified_base 17: mod_base = OTHER; note = 2'-O-methyluridine-3'-phosphate
  modified_base 18: mod_base = OTHER; note = 2'-O-methyluridine-3'-phosphate
  modified_base 19: mod_base = OTHER; note = 2'-O-methylcytidine-3'-phosphate
  modified_base 20: mod_base = OTHER; note = 2'-O-methyluridine-3'-phosphate
  modified_base 21: mod_base = OTHER; note = 2'-O-methyluridine-3'-phosphorothioate
  modified_base 22: mod_base = OTHER; note = 2'-O-methyladenosine-3'-phosphorothioate
  modified_base 23: mod_base = OTHER; note = 2'-O-methylcytidine-3'-phosphate
  misc_feature 1: note = RNA
  misc_feature 2: note = DNA
  misc_feature 3..4: note = RNA
  misc_feature 5: note = DNA
  misc_feature 6: note = RNA
  misc_feature 7: note = DNA
  misc_feature 8..11: note = RNA
  misc_feature 12: note = DNA
  misc_feature 13..23: note = RNA
atacacggaggtcatgttcttac

SEQ ID NO: 2626 - DNA, 23 bp, synthetic construct
  source 1..23: mol_type = other DNA
  modified_base 1: mod_base = OTHER; note = 2'-O-methyladenosine-3'-phosphorothioate
  modified_base 2: mod_base = OTHER; note = 2'-deoxycytidine-3'-phosphorothioate
  modified_base 3: mod_base = OTHER; note = 2'-O-methyluridine-3'-phosphate
  modified_base 4: mod_base = OTHER; note = 2'-O-methyladenosine-3'-phosphate
  modified_base 6: mod_base = OTHER; note = 2'-O-methyladenosine-3'-phosphate
  modified_base 8: mod_base = OTHER; note = 2'-O-methylguanosine-3'-phosphate
  modified_base 9: mod_base = OTHER; note = 2'-O-methylguanosine-3'-phosphate
  modified_base 10: mod_base = OTHER; note = 2'-O-methyladenosine-3'-phosphate
  modified_base 11: mod_base = OTHER; note = 2'-O-methylguanosine-3'-phosphate
  modified_base 13: mod_base = OTHER; note = 2'-O-methyluridine-3'-phosphate
  modified_base 14: mod_base = OTHER; note = 2'-fluorocytidine-3'-phosphate
  modified_base 15: mod_base = OTHER; note = 2'-O-methyladenosine-3'-phosphate
  modified_base 16: mod_base = OTHER; note = 2'-O-methyluridine-3'-phosphate
  modified_base 17: mod_base = OTHER; note = 2'-O-methylguanosine-3'-phosphate
  modified_base 18: mod_base = OTHER; note = 2'-O-methyluridine-3'-phosphate
  modified_base 19: mod_base = OTHER; note = 2'-O-methyluridine-3'-phosphate
  modified_base 20: mod_base = OTHER; note = 2'-O-methylcytidine-3'-phosphate
  modified_base 21: mod_base = OTHER; note = 2'-O-methyluridine-3'-phosphorothioate
  modified_base 22: mod_base = OTHER; note = 2'-O-methyluridine-3'-phosphorothioate
  modified_base 23: mod_base = OTHER; note = 2'-O-methyladenosine-3'-phosphate
  misc_feature 1: note = RNA
  misc_feature 2: note = DNA
  misc_feature 3..4: note = RNA
  misc_feature 5: note = DNA
  misc_feature 6: note = RNA
  misc_feature 7: note = DNA
  misc_feature 8..11: note = RNA
  misc_feature 12: note = DNA
  misc_feature 13..23: note = RNA
actacacggaggtcatgttctta

SEQ ID NO: 2627 - DNA, 23 bp, synthetic construct
  source 1..23: mol_type = other DNA
  modified_base 1: mod_base = OTHER; note = 2'-O-methyladenosine-3'-phosphorothioate
  modified_base 2: mod_base = OTHER; note = 2'-deoxyadenosine-3'-phosphorothioate
  modified_base 3: mod_base = OTHER; note = 2'-O-methylcytidine-3'-phosphate
  modified_base 4: mod_base = OTHER; note = 2'-O-methyluridine-3'-phosphate
  modified_base 6: mod_base = OTHER; note = 2'-O-methylcytidine-3'-phosphate
  modified_base 8: mod_base = OTHER; note = 2'-O-methylcytidine-3'-phosphate
  modified_base 9: mod_base = OTHER; note = 2'-O-methylguanosine-3'-phosphate
  modified_base 10: mod_base = OTHER; note = 2'-O-methylguanosine-3'-phosphate
  modified_base 11: mod_base = OTHER; note = 2'-O-methyladenosine-3'-phosphate
  modified_base 13: mod_base = OTHER; note = 2'-O-methylguanosine-3'-phosphate
  modified_base 14: mod_base = OTHER; note = 2'-fluorouridine-3'-phosphate
  modified_base 15: mod_base = OTHER; note = 2'-O-methylcytidine-3'-phosphate
  modified_base 16: mod_base = OTHER; note = 2'-O-methyladenosine-3'-phosphate
  modified_base 17: mod_base = OTHER; note = 2'-O-methyluridine-3'-phosphate
  modified_base 18: mod_base = OTHER; note = 2'-O-methylguanosine-3'-phosphate
  modified_base 19: mod_base = OTHER; note = 2'-O-methyluridine-3'-phosphate
  modified_base 20: mod_base = OTHER; note = 2'-O-methyluridine-3'-phosphate
  modified_base 21: mod_base = OTHER; note = 2'-O-methylcytidine-3'-phosphorothioate
  modified_base 22: mod_base = OTHER; note = 2'-O-methyluridine-3'-phosphorothioate
  modified_base 23: mod_base = OTHER; note = 2'-O-methyluridine-3'-phosphate
  misc_feature 1: note = RNA
  misc_feature 2: note = DNA
  misc_feature 3..4: note = RNA
  misc_feature 5: note = DNA
  misc_feature 6: note = RNA
  misc_feature 7: note = DNA
  misc_feature 8..11: note = RNA
  misc_feature 12: note = DNA
  misc_feature 13..23: note = RNA
aactacacggaggtcatgttctt

SEQ ID NO: 2628 - DNA, 23 bp, synthetic construct
  source 1..23: mol_type = other DNA
  modified_base 1: mod_base = OTHER; note = 2'-O-methyladenosine-3'-phosphorothioate
  modified_base 2: mod_base = OTHER; note = 2'-deoxycytidine-3'-phosphorothioate
  modified_base 3: mod_base = OTHER; note = 2'-O-methyladenosine-3'-phosphate
  modified_base 4: mod_base = OTHER; note = 2'-O-methylcytidine-3'-phosphate
  modified_base 6: mod_base = OTHER; note = 2'-O-methyladenosine-3'-phosphate
  modified_base 8: mod_base = OTHER; note = 2'-O-methyladenosine-3'-phosphate
  modified_base 9: mod_base = OTHER; note = 2'-O-methylcytidine-3'-phosphate
  modified_base 10: mod_base = OTHER; note = 2'-O-methylguanosine-3'-phosphate
  modified_base 11: mod_base = OTHER; note = 2'-O-methylguanosine-3'-phosphate
  modified_base 13: mod_base = OTHER; note = 2'-O-methylguanosine-3'-phosphate
  modified_base 14: mod_base = OTHER; note = 2'-fluoroguanosine-3'-phosphate
  modified_base 15: mod_base = OTHER; note = 2'-O-methyluridine-3'-phosphate
  modified_base 16: mod_base = OTHER; note = 2'-O-methylcytidine-3'-phosphate
  modified_base 17: mod_base = OTHER; note = 2'-O-methyladenosine-3'-phosphate
  modified_base 18: mod_base = OTHER; note = 2'-O-methyluridine-3'-phosphate
  modified_base 19: mod_base = OTHER; note = 2'-O-methylguanosine-3'-phosphate
  modified_base 20: mod_base = OTHER; note = 2'-O-methyluridine-3'-phosphate
  modified_base 21: mod_base = OTHER; note = 2'-O-methyluridine-3'-phosphorothioate
  modified_base 22: mod_base = OTHER; note = 2'-O-methylcytidine-3'-phosphorothioate
  modified_base 23: mod_base = OTHER; note = 2'-O-methyluridine-3'-phosphate
  misc_feature 1: note = RNA
  misc_feature 2: note = DNA
  misc_feature 3..4: note = RNA
  misc_feature 5: note = DNA
  misc_feature 6: note = RNA
  misc_feature 7: note = DNA
  misc_feature 8..11: note = RNA
  misc_feature 12: note = DNA
  misc_feature 13..23: note = RNA
acactacacggaggtcatgttct

SEQ ID NO: 2629 - DNA, 23 bp, synthetic construct
  source 1..23: mol_type = other DNA
  modified_base 1: mod_base = OTHER; note = 2'-O-methyladenosine-3'-phosphorothioate
  modified_base 2: mod_base = OTHER; note = 2'-deoxyadenosine-3'-phosphorothioate
  modified_base 3: mod_base = OTHER; note = 2'-O-methylcytidine-3'-phosphate
  modified_base 4: mod_base = OTHER; note = 2'-O-methyladenosine-3'-phosphate
  modified_base 6: mod_base = OTHER; note = 2'-O-methyluridine-3'-phosphate
  modified_base 8: mod_base = OTHER; note = 2'-O-methylcytidine-3'-phosphate
  modified_base 9: mod_base = OTHER; note = 2'-O-methyladenosine-3'-phosphate
  modified_base 10: mod_base = OTHER; note = 2'-O-methylcytidine-3'-phosphate
  modified_base 11: mod_base = OTHER; note = 2'-O-methylguanosine-3'-phosphate
  modified_base 13: mod_base = OTHER; note = 2'-O-methyladenosine-3'-phosphate
  modified_base 14: mod_base = OTHER; note = 2'-fluoroguanosine-3'-phosphate
  modified_base 15: mod_base = OTHER; note = 2'-O-methylguanosine-3'-phosphate
  modified_base 16: mod_base = OTHER; note = 2'-O-methyluridine-3'-phosphate
  modified_base 17: mod_base = OTHER; note = 2'-O-methylcytidine-3'-phosphate
  modified_base 18: mod_base = OTHER; note = 2'-O-methyladenosine-3'-phosphate
  modified_base 19: mod_base = OTHER; note = 2'-O-methyluridine-3'-phosphate
  modified_base 20: mod_base = OTHER; note = 2'-O-methylguanosine-3'-phosphate
  modified_base 21: mod_base = OTHER; note = 2'-O-methyluridine-3'-phosphorothioate
  modified_base 22: mod_base = OTHER; note = 2'-O-methyluridine-3'-phosphorothioate
  modified_base 23: mod_base = OTHER; note = 2'-O-methylcytidine-3'-phosphate
  misc_feature 1: note = RNA
  misc_feature 2: note = DNA
  misc_feature 3..4: note = RNA
  misc_feature 5: note = DNA
  misc_feature 6: note = RNA
  misc_feature 7: note = DNA
  misc_feature 8..11: note = RNA
  misc_feature 12: note = DNA
  misc_feature 13..23: note = RNA
aacactacacggaggtcatgttc

SEQ ID NO: 2630 - DNA, 23 bp, synthetic construct
  source 1..23: mol_type = other DNA
  modified_base 1: mod_base = OTHER; note = 2'-O-methyladenosine-3'-phosphorothioate
  modified_base 2: mod_base = OTHER; note = 2'-deoxyguanosine-3'-phosphorothioate
  modified_base 3: mod_base = OTHER; note = 2'-O-methyladenosine-3'-phosphate
  modified_base 4: mod_base = OTHER; note = 2'-O-methylcytidine-3'-phosphate
  modified_base 6: mod_base = OTHER; note = 2'-O-methylcytidine-3'-phosphate
  modified_base 8: mod_base = OTHER; note = 2'-O-methyladenosine-3'-phosphate
  modified_base 9: mod_base = OTHER; note = 2'-O-methylcytidine-3'-phosphate
  modified_base 10: mod_base = OTHER; note = 2'-O-methyladenosine-3'-phosphate
  modified_base 11: mod_base = OTHER; note = 2'-O-methylcytidine-3'-phosphate
  modified_base 13: mod_base = OTHER; note = 2'-O-methylguanosine-3'-phosphate
  modified_base 14: mod_base = OTHER; note = 2'-fluoroadenosine-3'-phosphate
  modified_base 15: mod_base = OTHER; note = 2'-O-methylguanosine-3'-phosphate
  modified_base 16: mod_base = OTHER; note = 2'-O-methylguanosine-3'-phosphate
  modified_base 17: mod_base = OTHER; note = 2'-O-methyluridine-3'-phosphate
  modified_base 18: mod_base = OTHER; note = 2'-O-methylcytidine-3'-phosphate
  modified_base 19: mod_base = OTHER; note = 2'-O-methyladenosine-3'-phosphate
  modified_base 20: mod_base = OTHER; note = 2'-O-methyluridine-3'-phosphate
  modified_base 21: mod_base = OTHER; note = 2'-O-methylguanosine-3'-phosphorothioate
  modified_base 22: mod_base = OTHER; note = 2'-O-methyluridine-3'-phosphorothioate
  modified_base 23: mod_base = OTHER; note = 2'-O-methyluridine-3'-phosphate
  misc_feature 1: note = RNA
  misc_feature 2: note = DNA
  misc_feature 3..4: note = RNA
  misc_feature 5: note = DNA
  misc_feature 6: note = RNA
  misc_feature 7: note = DNA
  misc_feature 8..11: note = RNA
  misc_feature 12: note = DNA
  misc_feature 13..23: note = RNA
agacactacacggaggtcatgtt

SEQ ID NO: 2631 - DNA, 23 bp, synthetic construct
  source 1..23: mol_type = other DNA
  modified_base 1: mod_base = OTHER; note = 2'-O-methyladenosine-3'-phosphorothioate
  modified_base 2: mod_base = OTHER; note = 2'-deoxyadenosine-3'-phosphorothioate
  modified_base 3: mod_base = OTHER; note = 2'-O-methylguanosine-3'-phosphate
  modified_base 4: mod_base = OTHER; note = 2'-O-methyladenosine-3'-phosphate
  modified_base 6: mod_base = OTHER; note = 2'-O-methyladenosine-3'-phosphate
  modified_base 8: mod_base = OTHER; note = 2'-O-methyluridine-3'-phosphate
  modified_base 9: mod_base = OTHER; note = 2'-O-methyladenosine-3'-phosphate
  modified_base 10: mod_base = OTHER; note = 2'-O-methylcytidine-3'-phosphate
  modified_base 11: mod_base = OTHER; note = 2'-O-methyladenosine-3'-phosphate
  modified_base 13: mod_base = OTHER; note = 2'-O-methylguanosine-3'-phosphate
  modified_base 14: mod_base = OTHER; note = 2'-fluoroguanosine-3'-phosphate
  modified_base 15: mod_base = OTHER; note = 2'-O-methyladenosine-3'-phosphate
  modified_base 16: mod_base = OTHER; note = 2'-O-methylguanosine-3'-phosphate
  modified_base 17: mod_base = OTHER; note = 2'-O-methylguanosine-3'-phosphate
  modified_base 18: mod_base = OTHER; note = 2'-O-methyluridine-3'-phosphate
  modified_base 19: mod_base = OTHER; note = 2'-O-methylcytidine-3'-phosphate
  modified_base 20: mod_base = OTHER; note = 2'-O-methyladenosine-3'-phosphate
  modified_base 21: mod_base = OTHER; note = 2'-O-methyluridine-3'-phosphorothioate
  modified_base 22: mod_base = OTHER; note = 2'-O-methylguanosine-3'-phosphorothioate
  modified_base 23: mod_base = OTHER; note = 2'-O-methyluridine-3'-phosphate
  misc_feature 1: note = RNA
  misc_feature 2: note = DNA
  misc_feature 3..4: note = RNA
  misc_feature 5: note = DNA
  misc_feature 6: note = RNA
  misc_feature 7: note = DNA
  misc_feature 8..11: note = RNA
  misc_feature 12: note = DNA
  misc_feature 13..23: note = RNA
aagacactacacggaggtcatgt

SEQ ID NO: 2632 - DNA, 23 bp, synthetic construct
  source 1..23: mol_type = other DNA
  modified_base 1: mod_base = OTHER; note = 2'-O-methyladenosine-3'-phosphorothioate
  modified_base 2: mod_base = OTHER; note = 2'-deoxycytidine-3'-phosphorothioate
  modified_base 3: mod_base = OTHER; note = 2'-O-methyladenosine-3'-phosphate
  modified_base 4: mod_base = OTHER; note = 2'-O-methyluridine-3'-phosphate
  modified_base 6: mod_base = OTHER; note = 2'-O-methyluridine-3'-phosphate
  modified_base 8: mod_base = OTHER; note = 2'-O-methyluridine-3'-phosphate
  modified_base 9: mod_base = OTHER; note = 2'-O-methylguanosine-3'-phosphate
  modified_base 10: mod_base = OTHER; note = 2'-O-methylguanosine-3'-phosphate
  modified_base 11: mod_base = OTHER; note = 2'-O-methyladenosine-3'-phosphate
  modified_base 13: mod_base = OTHER; note = 2'-O-methyladenosine-3'-phosphate
  modified_base 14: mod_base = OTHER; note = 2'-fluoroadenosine-3'-phosphate
  modified_base 15: mod_base = OTHER; note = 2'-O-methyladenosine-3'-phosphate
  modified_base 16: mod_base = OTHER; note = 2'-O-methyladenosine-3'-phosphate
  modified_base 17: mod_base = OTHER; note = 2'-O-methylcytidine-3'-phosphate
  modified_base 18: mod_base = OTHER; note = 2'-O-methyluridine-3'-phosphate
  modified_base 19: mod_base = OTHER; note = 2'-O-methyladenosine-3'-phosphate
  modified_base 20: mod_base = OTHER; note = 2'-O-methyladenosine-3'-phosphate
  modified_base 21: mod_base = OTHER; note = 2'-O-methylguanosine-3'-phosphorothioate
  modified_base 22: mod_base = OTHER; note = 2'-O-methylguanosine-3'-phosphorothioate
  modified_base 23: mod_base = OTHER; note = 2'-O-methyluridine-3'-phosphate
  misc_feature 1: note = RNA
  misc_feature 2: note = DNA
  misc_feature 3..4: note = RNA
  misc_feature 5: note = DNA
  misc_feature 6: note = RNA
  misc_feature 7: note = DNA
  misc_feature 8..11: note = RNA
  misc_feature 12: note = DNA
  misc_feature 13..23: note = RNA
acatctgtggaaaaaactaaggt

SEQ ID NO: 2633 - DNA, 23 bp, synthetic construct
  source 1..23: mol_type = other DNA
  modified_base 1: mod_base = OTHER; note = 2'-O-methyladenosine-3'-phosphorothioate
  modified_base 2: mod_base = OTHER; note = 2'-deoxyguanosine-3'-phosphorothioate
  modified_base 3: mod_base = OTHER; note = 2'-O-methylcytidine-3'-phosphate
  modified_base 4: mod_base = OTHER; note = 2'-O-methyladenosine-3'-phosphate
  modified_base 6: mod_base = OTHER; note = 2'-O-methylcytidine-3'-phosphate
  modified_base 8: mod_base = OTHER; note = 2'-O-methylguanosine-3'-phosphate
  modified_base 9: mod_base = OTHER; note = 2'-O-methyluridine-3'-phosphate
  modified_base 10: mod_base = OTHER; note = 2'-O-methylguanosine-3'-phosphate
  modified_base 11: mod_base = OTHER; note = 2'-O-methylguanosine-3'-phosphate
  modified_base 13: mod_base = OTHER; note = 2'-O-methyladenosine-3'-phosphate
  modified_base 14: mod_base = OTHER; note = 2'-fluoroadenosine-3'-phosphate
  modified_base 15: mod_base = OTHER; note = 2'-O-methyladenosine-3'-phosphate
  modified_base 16: mod_base = OTHER; note = 2'-O-methyladenosine-3'-phosphate
  modified_base 17: mod_base = OTHER; note = 2'-O-methyladenosine-3'-phosphate
  modified_base 18: mod_base = OTHER; note = 2'-O-methylcytidine-3'-phosphate
  modified_base 19: mod_base = OTHER; note = 2'-O-methyluridine-3'-phosphate
  modified_base 20: mod_base = OTHER; note = 2'-O-methyladenosine-3'-phosphate
  modified_base 21: mod_base = OTHER; note = 2'-O-methyladenosine-3'-phosphorothioate
  modified_base 22: mod_base = OTHER; note = 2'-O-methylguanosine-3'-phosphorothioate
  modified_base 23: mod_base = OTHER; note = 2'-O-methylguanosine-3'-phosphate
  misc_feature 1: note = RNA
  misc_feature 2: note = DNA
  misc_feature 3..4: note = RNA
  misc_feature 5: note = DNA
  misc_feature 6: note = RNA
  misc_feature 7: note = DNA
  misc_feature 8..11: note = RNA
  misc_feature 12: note = DNA
  misc_feature 13..23: note = RNA
agcatctgtggaaaaaactaagg

SEQ ID NO: 2634 - DNA, 23 bp, synthetic construct
  source 1..23: mol_type = other DNA
  modified_base 1: mod_base = OTHER; note = 2'-O-methyladenosine-3'-phosphorothioate
  modified_base 2: mod_base = OTHER; note = 2'-deoxyadenosine-3'-phosphorothioate
  modified_base 3: mod_base = OTHER; note = 2'-O-methylguanosine-3'-phosphate
  modified_base 4: mod_base = OTHER; note = 2'-O-methylcytidine-3'-phosphate
  modified_base 6: mod_base = OTHER; note = 2'-O-methyluridine-3'-phosphate
  modified_base 8: mod_base = OTHER; note = 2'-O-methyluridine-3'-phosphate
  modified_base 9: mod_base = OTHER; note = 2'-O-methylguanosine-3'-phosphate
  modified_base 10: mod_base = OTHER; note = 2'-O-methyluridine-3'-phosphate
  modified_base 11: mod_base = OTHER; note = 2'-O-methylguanosine-3'-phosphate
  modified_base 13: mod_base = OTHER; note = 2'-O-methyladenosine-3'-phosphate
  modified_base 14: mod_base = OTHER; note = 2'-fluoroadenosine-3'-phosphate
  modified_base 15: mod_base = OTHER; note = 2'-O-methyladenosine-3'-phosphate
  modified_base 16: mod_base = OTHER; note = 2'-O-methyladenosine-3'-phosphate
  modified_base 17: mod_base = OTHER; note = 2'-O-methyladenosine-3'-phosphate
  modified_base 18: mod_base = OTHER; note = 2'-O-methyladenosine-3'-phosphate
  modified_base 19: mod_base = OTHER; note = 2'-O-methylcytidine-3'-phosphate
  modified_base 20: mod_base = OTHER; note = 2'-O-methyluridine-3'-phosphate
  modified_base 21: mod_base = OTHER; note = 2'-O-methyladenosine-3'-phosphorothioate
  modified_base 22: mod_base = OTHER; note = 2'-O-methyladenosine-3'-phosphorothioate
  modified_base 23: mod_base = OTHER; note = 2'-O-methylguanosine-3'-phosphate
  misc_feature 1: note = RNA
  misc_feature 2: note = DNA
  misc_feature 3..4: note = RNA
  misc_feature 5: note = DNA
  misc_feature 6: note = RNA
  misc_feature 7: note = DNA
  misc_feature 8..11: note = RNA
  misc_feature 12: note = DNA
  misc_feature 13..23: note = RNA
aagcatctgtggaaaaaactaag

SEQ ID NO: 2635 - DNA, 23 bp, synthetic construct
  source 1..23: mol_type = other DNA
  modified_base 1: mod_base = OTHER; note = 2'-O-methyladenosine-3'-phosphorothioate
  modified_base 2: mod_base = OTHER; note = 2'-deoxyadenosine-3'-phosphorothioate
  modified_base 3: mod_base = OTHER; note = 2'-O-methyladenosine-3'-phosphate
  modified_base 4: mod_base = OTHER; note = 2'-O-methylguanosine-3'-phosphate
  modified_base 6: mod_base = OTHER; note = 2'-O-methyladenosine-3'-phosphate
  modified_base 8: mod_base = OTHER; note = 2'-O-methylcytidine-3'-phosphate
  modified_base 9: mod_base = OTHER; note = 2'-O-methyluridine-3'-phosphate
  modified_base 10: mod_base = OTHER; note = 2'-O-methylguanosine-3'-phosphate
  modified_base 11: mod_base = OTHER; note = 2'-O-methyluridine-3'-phosphate
  modified_base 13: mod_base = OTHER; note = 2'-O-methylguanosine-3'-phosphate
  modified_base 14: mod_base = OTHER; note = 2'-fluoroadenosine-3'-phosphate
  modified_base 15: mod_base = OTHER; note = 2'-O-methyladenosine-3'-phosphate
  modified_base 16: mod_base = OTHER; note = 2'-O-methyladenosine-3'-phosphate
  modified_base 17: mod_base = OTHER; note = 2'-O-methyladenosine-3'-phosphate
  modified_base 18: mod_base = OTHER; note = 2'-O-methyladenosine-3'-phosphate
  modified_base 19: mod_base = OTHER; note = 2'-O-methyladenosine-3'-phosphate
  modified_base 20: mod_base = OTHER; note = 2'-O-methylcytidine-3'-phosphate
  modified_base 21: mod_base = OTHER; note = 2'-O-methyluridine-3'-phosphorothioate
  modified_base 22: mod_base = OTHER; note = 2'-O-methyladenosine-3'-phosphorothioate
  modified_base 23: mod_base = OTHER; note = 2'-O-methyladenosine-3'-phosphate
  misc_feature 1: note = RNA
  misc_feature 2: note = DNA
  misc_feature 3..4: note = RNA
  misc_feature 5: note = DNA
  misc_feature 6: note = RNA
  misc_feature 7: note = DNA
  misc_feature 8..11: note = RNA
  misc_feature 12: note = DNA
  misc_feature 13..23: note = RNA
aaagcatctgtggaaaaaactaa

SEQ ID NO: 2636 - DNA, 23 bp, synthetic construct
  source 1..23: mol_type = other DNA
  modified_base 1: mod_base = OTHER; note = 2'-O-methyladenosine-3'-phosphorothioate
  modified_base 2: mod_base = OTHER; note = 2'-deoxycytidine-3'-phosphorothioate
  modified_base 3: mod_base = OTHER; note = 2'-O-methyladenosine-3'-phosphate
  modified_base 4: mod_base = OTHER; note = 2'-O-methyladenosine-3'-phosphate
  modified_base 6: mod_base = OTHER; note = 2'-O-methylcytidine-3'-phosphate
  modified_base 8: mod_base = OTHER; note = 2'-O-methyluridine-3'-phosphate
  modified_base 9: mod_base = OTHER; note = 2'-O-methylcytidine-3'-phosphate
  modified_base 10: mod_base = OTHER; note = 2'-O-methyluridine-3'-phosphate
  modified_base 11: mod_base = OTHER; note = 2'-O-methylguanosine-3'-phosphate
  modified_base 13: mod_base = OTHER; note = 2'-O-methylguanosine-3'-phosphate
  modified_base 14: mod_base = OTHER; note = 2'-fluoroguanosine-3'-phosphate
  modified_base 15: mod_base = OTHER; note = 2'-O-methyladenosine-3'-phosphate
  modified_base 16: mod_base = OTHER; note = 2'-O-methyladenosine-3'-phosphate
  modified_base 17: mod_base = OTHER; note = 2'-O-methyladenosine-3'-phosphate
  modified_base 18: mod_base = OTHER; note = 2'-O-methyladenosine-3'-phosphate
  modified_base 19: mod_base = OTHER; note = 2'-O-methyladenosine-3'-phosphate
  modified_base 20: mod_base = OTHER; note = 2'-O-methyladenosine-3'-phosphate
  modified_base 21: mod_base = OTHER; note = 2'-O-methylcytidine-3'-phosphorothioate
  modified_base 22: mod_base = OTHER; note = 2'-O-methyluridine-3'-phosphorothioate
  modified_base 23: mod_base = OTHER; note = 2'-O-methyladenosine-3'-phosphate
  misc_feature 1: note = RNA
  misc_feature 2: note = DNA
  misc_feature 3..4: note = RNA
  misc_feature 5: note = DNA
  misc_feature 6: note = RNA
  misc_feature 7: note = DNA
  misc_feature 8..11: note = RNA
  misc_feature 12: note = DNA
  misc_feature 13..23: note = RNA
acaagcatctgtggaaaaaacta

SEQ ID NO: 2637 - DNA, 23 bp, synthetic construct
  source 1..23: mol_type = other DNA
  modified_base 1: mod_base = OTHER; note = 2'-O-methyladenosine-3'-phosphorothioate
  modified_base 2: mod_base = OTHER; note = 2'-deoxycytidine-3'-phosphorothioate
  modified_base 3: mod_base = OTHER; note = 2'-O-methyladenosine-3'-phosphate
  modified_base 4: mod_base = OTHER; note = 2'-O-methylcytidine-3'-phosphate
  modified_base 6: mod_base = OTHER; note = 2'-O-methyladenosine-3'-phosphate
  modified_base 8: mod_base = OTHER; note = 2'-O-methylcytidine-3'-phosphate
  modified_base 9: mod_base = OTHER; note = 2'-O-methyladenosine-3'-phosphate
  modified_base 10: mod_base = OTHER; note = 2'-O-methyluridine-3'-phosphate
  modified_base 11: mod_base = OTHER; note = 2'-O-methylcytidine-3'-phosphate
  modified_base 13: mod_base = OTHER; note = 2'-O-methylguanosine-3'-phosphate
  modified_base 14: mod_base = OTHER; note = 2'-fluorouridine-3'-phosphate
  modified_base 15: mod_base = OTHER; note = 2'-O-methylguanosine-3'-phosphate
  modified_base 16: mod_base = OTHER; note = 2'-O-methylguanosine-3'-phosphate
  modified_base 17: mod_base = OTHER; note = 2'-O-methyladenosine-3'-phosphate
  modified_base 18: mod_base = OTHER; note = 2'-O-methyladenosine-3'-phosphate
  modified_base 19: mod_base = OTHER; note = 2'-O-methyladenosine-3'-phosphate
  modified_base 20: mod_base = OTHER; note = 2'-O-methyladenosine-3'-phosphate
  modified_base 21: mod_base = OTHER; note = 2'-O-methyladenosine-3'-phosphorothioate
  modified_base 22: mod_base = OTHER; note = 2'-O-methyladenosine-3'-phosphorothioate
  modified_base 23: mod_base = OTHER; note = 2'-O-methylcytidine-3'-phosphate
  misc_feature 1: note = RNA
  misc_feature 2: note = DNA
  misc_feature 3..4: note = RNA
  misc_feature 5: note = DNA
  misc_feature 6: note = RNA
  misc_feature 7: note = DNA
  misc_feature 8..11: note = RNA
  misc_feature 12: note = DNA
  misc_feature 13..23: note = RNA
acacaagcatctgtggaaaaaac

SEQ ID NO: 2638 - DNA, 23 bp, synthetic construct
  source 1..23: mol_type = other DNA
  modified_base 1: mod_base = OTHER; note = 2'-O-methyladenosine-3'-phosphorothioate
  modified_base 2: mod_base = OTHER; note = 2'-deoxythimidine-3'-phosphorothioate
  modified_base 3: mod_base = OTHER; note = 2'-O-methylcytidine-3'-phosphate
  modified_base 4: mod_base = OTHER; note = 2'-O-methyladenosine-3'-phosphate
  modified_base 6: mod_base = OTHER; note = 2'-O-methyladenosine-3'-phosphate
  modified_base 8: mod_base = OTHER; note = 2'-O-methylguanosine-3'-phosphate
  modified_base 9: mod_base = OTHER; note = 2'-O-methylcytidine-3'-phosphate
  modified_base 10: mod_base = OTHER; note = 2'-O-methyladenosine-3'-phosphate
  modified_base 11: mod_base = OTHER; note = 2'-O-methyluridine-3'-phosphate
  modified_base 13: mod_base = OTHER; note = 2'-O-methyluridine-3'-phosphate
  modified_base 14: mod_base = OTHER; note = 2'-fluoroguanosine-3'-phosphate
  modified_base 15: mod_base = OTHER; note = 2'-O-methyluridine-3'-phosphate
  modified_base 16: mod_base = OTHER; note = 2'-O-methylguanosine-3'-phosphate
  modified_base 17: mod_base = OTHER; note = 2'-O-methylguanosine-3'-phosphate
  modified_base 18: mod_base = OTHER; note = 2'-O-methyladenosine-3'-phosphate
  modified_base 19: mod_base = OTHER; note = 2'-O-methyladenosine-3'-phosphate
  modified_base 20: mod_base = OTHER; note = 2'-O-methyladenosine-3'-phosphate
  modified_base 21: mod_base = OTHER; note = 2'-O-methyladenosine-3'-phosphorothioate
  modified_base 22: mod_base = OTHER; note = 2'-O-methyladenosine-3'-phosphorothioate
  modified_base 23: mod_base = OTHER; note = 2'-O-methyladenosine-3'-phosphate
  misc_feature 1: note = RNA
  misc_feature 2: note = DNA
  misc_feature 3..4: note = RNA
  misc_feature 5: note = DNA
  misc_feature 6: note = RNA
  misc_feature 7: note = DNA
  misc_feature 8..11: note = RNA
  misc_feature 12: note = DNA
  misc_feature 13..23: note = RNA
atcacaagcatctgtggaaaaaa

SEQ ID NO: 2639 - DNA, 23 bp, synthetic construct
  source 1..23: mol_type = other DNA
  modified_base 1: mod_base = OTHER; note = 2'-O-methyladenosine-3'-phosphorothioate
  modified_base 2: mod_base = OTHER; note = 2'-deoxyadenosine-3'-phosphorothioate
  modified_base 3: mod_base = OTHER; note = 2'-O-methyluridine-3'-phosphate
  modified_base 4: mod_base = OTHER; note = 2'-O-methylcytidine-3'-phosphate
  modified_base 6: mod_base = OTHER; note = 2'-O-methylcytidine-3'-phosphate
  modified_base 8: mod_base = OTHER; note = 2'-O-methyladenosine-3'-phosphate
  modified_base 9: mod_base = OTHER; note = 2'-O-methylguanosine-3'-phosphate
  modified_base 10: mod_base = OTHER; note = 2'-O-methylcytidine-3'-phosphate
  modified_base 11: mod_base = OTHER; note = 2'-O-methyladenosine-3'-phosphate
  modified_base 13: mod_base = OTHER; note = 2'-O-methylcytidine-3'-phosphate
  modified_base 14: mod_base = OTHER; note = 2'-fluorouridine-3'-phosphate
  modified_base 15: mod_base = OTHER; note = 2'-O-methylguanosine-3'-phosphate
  modified_base 16: mod_base = OTHER; note = 2'-O-methyluridine-3'-phosphate
  modified_base 17: mod_base = OTHER; note = 2'-O-methylguanosine-3'-phosphate
  modified_base 18: mod_base = OTHER; note = 2'-O-methylguanosine-3'-phosphate
  modified_base 19: mod_base = OTHER; note = 2'-O-methyladenosine-3'-phosphate
  modified_base 20: mod_base = OTHER; note = 2'-O-methyladenosine-3'-phosphate
  modified_base 21: mod_base = OTHER; note = 2'-O-methyladenosine-3'-phosphorothioate
  modified_base 22: mod_base = OTHER; note = 2'-O-methyladenosine-3'-phosphorothioate
  modified_base 23: mod_base = OTHER; note = 2'-O-methyladenosine-3'-phosphate
  misc_feature 1: note = RNA
  misc_feature 2: note = DNA
  misc_feature 3..4: note = RNA
  misc_feature 5: note = DNA
  misc_feature 6: note = RNA
  misc_feature 7: note = DNA
  misc_feature 8..11: note = RNA
  misc_feature 12: note = DNA
  misc_feature 13..23: note = RNA
aatcacaagcatctgtggaaaaa

SEQ ID NO: 2640 - DNA, 23 bp, synthetic construct
  source 1..23: mol_type = other DNA
  modified_base 1: mod_base = OTHER; note = 2'-O-methyladenosine-3'-phosphorothioate
  modified_base 2: mod_base = OTHER; note = 2'-deoxyadenosine-3'-phosphorothioate
  modified_base 3: mod_base = OTHER; note = 2'-O-methyladenosine-3'-phosphate
  modified_base 4: mod_base = OTHER; note = 2'-O-methyluridine-3'-phosphate
  modified_base 6: mod_base = OTHER; note = 2'-O-methyladenosine-3'-phosphate
  modified_base 8: mod_base = OTHER; note = 2'-O-methyladenosine-3'-phosphate
  modified_base 9: mod_base = OTHER; note = 2'-O-methyladenosine-3'-phosphate
  modified_base 10: mod_base = OTHER; note = 2'-O-methylguanosine-3'-phosphate
  modified_base 11: mod_base = OTHER; note = 2'-O-methylcytidine-3'-phosphate
  modified_base 13: mod_base = OTHER; note = 2'-O-methyluridine-3'-phosphate
  modified_base 14: mod_base = OTHER; note = 2'-fluorocytidine-3'-phosphate
  modified_base 15: mod_base = OTHER; note = 2'-O-methyluridine-3'-phosphate
  modified_base 16: mod_base = OTHER; note = 2'-O-methylguanosine-3'-phosphate
  modified_base 17: mod_base = OTHER; note = 2'-O-methyluridine-3'-phosphate
  modified_base 18: mod_base = OTHER; note = 2'-O-methylguanosine-3'-phosphate
  modified_base 19: mod_base = OTHER; note = 2'-O-methylguanosine-3'-phosphate
  modified_base 20: mod_base = OTHER; note = 2'-O-methyladenosine-3'-phosphate
  modified_base 21: mod_base = OTHER; note = 2'-O-methyladenosine-3'-phosphorothioate
  modified_base 22: mod_base = OTHER; note = 2'-O-methyladenosine-3'-phosphorothioate
  modified_base 23: mod_base = OTHER; note = 2'-O-methyladenosine-3'-phosphate
  misc_feature 1: note = RNA
  misc_feature 2: note = DNA
  misc_feature 3..4: note = RNA
  misc_feature 5: note = DNA
  misc_feature 6: note = RNA
  misc_feature 7: note = DNA
  misc_feature 8..11: note = RNA
  misc_feature 12: note = DNA
  misc_feature 13..23: note = RNA
aaatcacaagcatctgtggaaaa

SEQ ID NO: 2641 - DNA, 23 bp, synthetic construct
  source 1..23: mol_type = other DNA
  modified_base 1: mod_base = OTHER; note = 2'-O-methyladenosine-3'-phosphorothioate
  modified_base 2: mod_base = OTHER; note = 2'-deoxyadenosine-3'-phosphorothioate
  modified_base 3: mod_base = OTHER; note = 2'-O-methyladenosine-3'-phosphate
  modified_base 4: mod_base = OTHER; note = 2'-O-methyladenosine-3'-phosphate
  modified_base 6: mod_base = OTHER; note = 2'-O-methylcytidine-3'-phosphate
  modified_base 8: mod_base = OTHER; note = 2'-O-methylcytidine-3'-phosphate
  modified_base 9: mod_base = OTHER; note = 2'-O-methyladenosine-3'-phosphate
  modified_base 10: mod_base = OTHER; note = 2'-O-methyladenosine-3'-phosphate
  modified_base 11: mod_base = OTHER; note = 2'-O-methylguanosine-3'-phosphate
  modified_base 13: mod_base = OTHER; note = 2'-O-methyladenosine-3'-phosphate
  modified_base 14: mod_base = OTHER; note = 2'-fluorouridine-3'-phosphate
  modified_base 15: mod_base = OTHER; note = 2'-O-methylcytidine-3'-phosphate
  modified_base 16: mod_base = OTHER; note = 2'-O-methyluridine-3'-phosphate
  modified_base 17: mod_base = OTHER; note = 2'-O-methylguanosine-3'-phosphate
  modified_base 18: mod_base = OTHER; note = 2'-O-methyluridine-3'-phosphate
  modified_base 19: mod_base = OTHER; note = 2'-O-methylguanosine-3'-phosphate
  modified_base 20: mod_base = OTHER; note = 2'-O-methylguanosine-3'-phosphate
  modified_base 21: mod_base = OTHER; note = 2'-O-methyladenosine-3'-phosphorothioate
  modified_base 22: mod_base = OTHER; note = 2'-O-methyladenosine-3'-phosphorothioate
  modified_base 23: mod_base = OTHER; note = 2'-O-methyladenosine-3'-phosphate
  misc_feature 1: note = RNA
  misc_feature 2: note = DNA
  misc_feature 3..4: note = RNA
  misc_feature 5: note = DNA
  misc_feature 6: note = RNA
  misc_feature 7: note = DNA
  misc_feature 8..11: note = RNA
  misc_feature 12: note = DNA
  misc_feature 13..23: note = RNA
aaaatcacaagcatctgtggaaa

SEQ ID NO: 2642 - DNA, 23 bp, synthetic construct
  source 1..23: mol_type = other DNA
  modified_base 1: mod_base = OTHER; note = 2'-O-methyladenosine-3'-phosphorothioate
  modified_base 2: mod_base = OTHER; note = 2'-deoxyadenosine-3'-phosphorothioate
  modified_base 3: mod_base = OTHER; note = 2'-O-methyladenosine-3'-phosphate
  modified_base 4: mod_base = OTHER; note = 2'-O-methyladenosine-3'-phosphate
  modified_base 6: mod_base = OTHER; note = 2'-O-methyluridine-3'-phosphate
  modified_base 8: mod_base = OTHER; note = 2'-O-methyladenosine-3'-phosphate
  modified_base 9: mod_base = OTHER; note = 2'-O-methylcytidine-3'-phosphate
  modified_base 10: mod_base = OTHER; note = 2'-O-methyladenosine-3'-phosphate
  modified_base 11: mod_base = OTHER; note = 2'-O-methyladenosine-3'-phosphate
  modified_base 13: mod_base = OTHER; note = 2'-O-methylcytidine-3'-phosphate
  modified_base 14: mod_base = OTHER; note = 2'-fluoroadenosine-3'-phosphate
  modified_base 15: mod_base = OTHER; note = 2'-O-methyluridine-3'-phosphate
  modified_base 16: mod_base = OTHER; note = 2'-O-methylcytidine-3'-phosphate
  modified_base 17: mod_base = OTHER; note = 2'-O-methyluridine-3'-phosphate
  modified_base 18: mod_base = OTHER; note = 2'-O-methylguanosine-3'-phosphate
  modified_base 19: mod_base = OTHER; note = 2'-O-methyluridine-3'-phosphate
  modified_base 20: mod_base = OTHER; note = 2'-O-methylguanosine-3'-phosphate
  modified_base 21: mod_base = OTHER; note = 2'-O-methylguanosine-3'-phosphorothioate
  modified_base 22: mod_base = OTHER; note = 2'-O-methyladenosine-3'-phosphorothioate
  modified_base 23: mod_base = OTHER; note = 2'-O-methyladenosine-3'-phosphate
  misc_feature 1: note = RNA
  misc_feature 2: note = DNA
  misc_feature 3..4: note = RNA
  misc_feature 5: note = DNA
  misc_feature 6: note = RNA
  misc_feature 7: note = DNA
  misc_feature 8..11: note = RNA
  misc_feature 12: note = DNA
  misc_feature 13..23: note = RNA
aaaaatcacaagcatctgtggaa

SEQ ID NO: 2643 - DNA, 23 bp, synthetic construct
  source 1..23: mol_type = other DNA
  modified_base 1: mod_base = OTHER; note = 2'-O-methyladenosine-3'-phosphorothioate
  modified_base 2: mod_base = OTHER; note = 2'-deoxyadenosine-3'-phosphorothioate
  modified_base 3: mod_base = OTHER; note = 2'-O-methyladenosine-3'-phosphate
  modified_base 4: mod_base = OTHER; note = 2'-O-methyladenosine-3'-phosphate
  modified_base 6: mod_base = OTHER; note = 2'-O-methyladenosine-3'-phosphate
  modified_base 8: mod_base = OTHER; note = 2'-O-methylcytidine-3'-phosphate
  modified_base 9: mod_base = OTHER; note = 2'-O-methyladenosine-3'-phosphate
  modified_base 10: mod_base = OTHER; note = 2'-O-methylcytidine-3'-phosphate
  modified_base 11: mod_base = OTHER; note = 2'-O-methyladenosine-3'-phosphate
  modified_base 13: mod_base = OTHER; note = 2'-O-methylguanosine-3'-phosphate
  modified_base 14: mod_base = OTHER; note = 2'-fluorocytidine-3'-phosphate
  modified_base 15: mod_base = OTHER; note = 2'-O-methyladenosine-3'-phosphate
  modified_base 16: mod_base = OTHER; note = 2'-O-methyluridine-3'-phosphate
  modified_base 17: mod_base = OTHER; note = 2'-O-methylcytidine-3'-phosphate
  modified_base 18: mod_base = OTHER; note = 2'-O-methyluridine-3'-phosphate
  modified_base 19: mod_base = OTHER; note = 2'-O-methylguanosine-3'-phosphate
  modified_base 20: mod_base = OTHER; note = 2'-O-methyluridine-3'-phosphate
  modified_base 21: mod_base = OTHER; note = 2'-O-methylguanosine-3'-phosphorothioate
  modified_base 22: mod_base = OTHER; note = 2'-O-methylguanosine-3'-phosphorothioate
  modified_base 23: mod_base = OTHER; note = 2'-O-methyladenosine-3'-phosphate
  misc_feature 1: note = RNA
  misc_feature 2: note = DNA
  misc_feature 3..4: note = RNA
  misc_feature 5: note = DNA
  misc_feature 6: note = RNA
  misc_feature 7: note = DNA
  misc_feature 8..11: note = RNA
  misc_feature 12: note = DNA
  misc_feature 13..23: note = RNA
aaaaaatcacaagcatctgtgga

SEQ ID NO: 2644 - DNA, 23 bp, synthetic construct
  source 1..23: mol_type = other DNA
  modified_base 1: mod_base = OTHER; note = 2'-O-methyladenosine-3'-phosphorothioate
  modified_base 2: mod_base = OTHER; note = 2'-deoxyadenosine-3'-phosphorothioate
  modified_base 3: mod_base = OTHER; note = 2'-O-methyluridine-3'-phosphate
  modified_base 4: mod_base = OTHER; note = 2'-O-methyluridine-3'-phosphate
  modified_base 6: mod_base = OTHER; note = 2'-O-methyladenosine-3'-phosphate
  modified_base 8: mod_base = OTHER; note = 2'-O-methyladenosine-3'-phosphate
  modified_base 9: mod_base = OTHER; note = 2'-O-methylcytidine-3'-phosphate
  modified_base 10: mod_base = OTHER; note = 2'-O-methyladenosine-3'-phosphate
  modified_base 11: mod_base = OTHER; note = 2'-O-methylguanosine-3'-phosphate
  modified_base 13: mod_base = OTHER; note = 2'-O-methyladenosine-3'-phosphate
  modified_base 14: mod_base = OTHER; note = 2'-fluoroadenosine-3'-phosphate
  modified_base 15: mod_base = OTHER; note = 2'-O-methyluridine-3'-phosphate
  modified_base 16: mod_base = OTHER; note = 2'-O-methyluridine-3'-phosphate
  modified_base 17: mod_base = OTHER; note = 2'-O-methylcytidine-3'-phosphate
  modified_base 18: mod_base = OTHER; note = 2'-O-methyladenosine-3'-phosphate
  modified_base 19: mod_base = OTHER; note = 2'-O-methylguanosine-3'-phosphate
  modified_base 20: mod_base = OTHER; note = 2'-O-methylguanosine-3'-phosphate
  modified_base 21: mod_base = OTHER; note = 2'-O-methyluridine-3'-phosphorothioate
  modified_base 22: mod_base = OTHER; note = 2'-O-methylguanosine-3'-phosphorothioate
  modified_base 23: mod_base = OTHER; note = 2'-O-methylcytidine-3'-phosphate
  misc_feature 1: note = RNA
  misc_feature 2: note = DNA
  misc_feature 3..4: note = RNA
  misc_feature 5: note = DNA
  misc_feature 6: note = RNA
  misc_feature 7: note = DNA
  misc_feature 8..11: note = RNA
  misc_feature 12: note = DNA
  misc_feature 13..23: note = RNA
aattcaaacagaaattcaggtgc

SEQ ID NO: 2645 - DNA, 23 bp, synthetic construct
  source 1..23: mol_type = other DNA
  modified_base 1: mod_base = OTHER; note = 2'-O-methyladenosine-3'-phosphorothioate
  modified_base 2: mod_base = OTHER; note = 2'-deoxycytidine-3'-phosphorothioate
  modified_base 3: mod_base = OTHER; note = 2'-O-methyladenosine-3'-phosphate
  modified_base 4: mod_base = OTHER; note = 2'-O-methyluridine-3'-phosphate
  modified_base 6: mod_base = OTHER; note = 2'-O-methylcytidine-3'-phosphate
  modified_base 8: mod_base = OTHER; note = 2'-O-methyladenosine-3'-phosphate
  modified_base 9: mod_base = OTHER; note = 2'-O-methyladenosine-3'-phosphate
  modified_base 10: mod_base = OTHER; note = 2'-O-methylcytidine-3'-phosphate
  modified_base 11: mod_base = OTHER; note = 2'-O-methyladenosine-3'-phosphate
  modified_base 13: mod_base = OTHER; note = 2'-O-methyladenosine-3'-phosphate
  modified_base 14: mod_base = OTHER; note = 2'-fluoroadenosine-3'-phosphate
  modified_base 15: mod_base = OTHER; note = 2'-O-methyladenosine-3'-phosphate
  modified_base 16: mod_base = OTHER; note = 2'-O-methyluridine-3'-phosphate
  modified_base 17: mod_base = OTHER; note = 2'-O-methyluridine-3'-phosphate
  modified_base 18: mod_base = OTHER; note = 2'-O-methylcytidine-3'-phosphate
  modified_base 19: mod_base = OTHER; note = 2'-O-methyladenosine-3'-phosphate
  modified_base 20: mod_base = OTHER; note = 2'-O-methylguanosine-3'-phosphate
  modified_base 21: mod_base = OTHER; note = 2'-O-methylguanosine-3'-phosphorothioate
  modified_base 22: mod_base = OTHER; note = 2'-O-methyluridine-3'-phosphorothioate
  modified_base 23: mod_base = OTHER; note = 2'-O-methylguanosine-3'-phosphate
  misc_feature 1: note = RNA
  misc_feature 2: note = DNA
  misc_feature 3..4: note = RNA
  misc_feature 5: note = DNA
  misc_feature 6: note = RNA
  misc_feature 7: note = DNA
  misc_feature 8..11: note = RNA
  misc_feature 12: note = DNA
  misc_feature 13..23: note = RNA
acattcaaacagaaattcaggtg

SEQ ID NO: 2646 - DNA, 23 bp, synthetic construct
  source 1..23: mol_type = other DNA
  modified_base 1: mod_base = OTHER; note = 2'-O-methyladenosine-3'-phosphorothioate
  modified_base 2: mod_base = OTHER; note = 2'-deoxyadenosine-3'-phosphorothioate
  modified_base 3: mod_base = OTHER; note = 2'-O-methyladenosine-3'-phosphate
  modified_base 4: mod_base = OTHER; note = 2'-O-methyladenosine-3'-phosphate
  modified_base 6: mod_base = OTHER; note = 2'-O-methyladenosine-3'-phosphate
  modified_base 8: mod_base = OTHER; note = 2'-O-methylcytidine-3'-phosphate
  modified_base 9: mod_base = OTHER; note = 2'-O-methylcytidine-3'-phosphate
  modified_base 10: mod_base = OTHER; note = 2'-O-methyladenosine-3'-phosphate
  modified_base 11: mod_base = OTHER; note = 2'-O-methylguanosine-3'-phosphate
  modified_base 13: mod_base = OTHER; note = 2'-O-methyluridine-3'-phosphate
  modified_base 14: mod_base = OTHER; note = 2'-fluoroadenosine-3'-phosphate
  modified_base 15: mod_base = OTHER; note = 2'-O-methyluridine-3'-phosphate
  modified_base 16: mod_base = OTHER; note = 2'-O-methylguanosine-3'-phosphate
  modified_base 17: mod_base = OTHER; note = 2'-O-methylguanosine-3'-phosphate
  modified_base 18: mod_base = OTHER; note = 2'-O-methyluridine-3'-phosphate
  modified_base 19: mod_base = OTHER; note = 2'-O-methyluridine-3'-phosphate
  modified_base 20: mod_base = OTHER; note = 2'-O-methylcytidine-3'-phosphate
  modified_base 21: mod_base = OTHER; note = 2'-O-methylcytidine-3'-phosphorothioate
  modified_base 22: mod_base = OTHER; note = 2'-O-methylguanosine-3'-phosphorothioate
  modified_base 23: mod_base = OTHER; note = 2'-O-methylcytidine-3'-phosphate
  misc_feature 1: note = RNA
  misc_feature 2: note = DNA
  misc_feature 3..4: note = RNA
  misc_feature 5: note = DNA
  misc_feature 6: note = RNA
  misc_feature 7: note = DNA
  misc_feature 8..11: note = RNA
  misc_feature 12: note = DNA
  misc_feature 13..23: note = RNA
aaaataaccagctatggttccgc

SEQ ID NO: 2647 - DNA, 23 bp, synthetic construct
  source 1..23: mol_type = other DNA
  modified_base 1: mod_base = OTHER; note = 2'-O-methyladenosine-3'-phosphorothioate
  modified_base 2: mod_base = OTHER; note = 2'-deoxyguanosine-3'-phosphorothioate
  modified_base 3: mod_base = OTHER; note = 2'-O-methyladenosine-3'-phosphate
  modified_base 4: mod_base = OTHER; note = 2'-O-methyladenosine-3'-phosphate
  modified_base 6: mod_base = OTHER; note = 2'-O-methyluridine-3'-phosphate
  modified_base 8: mod_base = OTHER; note = 2'-O-methyladenosine-3'-phosphate
  modified_base 9: mod_base = OTHER; note = 2'-O-methylcytidine-3'-phosphate
  modified_base 10: mod_base = OTHER; note = 2'-O-methylcytidine-3'-phosphate
  modified_base 11: mod_base = OTHER; note = 2'-O-methyladenosine-3'-phosphate
  modified_base 13: mod_base = OTHER; note = 2'-O-methylcytidine-3'-phosphate
  modified_base 14: mod_base = OTHER; note = 2'-fluorouridine-3'-phosphate
  modified_base 15: mod_base = OTHER; note = 2'-O-methyladenosine-3'-phosphate
  modified_base 16: mod_base = OTHER; note = 2'-O-methyluridine-3'-phosphate
  modified_base 17: mod_base = OTHER; note = 2'-O-methylguanosine-3'-phosphate
  modified_base 18: mod_base = OTHER; note = 2'-O-methylguanosine-3'-phosphate
  modified_base 19: mod_base = OTHER; note = 2'-O-methyluridine-3'-phosphate
  modified_base 20: mod_base = OTHER; note = 2'-O-methyluridine-3'-phosphate
  modified_base 21: mod_base = OTHER; note = 2'-O-methylcytidine-3'-phosphorothioate
  modified_base 22: mod_base = OTHER; note = 2'-O-methylcytidine-3'-phosphorothioate
  modified_base 23: mod_base = OTHER; note = 2'-O-methylguanosine-3'-phosphate
  misc_feature 1: note = RNA
  misc_feature 2: note = DNA
  misc_feature 3..4: note = RNA
  misc_feature 5: note = DNA
  misc_feature 6: note = RNA
  misc_feature 7: note = DNA
  misc_feature 8..11: note = RNA
  misc_feature 12: note = DNA
  misc_feature 13..23: note = RNA
agaaataaccagctatggttccg

SEQ ID NO: 2648 - DNA, 23 bp, synthetic construct
  source 1..23: mol_type = other DNA
  modified_base 1: mod_base = OTHER; note = 2'-O-methyladenosine-3'-phosphorothioate
  modified_base 2: mod_base = OTHER; note = 2'-deoxyadenosine-3'-phosphorothioate
  modified_base 3: mod_base = OTHER; note = 2'-O-methylguanosine-3'-phosphate
  modified_base 4: mod_base = OTHER; note = 2'-O-methyladenosine-3'-phosphate
  modified_base 6: mod_base = OTHER; note = 2'-O-methyladenosine-3'-phosphate
  modified_base 8: mod_base = OTHER; note = 2'-O-methyladenosine-3'-phosphate
  modified_base 9: mod_base = OTHER; note = 2'-O-methyladenosine-3'-phosphate
  modified_base 10: mod_base = OTHER; note = 2'-O-methylcytidine-3'-phosphate
  modified_base 11: mod_base = OTHER; note = 2'-O-methylcytidine-3'-phosphate
  modified_base 13: mod_base = OTHER; note = 2'-O-methylguanosine-3'-phosphate
  modified_base 14: mod_base = OTHER; note = 2'-fluorocytidine-3'-phosphate
  modified_base 15: mod_base = OTHER; note = 2'-O-methyluridine-3'-phosphate
  modified_base 16: mod_base = OTHER; note = 2'-O-methyladenosine-3'-phosphate
  modified_base 17: mod_base = OTHER; note = 2'-O-methyluridine-3'-phosphate
  modified_base 18: mod_base = OTHER; note = 2'-O-methylguanosine-3'-phosphate
  modified_base 19: mod_base = OTHER; note = 2'-O-methylguanosine-3'-phosphate
  modified_base 20: mod_base = OTHER; note = 2'-O-methyluridine-3'-phosphate
  modified_base 21: mod_base = OTHER; note = 2'-O-methyluridine-3'-phosphorothioate
  modified_base 22: mod_base = OTHER; note = 2'-O-methylcytidine-3'-phosphorothioate
  modified_base 23: mod_base = OTHER; note = 2'-O-methylcytidine-3'-phosphate
  misc_feature 1: note = RNA
  misc_feature 2: note = DNA
  misc_feature 3..4: note = RNA
  misc_feature 5: note = DNA
  misc_feature 6: note = RNA
  misc_feature 7: note = DNA
  misc_feature 8..11: note = RNA
  misc_feature 12: note = DNA
  misc_feature 13..23: note = RNA
aagaaataaccagctatggttcc

SEQ ID NO: 2649 - DNA, 23 bp, synthetic construct
  source 1..23: mol_type = other DNA
  modified_base 1: mod_base = OTHER; note = 2'-O-methyladenosine-3'-phosphorothioate
  modified_base 2: mod_base = OTHER; note = 2'-deoxyguanosine-3'-phosphorothioate
  modified_base 3: mod_base = OTHER; note = 2'-O-methyladenosine-3'-phosphate
  modified_base 4: mod_base = OTHER; note = 2'-O-methylguanosine-3'-phosphate
  modified_base 6: mod_base = OTHER; note = 2'-O-methyladenosine-3'-phosphate
  modified_base 8: mod_base = OTHER; note = 2'-O-methyluridine-3'-phosphate
  modified_base 9: mod_base = OTHER; note = 2'-O-methyladenosine-3'-phosphate
  modified_base 10: mod_base = OTHER; note = 2'-O-methyladenosine-3'-phosphate
  modified_base 11: mod_base = OTHER; note = 2'-O-methylcytidine-3'-phosphate
  modified_base 13: mod_base = OTHER; note = 2'-O-methyladenosine-3'-phosphate
  modified_base 14: mod_base = OTHER; note = 2'-fluoroguanosine-3'-phosphate
  modified_base 15: mod_base = OTHER; note = 2'-O-methylcytidine-3'-phosphate
  modified_base 16: mod_base = OTHER; note = 2'-O-methyluridine-3'-phosphate
  modified_base 17: mod_base = OTHER; note = 2'-O-methyladenosine-3'-phosphate
  modified_base 18: mod_base = OTHER; note = 2'-O-methyluridine-3'-phosphate
  modified_base 19: mod_base = OTHER; note = 2'-O-methylguanosine-3'-phosphate
  modified_base 20: mod_base = OTHER; note = 2'-O-methylguanosine-3'-phosphate
  modified_base 21: mod_base = OTHER; note = 2'-O-methyluridine-3'-phosphorothioate
  modified_base 22: mod_base = OTHER; note = 2'-O-methyluridine-3'-phosphorothioate
  modified_base 23: mod_base = OTHER; note = 2'-O-methylcytidine-3'-phosphate
  misc_feature 1: note = RNA
  misc_feature 2: note = DNA
  misc_feature 3..4: note = RNA
  misc_feature 5: note = DNA
  misc_feature 6: note = RNA
  misc_feature 7: note = DNA
  misc_feature 8..11: note = RNA
  misc_feature 12: note = DNA
  misc_feature 13..23: note = RNA
agagaaataaccagctatggttc

SEQ ID NO: 2650 - DNA, 23 bp, synthetic construct
  source 1..23: mol_type = other DNA
  modified_base 1: mod_base = OTHER; note = 2'-O-methyladenosine-3'-phosphorothioate
  modified_base 2: mod_base = OTHER; note = 2'-deoxyguanosine-3'-phosphorothioate
  modified_base 3: mod_base = OTHER; note = 2'-O-methylguanosine-3'-phosphate
  modified_base 4: mod_base = OTHER; note = 2'-O-methyladenosine-3'-phosphate
  modified_base 6: mod_base = OTHER; note = 2'-O-methyladenosine-3'-phosphate
  modified_base 8: mod_base = OTHER; note = 2'-O-methyladenosine-3'-phosphate
  modified_base 9: mod_base = OTHER; note = 2'-O-methyluridine-3'-phosphate
  modified_base 10: mod_base = OTHER; note = 2'-O-methyladenosine-3'-phosphate
  modified_base 11: mod_base = OTHER; note = 2'-O-methyladenosine-3'-phosphate
  modified_base 13: mod_base = OTHER; note = 2'-O-methylcytidine-3'-phosphate
  modified_base 14: mod_base = OTHER; note = 2'-fluoroadenosine-3'-phosphate
  modified_base 15: mod_base = OTHER; note = 2'-O-methylguanosine-3'-phosphate
  modified_base 16: mod_base = OTHER; note = 2'-O-methylcytidine-3'-phosphate
  modified_base 17: mod_base = OTHER; note = 2'-O-methyluridine-3'-phosphate
  modified_base 18: mod_base = OTHER; note = 2'-O-methyladenosine-3'-phosphate
  modified_base 19: mod_base = OTHER; note = 2'-O-methyluridine-3'-phosphate
  modified_base 20: mod_base = OTHER; note = 2'-O-methylguanosine-3'-phosphate
  modified_base 21: mod_base = OTHER; note = 2'-O-methylguanosine-3'-phosphorothioate
  modified_base 22: mod_base = OTHER; note = 2'-O-methyluridine-3'-phosphorothioate
  modified_base 23: mod_base = OTHER; note = 2'-O-methyluridine-3'-phosphate
  misc_feature 1: note = RNA
  misc_feature 2: note = DNA
  misc_feature 3..4: note = RNA
  misc_feature 5: note = DNA
  misc_feature 6: note = RNA
  misc_feature 7: note = DNA
  misc_feature 8..11: note = RNA
  misc_feature 12: note = DNA
  misc_feature 13..23: note = RNA
aggagaaataaccagctatggtt

SEQ ID NO: 2651 - DNA, 23 bp, synthetic construct
  source 1..23: mol_type = other DNA
  modified_base 1: mod_base = OTHER; note = 2'-O-methyladenosine-3'-phosphorothioate
  modified_base 2: mod_base = OTHER; note = 2'-deoxycytidine-3'-phosphorothioate
  modified_base 3: mod_base = OTHER; note = 2'-O-methylguanosine-3'-phosphate
  modified_base 4: mod_base = OTHER; note = 2'-O-methyluridine-3'-phosphate
  modified_base 6: mod_base = OTHER; note = 2'-O-methyluridine-3'-phosphate
  modified_base 8: mod_base = OTHER; note = 2'-O-methyluridine-3'-phosphate
  modified_base 9: mod_base = OTHER; note = 2'-O-methyluridine-3'-phosphate
  modified_base 10: mod_base = OTHER; note = 2'-O-methyladenosine-3'-phosphate
  modified_base 11: mod_base = OTHER; note = 2'-O-methylcytidine-3'-phosphate
  modified_base 13: mod_base = OTHER; note = 2'-O-methyladenosine-3'-phosphate
  modified_base 14: mod_base = OTHER; note = 2'-fluoroadenosine-3'-phosphate
  modified_base 15: mod_base = OTHER; note = 2'-O-methylcytidine-3'-phosphate
  modified_base 16: mod_base = OTHER; note = 2'-O-methyladenosine-3'-phosphate
  modified_base 17: mod_base = OTHER; note = 2'-O-methylcytidine-3'-phosphate
  modified_base 18: mod_base = OTHER; note = 2'-O-methyladenosine-3'-phosphate
  modified_base 19: mod_base = OTHER; note = 2'-O-methyladenosine-3'-phosphate
  modified_base 20: mod_base = OTHER; note = 2'-O-methylguanosine-3'-phosphate
  modified_base 21: mod_base = OTHER; note = 2'-O-methylguanosine-3'-phosphorothioate
  modified_base 22: mod_base = OTHER; note = 2'-O-methylguanosine-3'-phosphorothioate
  modified_base 23: mod_base = OTHER; note = 2'-O-methyladenosine-3'-phosphate
  misc_feature 1: note = RNA
  misc_feature 2: note = DNA
  misc_feature 3..4: note = RNA
  misc_feature 5: note = DNA
  misc_feature 6: note = RNA
  misc_feature 7: note = DNA
  misc_feature 8..11: note = RNA
  misc_feature 12: note = DNA
  misc_feature 13..23: note = RNA
acgtttattactaacacaaggga

SEQ ID NO: 2652 - DNA, 23 bp, synthetic construct
  source 1..23: mol_type = other DNA
  modified_base 1: mod_base = OTHER; note = 2'-O-methyladenosine-3'-phosphorothioate
  modified_base 2: mod_base = OTHER; note = 2'-deoxyadenosine-3'-phosphorothioate
  modified_base 3: mod_base = OTHER; note = 2'-O-methylcytidine-3'-phosphate
  modified_base 4: mod_base = OTHER; note = 2'-O-methylguanosine-3'-phosphate
  modified_base 6: mod_base = OTHER; note = 2'-O-methyluridine-3'-phosphate
  modified_base 8: mod_base = OTHER; note = 2'-O-methyladenosine-3'-phosphate
  modified_base 9: mod_base = OTHER; note = 2'-O-methyluridine-3'-phosphate
  modified_base 10: mod_base = OTHER; note = 2'-O-methyluridine-3'-phosphate
  modified_base 11: mod_base = OTHER; note = 2'-O-methyladenosine-3'-phosphate
  modified_base 13: mod_base = OTHER; note = 2'-O-methyluridine-3'-phosphate
  modified_base 14: mod_base = OTHER; note = 2'-fluoroadenosine-3'-phosphate
  modified_base 15: mod_base = OTHER; note = 2'-O-methyladenosine-3'-phosphate
  modified_base 16: mod_base = OTHER; note = 2'-O-methylcytidine-3'-phosphate
  modified_base 17: mod_base = OTHER; note = 2'-O-methyladenosine-3'-phosphate
  modified_base 18: mod_base = OTHER; note = 2'-O-methylcytidine-3'-phosphate
  modified_base 19: mod_base = OTHER; note = 2'-O-methyladenosine-3'-phosphate
  modified_base 20: mod_base = OTHER; note = 2'-O-methyladenosine-3'-phosphate
  modified_base 21: mod_base = OTHER; note = 2'-O-methylguanosine-3'-phosphorothioate
  modified_base 22: mod_base = OTHER; note = 2'-O-methylguanosine-3'-phosphorothioate
  modified_base 23: mod_base = OTHER; note = 2'-O-methylguanosine-3'-phosphate
  misc_feature 1: note = RNA
  misc_feature 2: note = DNA
  misc_feature 3..4: note = RNA
  misc_feature 5: note = DNA
  misc_feature 6: note = RNA
  misc_feature 7: note = DNA
  misc_feature 8..11: note = RNA
  misc_feature 12: note = DNA
  misc_feature 13..23: note = RNA
aacgtttattactaacacaaggg

SEQ ID NO: 2653 - DNA, 23 bp, synthetic construct
  source 1..23: mol_type = other DNA
  modified_base 1: mod_base = OTHER; note = 2'-O-methyladenosine-3'-phosphorothioate
  modified_base 2: mod_base = OTHER; note = 2'-deoxyguanosine-3'-phosphorothioate
  modified_base 3: mod_base = OTHER; note = 2'-O-methyladenosine-3'-phosphate
  modified_base 4: mod_base = OTHER; note = 2'-O-methylcytidine-3'-phosphate
  modified_base 6: mod_base = OTHER; note = 2'-O-methyluridine-3'-phosphate
  modified_base 8: mod_base = OTHER; note = 2'-O-methyluridine-3'-phosphate
  modified_base 9: mod_base = OTHER; note = 2'-O-methyladenosine-3'-phosphate
  modified_base 10: mod_base = OTHER; note = 2'-O-methyluridine-3'-phosphate
  modified_base 11: mod_base = OTHER; note = 2'-O-methyluridine-3'-phosphate
  modified_base 13: mod_base = OTHER; note = 2'-O-methylcytidine-3'-phosphate
  modified_base 14: mod_base = OTHER; note = 2'-fluorouridine-3'-phosphate
  modified_base 15: mod_base = OTHER; note = 2'-O-methyladenosine-3'-phosphate
  modified_base 16: mod_base = OTHER; note = 2'-O-methyladenosine-3'-phosphate
  modified_base 17: mod_base = OTHER; note = 2'-O-methylcytidine-3'-phosphate
  modified_base 18: mod_base = OTHER; note = 2'-O-methyladenosine-3'-phosphate
  modified_base 19: mod_base = OTHER; note = 2'-O-methylcytidine-3'-phosphate
  modified_base 20: mod_base = OTHER; note = 2'-O-methyladenosine-3'-phosphate
  modified_base 21: mod_base = OTHER; note = 2'-O-methyladenosine-3'-phosphorothioate
  modified_base 22: mod_base = OTHER; note = 2'-O-methylguanosine-3'-phosphorothioate
  modified_base 23: mod_base = OTHER; note = 2'-O-methylguanosine-3'-phosphate
  misc_feature 1: note = RNA
  misc_feature 2: note = DNA
  misc_feature 3..4: note = RNA
  misc_feature 5: note = DNA
  misc_feature 6: note = RNA
  misc_feature 7: note = DNA
  misc_feature 8..11: note = RNA
  misc_feature 12: note = DNA
  misc_feature 13..23: note = RNA
agacgtttattactaacacaagg

SEQ ID NO: 2654 - DNA, 23 bp, synthetic construct
  source 1..23: mol_type = other DNA
  modified_base 1: mod_base = OTHER; note = 2'-O-methyladenosine-3'-phosphorothioate
  modified_base 2: mod_base = OTHER; note = 2'-deoxyadenosine-3'-phosphorothioate
  modified_base 3: mod_base = OTHER; note = 2'-O-methylguanosine-3'-phosphate
  modified_base 4: mod_base = OTHER; note = 2'-O-methyladenosine-3'-phosphate
  modified_base 6: mod_base = OTHER; note = 2'-O-methylguanosine-3'-phosphate
  modified_base 8: mod_base = OTHER; note = 2'-O-methyluridine-3'-phosphate
  modified_base 9: mod_base = OTHER; note = 2'-O-methyluridine-3'-phosphate
  modified_base 10: mod_base = OTHER; note = 2'-O-methyladenosine-3'-phosphate
  modified_base 11: mod_base = OTHER; note = 2'-O-methyluridine-3'-phosphate
  modified_base 13: mod_base = OTHER; note = 2'-O-methyladenosine-3'-phosphate
  modified_base 14: mod_base = OTHER; note = 2'-fluorocytidine-3'-phosphate
  modified_base 15: mod_base = OTHER; note = 2'-O-methyluridine-3'-phosphate
  modified_base 16: mod_base = OTHER; note = 2'-O-methyladenosine-3'-phosphate
  modified_base 17: mod_base = OTHER; note = 2'-O-methyladenosine-3'-phosphate
  modified_base 18: mod_base = OTHER; note = 2'-O-methylcytidine-3'-phosphate
  modified_base 19: mod_base = OTHER; note = 2'-O-methyladenosine-3'-phosphate
  modified_base 20: mod_base = OTHER; note = 2'-O-methylcytidine-3'-phosphate
  modified_base 21: mod_base = OTHER; note = 2'-O-methyladenosine-3'-phosphorothioate
  modified_base 22: mod_base = OTHER; note = 2'-O-methyladenosine-3'-phosphorothioate
  modified_base 23: mod_base = OTHER; note = 2'-O-methylguanosine-3'-phosphate
  misc_feature 1: note = RNA
  misc_feature 2: note = DNA
  misc_feature 3..4: note = RNA
  misc_feature 5: note = DNA
  misc_feature 6: note = RNA
  misc_feature 7: note = DNA
  misc_feature 8..11: note = RNA
  misc_feature 12: note = DNA
  misc_feature 13..23: note = RNA
aagacgtttattactaacacaag

SEQ ID NO: 2655 - DNA, 23 bp, synthetic construct
  source 1..23: mol_type = other DNA
  modified_base 1: mod_base = OTHER; note = 2'-O-methyladenosine-3'-phosphorothioate
  modified_base 2: mod_base = OTHER; note = 2'-deoxyadenosine-3'-phosphorothioate
  modified_base 3: mod_base = OTHER; note = 2'-O-methyladenosine-3'-phosphate
  modified_base 4: mod_base = OTHER; note = 2'-O-methylguanosine-3'-phosphate
  modified_base 6: mod_base = OTHER; note = 2'-O-methylcytidine-3'-phosphate
  modified_base 8: mod_base = OTHER; note = 2'-O-methyluridine-3'-phosphate
  modified_base 9: mod_base = OTHER; note = 2'-O-methyluridine-3'-phosphate
  modified_base 10: mod_base = OTHER; note = 2'-O-methyluridine-3'-phosphate
  modified_base 11: mod_base = OTHER; note = 2'-O-methyladenosine-3'-phosphate
  modified_base 13: mod_base = OTHER; note = 2'-O-methyluridine-3'-phosphate
  modified_base 14: mod_base = OTHER; note = 2'-fluoroadenosine-3'-phosphate
  modified_base 15: mod_base = OTHER; note = 2'-O-methylcytidine-3'-phosphate
  modified_base 16: mod_base = OTHER; note = 2'-O-methyluridine-3'-phosphate
  modified_base 17: mod_base = OTHER; note = 2'-O-methyladenosine-3'-phosphate
  modified_base 18: mod_base = OTHER; note = 2'-O-methyladenosine-3'-phosphate
  modified_base 19: mod_base = OTHER; note = 2'-O-methylcytidine-3'-phosphate
  modified_base 20: mod_base = OTHER; note = 2'-O-methyladenosine-3'-phosphate
  modified_base 21: mod_base = OTHER; note = 2'-O-methylcytidine-3'-phosphorothioate
  modified_base 22: mod_base = OTHER; note = 2'-O-methyladenosine-3'-phosphorothioate
  modified_base 23: mod_base = OTHER; note = 2'-O-methyladenosine-3'-phosphate
  misc_feature 1: note = RNA
  misc_feature 2: note = DNA
  misc_feature 3..4: note = RNA
  misc_feature 5: note = DNA
  misc_feature 6: note = RNA
  misc_feature 7: note = DNA
  misc_feature 8..11: note = RNA
  misc_feature 12: note = DNA
  misc_feature 13..23: note = RNA
aaagacgtttattactaacacaa

SEQ ID NO: 2656 - DNA, 23 bp, synthetic construct
  source 1..23: mol_type = other DNA
  modified_base 1: mod_base = OTHER; note = 2'-O-methyladenosine-3'-phosphorothioate
  modified_base 2: mod_base = OTHER; note = 2'-deoxycytidine-3'-phosphorothioate
  modified_base 3: mod_base = OTHER; note = 2'-O-methyladenosine-3'-phosphate
  modified_base 4: mod_base = OTHER; note = 2'-O-methyladenosine-3'-phosphate
  modified_base 6: mod_base = OTHER; note = 2'-O-methyladenosine-3'-phosphate
  modified_base 8: mod_base = OTHER; note = 2'-O-methylguanosine-3'-phosphate
  modified_base 9: mod_base = OTHER; note = 2'-O-methyluridine-3'-phosphate
  modified_base 10: mod_base = OTHER; note = 2'-O-methyluridine-3'-phosphate
  modified_base 11: mod_base = OTHER; note = 2'-O-methyluridine-3'-phosphate
  modified_base 13: mod_base = OTHER; note = 2'-O-methyluridine-3'-phosphate
  modified_base 14: mod_base = OTHER; note = 2'-fluorouridine-3'-phosphate
  modified_base 15: mod_base = OTHER; note = 2'-O-methyladenosine-3'-phosphate
  modified_base 16: mod_base = OTHER; note = 2'-O-methylcytidine-3'-phosphate
  modified_base 17: mod_base = OTHER; note = 2'-O-methyluridine-3'-phosphate
  modified_base 18: mod_base = OTHER; note = 2'-O-methyladenosine-3'-phosphate
  modified_base 19: mod_base = OTHER; note = 2'-O-methyladenosine-3'-phosphate
  modified_base 20: mod_base = OTHER; note = 2'-O-methylcytidine-3'-phosphate
  modified_base 21: mod_base = OTHER; note = 2'-O-methyladenosine-3'-phosphorothioate
  modified_base 22: mod_base = OTHER; note = 2'-O-methylcytidine-3'-phosphorothioate
  modified_base 23: mod_base = OTHER; note = 2'-O-methyladenosine-3'-phosphate
  misc_feature 1: note = RNA
  misc_feature 2: note = DNA
  misc_feature 3..4: note = RNA
  misc_feature 5: note = DNA
  misc_feature 6: note = RNA
  misc_feature 7: note = DNA
  misc_feature 8..11: note = RNA
  misc_feature 12: note = DNA
  misc_feature 13..23: note = RNA
acaagacgtttattactaacaca

SEQ ID NO: 2657 - DNA, 23 bp, synthetic construct
  source 1..23: mol_type = other DNA
  modified_base 1: mod_base = OTHER; note = 2'-O-methyladenosine-3'-phosphorothioate
  modified_base 2: mod_base = OTHER; note = 2'-deoxyguanosine-3'-phosphorothioate
  modified_base 3: mod_base = OTHER; note = 2'-O-methylcytidine-3'-phosphate
  modified_base 4: mod_base = OTHER; note = 2'-O-methyladenosine-3'-phosphate
  modified_base 6: mod_base = OTHER; note = 2'-O-methylguanosine-3'-phosphate
  modified_base 8: mod_base = OTHER; note = 2'-O-methylcytidine-3'-phosphate
  modified_base 9: mod_base = OTHER; note = 2'-O-methylguanosine-3'-phosphate
  modified_base 10: mod_base = OTHER; note = 2'-O-methyluridine-3'-phosphate
  modified_base 11: mod_base = OTHER; note = 2'-O-methyluridine-3'-phosphate
  modified_base 13: mod_base = OTHER; note = 2'-O-methyladenosine-3'-phosphate
  modified_base 14: mod_base = OTHER; note = 2'-fluorouridine-3'-phosphate
  modified_base 15: mod_base = OTHER; note = 2'-O-methyluridine-3'-phosphate
  modified_base 16: mod_base = OTHER; note = 2'-O-methyladenosine-3'-phosphate
  modified_base 17: mod_base = OTHER; note = 2'-O-methylcytidine-3'-phosphate
  modified_base 18: mod_base = OTHER; note = 2'-O-methyluridine-3'-phosphate
  modified_base 19: mod_base = OTHER; note = 2'-O-methyladenosine-3'-phosphate
  modified_base 20: mod_base = OTHER; note = 2'-O-methyladenosine-3'-phosphate
  modified_base 21: mod_base = OTHER; note = 2'-O-methylcytidine-3'-phosphorothioate
  modified_base 22: mod_base = OTHER; note = 2'-O-methyladenosine-3'-phosphorothioate
  modified_base 23: mod_base = OTHER; note = 2'-O-methylcytidine-3'-phosphate
  misc_feature 1: note = RNA
  misc_feature 2: note = DNA
  misc_feature 3..4: note = RNA
  misc_feature 5: note = DNA
  misc_feature 6: note = RNA
  misc_feature 7: note = DNA
  misc_feature 8..11: note = RNA
  misc_feature 12: note = DNA
  misc_feature 13..23: note = RNA
agcaagacgtttattactaacac

SEQ ID NO: 2658 - DNA, 23 bp, synthetic construct
  source 1..23: mol_type = other DNA
  modified_base 1: mod_base = OTHER; note = 2'-O-methyladenosine-3'-phosphorothioate
  modified_base 2: mod_base = OTHER; note = 2'-deoxythimidine-3'-phosphorothioate
  modified_base 3: mod_base = OTHER; note = 2'-O-methyluridine-3'-phosphate
  modified_base 4: mod_base = OTHER; note = 2'-O-methyladenosine-3'-phosphate
  modified_base 6: mod_base = OTHER; note = 2'-O-methyladenosine-3'-phosphate
  modified_base 8: mod_base = OTHER; note = 2'-O-methylguanosine-3'-phosphate
  modified_base 9: mod_base = OTHER; note = 2'-O-methyladenosine-3'-phosphate
  modified_base 10: mod_base = OTHER; note = 2'-O-methyladenosine-3'-phosphate
  modified_base 11: mod_base = OTHER; note = 2'-O-methyladenosine-3'-phosphate
  modified_base 13: mod_base = OTHER; note = 2'-O-methylguanosine-3'-phosphate
  modified_base 14: mod_base = OTHER; note = 2'-fluoroguanosine-3'-phosphate
  modified_base 15: mod_base = OTHER; note = 2'-O-methyluridine-3'-phosphate
  modified_base 16: mod_base = OTHER; note = 2'-O-methylguanosine-3'-phosphate
  modified_base 17: mod_base = OTHER; note = 2'-O-methylguanosine-3'-phosphate
  modified_base 18: mod_base = OTHER; note = 2'-O-methylguanosine-3'-phosphate
  modified_base 19: mod_base = OTHER; note = 2'-O-methyladenosine-3'-phosphate
  modified_base 20: mod_base = OTHER; note = 2'-O-methylguanosine-3'-phosphate
  modified_base 21: mod_base = OTHER; note = 2'-O-methyladenosine-3'-phosphorothioate
  modified_base 22: mod_base = OTHER; note = 2'-O-methylcytidine-3'-phosphorothioate
  modified_base 23: mod_base = OTHER; note = 2'-O-methyluridine-3'-phosphate
  misc_feature 1: note = RNA
  misc_feature 2: note = DNA
  misc_feature 3..4: note = RNA
  misc_feature 5: note = DNA
  misc_feature 6: note = RNA
  misc_feature 7: note = DNA
  misc_feature 8..11: note = RNA
  misc_feature 12: note = DNA
  misc_feature 13..23: note = RNA
attagaagaaaaggtgggagact

SEQ ID NO: 2659 - DNA, 23 bp, synthetic construct
  source 1..23: mol_type = other DNA
  modified_base 1: mod_base = OTHER; note = 2'-O-methyladenosine-3'-phosphorothioate
  modified_base 2: mod_base = OTHER; note = 2'-deoxyguanosine-3'-phosphorothioate
  modified_base 3: mod_base = OTHER; note = 2'-O-methyluridine-3'-phosphate
  modified_base 4: mod_base = OTHER; note = 2'-O-methyluridine-3'-phosphate
  modified_base 6: mod_base = OTHER; note = 2'-O-methylcytidine-3'-phosphate
  modified_base 8: mod_base = OTHER; note = 2'-O-methyluridine-3'-phosphate
  modified_base 9: mod_base = OTHER; note = 2'-O-methylcytidine-3'-phosphate
  modified_base 10: mod_base = OTHER; note = 2'-O-methyladenosine-3'-phosphate
  modified_base 11: mod_base = OTHER; note = 2'-O-methyluridine-3'-phosphate
  modified_base 13: mod_base = OTHER; note = 2'-O-methylcytidine-3'-phosphate
  modified_base 14: mod_base = OTHER; note = 2'-fluoroadenosine-3'-phosphate
  modified_base 15: mod_base = OTHER; note = 2'-O-methylguanosine-3'-phosphate
  modified_base 16: mod_base = OTHER; note = 2'-O-methyluridine-3'-phosphate
  modified_base 17: mod_base = OTHER; note = 2'-O-methyluridine-3'-phosphate
  modified_base 18: mod_base = OTHER; note = 2'-O-methylguanosine-3'-phosphate
  modified_base 19: mod_base = OTHER; note = 2'-O-methyladenosine-3'-phosphate
  modified_base 20: mod_base = OTHER; note = 2'-O-methylguanosine-3'-phosphate
  modified_base 21: mod_base = OTHER; note = 2'-O-methylguanosine-3'-phosphorothioate
  modified_base 22: mod_base = OTHER; note = 2'-O-methylguanosine-3'-phosphorothioate
  modified_base 23: mod_base = OTHER; note = 2'-O-methyladenosine-3'-phosphate
  misc_feature 1: note = RNA
  misc_feature 2: note = DNA
  misc_feature 3..4: note = RNA
  misc_feature 5: note = DNA
  misc_feature 6: note = RNA
  misc_feature 7: note = DNA
  misc_feature 8..11: note = RNA
  misc_feature 12: note = DNA
  misc_feature 13..23: note = RNA
agtttcttcatccagttgaggga

SEQ ID NO: 2660 - RNA, 23 nt, synthetic construct
  source 1..23: mol_type = other RNA
tgagcctgagggccaccatcctc

SEQ ID NO: 2661 - RNA, 23 nt, synthetic construct
  source 1..23: mol_type = other RNA
agcctgagggccaccatcctctg

SEQ ID NO: 2662 - RNA, 23 nt, synthetic construct
  source 1..23: mol_type = other RNA
tgagggccaccatcctctgcctc

SEQ ID NO: 2663 - RNA, 23 nt, synthetic construct
  source 1..23: mol_type = other RNA
aggtgaccgggtgtacatacacc

SEQ ID NO: 2664 - RNA, 23 nt, synthetic construct
  source 1..23: mol_type = other RNA
cccttccacctcgtcatccacaa

SEQ ID NO: 2665 - RNA, 23 nt, synthetic construct
  source 1..23: mol_type = other RNA
ccttccacctcgtcatccacaat

SEQ ID NO: 2666 - RNA, 23 nt, synthetic construct
  source 1..23: mol_type = other RNA
cttccacctcgtcatccacaatg

SEQ ID NO: 2667 - RNA, 23 nt, synthetic construct
  source 1..23: mol_type = other RNA
ttccacctcgtcatccacaatga

SEQ ID NO: 2668 - RNA, 23 nt, synthetic construct
  source 1..23: mol_type = other RNA
tccacctcgtcatccacaatgag

SEQ ID NO: 2669 - RNA, 23 nt, synthetic construct
  source 1..23: mol_type = other RNA
ccacctcgtcatccacaatgaga

SEQ ID NO: 2670 - RNA, 23 nt, synthetic construct
  source 1..23: mol_type = other RNA
cacctcgtcatccacaatgagag

SEQ ID NO: 2671 - RNA, 23 nt, synthetic construct
  source 1..23: mol_type = other RNA
acctcgtcatccacaatgagagt

SEQ ID NO: 2672 - RNA, 23 nt, synthetic construct
  source 1..23: mol_type = other RNA
cctcgtcatccacaatgagagta

SEQ ID NO: 2673 - RNA, 23 nt, synthetic construct
  source 1..23: mol_type = other RNA
ctcgtcatccacaatgagagtac

SEQ ID NO: 2674 - RNA, 23 nt, synthetic construct
  source 1..23: mol_type = other RNA
tcgtcatccacaatgagagtacc

SEQ ID NO: 2675 - RNA, 23 nt, synthetic construct
  source 1..23: mol_type = other RNA
cgtcatccacaatgagagtacct

SEQ ID NO: 2676 - RNA, 23 nt, synthetic construct
  source 1..23: mol_type = other RNA
gtcatccacaatgagagtacctg

SEQ ID NO: 2677 - RNA, 23 nt, synthetic construct
  source 1..23: mol_type = other RNA
catccacaatgagagtacctgtg

SEQ ID NO: 2678 - RNA, 23 nt, synthetic construct
  source 1..23: mol_type = other RNA
atccacaatgagagtacctgtga

SEQ ID NO: 2679 - RNA, 23 nt, synthetic construct
  source 1..23: mol_type = other RNA
tccacaatgagagtacctgtgag

SEQ ID NO: 2680 - RNA, 23 nt, synthetic construct
  source 1..23: mol_type = other RNA
cacaatgagagtacctgtgagca

SEQ ID NO: 2681 - RNA, 23 nt, synthetic construct
  source 1..23: mol_type = other RNA
acaatgagagtacctgtgagcag

SEQ ID NO: 2682 - RNA, 23 nt, synthetic construct
  source 1..23: mol_type = other RNA
caatgagagtacctgtgagcagc

SEQ ID NO: 2683 - RNA, 23 nt, synthetic construct
  source 1..23: mol_type = other RNA
aatgagagtacctgtgagcagct

SEQ ID NO: 2684 - RNA, 23 nt, synthetic construct
  source 1..23: mol_type = other RNA
atgagagtacctgtgagcagctg

SEQ ID NO: 2685 - RNA, 23 nt, synthetic construct
  source 1..23: mol_type = other RNA
tgagagtacctgtgagcagctgg

SEQ ID NO: 2686 - RNA, 23 nt, synthetic construct
  source 1..23: mol_type = other RNA
gagagtacctgtgagcagctggc

SEQ ID NO: 2687 - RNA, 23 nt, synthetic construct
  source 1..23: mol_type = other RNA
agagtacctgtgagcagctggca

SEQ ID NO: 2688 - RNA, 23 nt, synthetic construct
  source 1..23: mol_type = other RNA
gagtacctgtgagcagctggcaa

SEQ ID NO: 2689 - RNA, 23 nt, synthetic construct
  source 1..23: mol_type = other RNA
agtacctgtgagcagctggcaaa

SEQ ID NO: 2690 - RNA, 23 nt, synthetic construct
  source 1..23: mol_type = other RNA
gcaatggtcgggatgctggccaa

SEQ ID NO: 2691 - RNA, 23 nt, synthetic construct
  source 1..23: mol_type = other RNA
caatggtcgggatgctggccaac

SEQ ID NO: 2692 - RNA, 23 nt, synthetic construct
  source 1..23: mol_type = other RNA
aatggtcgggatgctggccaact

SEQ ID NO: 2693 - RNA, 23 nt, synthetic construct
  source 1..23: mol_type = other RNA
atggtcgggatgctggccaactt

SEQ ID NO: 2694 - RNA, 23 nt, synthetic construct
  source 1..23: mol_type = other RNA
tggtcgggatgctggccaacttc

SEQ ID NO: 2695 - RNA, 23 nt, synthetic construct
  source 1..23: mol_type = other RNA
ggtcgggatgctggccaacttct

SEQ ID NO: 2696 - RNA, 23 nt, synthetic construct
  source 1..23: mol_type = other RNA
gtcgggatgctggccaacttctt

SEQ ID NO: 2697 - RNA, 23 nt, synthetic construct
  source 1..23: mol_type = other RNA
cgggatgctggccaacttcttgg

SEQ ID NO: 2698 - RNA, 23 nt, synthetic construct
  source 1..23: mol_type = other RNA
gggatgctggccaacttcttggg

SEQ ID NO: 2699 - RNA, 23 nt, synthetic construct
  source 1..23: mol_type = other RNA
tgctggccaacttcttgggcttc

SEQ ID NO: 2700 - RNA, 23 nt, synthetic construct
  source 1..23: mol_type = other RNA
tggccaacttcttgggcttccgt

SEQ ID NO: 2701 - RNA, 23 nt, synthetic construct
  source 1..23: mol_type = other RNA
ggccaacttcttgggcttccgta

SEQ ID NO: 2702 - RNA, 23 nt, synthetic construct
  source 1..23: mol_type = other RNA
aacttcttgggcttccgtatata

SEQ ID NO: 2703 - RNA, 23 nt, synthetic construct
  source 1..23: mol_type = other RNA
acttcttgggcttccgtatatat

SEQ ID NO: 2704 - RNA, 23 nt, synthetic construct
  source 1..23: mol_type = other RNA
ttcttgggcttccgtatatatgg

SEQ ID NO: 2705 - RNA, 23 nt, synthetic construct
  source 1..23: mol_type = other RNA
cttgggcttccgtatatatggca

SEQ ID NO: 2706 - RNA, 23 nt, synthetic construct
  source 1..23: mol_type = other RNA
ttgggcttccgtatatatggcat

SEQ ID NO: 2707 - RNA, 23 nt, synthetic construct
  source 1..23: mol_type = other RNA
tgggcttccgtatatatggcatg

SEQ ID NO: 2708 - RNA, 23 nt, synthetic construct
  source 1..23: mol_type = other RNA
gggcttccgtatatatggcatgc

SEQ ID NO: 2709 - RNA, 23 nt, synthetic construct
  source 1..23: mol_type = other RNA
cgtatatatggcatgcacagtga

SEQ ID NO: 2710 - RNA, 23 nt, synthetic construct
  source 1..23: mol_type = other RNA
gtatatatggcatgcacagtgag

SEQ ID NO: 2711 - RNA, 23 nt, synthetic construct
  source 1..23: mol_type = other RNA
atatatggcatgcacagtgagct

SEQ ID NO: 2712 - RNA, 23 nt, synthetic construct
  source 1..23: mol_type = other RNA
tatatggcatgcacagtgagcta

SEQ ID NO: 2713 - RNA, 23 nt, synthetic construct
  source 1..23: mol_type = other RNA
atatggcatgcacagtgagctat

SEQ ID NO: 2714 - RNA, 23 nt, synthetic construct
  source 1..23: mol_type = other RNA
tatggcatgcacagtgagctatg

SEQ ID NO: 2715 - RNA, 23 nt, synthetic construct
  source 1..23: mol_type = other RNA
atggcatgcacagtgagctatgg

SEQ ID NO: 2716 - RNA, 23 nt, synthetic construct
  source 1..23: mol_type = other RNA
tttggcaccctggcctctctcta

SEQ ID NO: 2717 - RNA, 23 nt, synthetic construct
  source 1..23: mol_type = other RNA
ttggcaccctggcctctctctat

SEQ ID NO: 2718 - RNA, 23 nt, synthetic construct
  source 1..23: mol_type = other RNA
tgttccttggaaggacaagaact

SEQ ID NO: 2719 - RNA, 23 nt, synthetic construct
  source 1..23: mol_type = other RNA
tccttggaaggacaagaactgca

SEQ ID NO: 2720 - RNA, 23 nt, synthetic construct
  source 1..23: mol_type = other RNA
acctgaagcagccgtttgtgcag

SEQ ID NO: 2721 - RNA, 23 nt, synthetic construct
  source 1..23: mol_type = other RNA
cgtttgtgcagggcctggctctc

SEQ ID NO: 2722 - RNA, 23 nt, synthetic construct
  source 1..23: mol_type = other RNA
gtttgtgcagggcctggctctct

SEQ ID NO: 2723 - RNA, 23 nt, synthetic construct
  source 1..23: mol_type = other RNA
tttgtgcagggcctggctctcta

SEQ ID NO: 2724 - RNA, 23 nt, synthetic construct
  source 1..23: mol_type = other RNA
ttgtgcagggcctggctctctat

SEQ ID NO: 2725 - RNA, 23 nt, synthetic construct
  source 1..23: mol_type = other RNA
tgtgcagggcctggctctctata

SEQ ID NO: 2726 - RNA, 23 nt, synthetic construct
  source 1..23: mol_type = other RNA
ccacgctctctggacttcacaga

SEQ ID NO: 2727 - RNA, 23 nt, synthetic construct
  source 1..23: mol_type = other RNA
cacgctctctggacttcacagaa

SEQ ID NO: 2728 - RNA, 23 nt, synthetic construct
  source 1..23: mol_type = other RNA
tgctgagaagattgacaggttca

SEQ ID NO: 2729 - RNA, 23 nt, synthetic construct
  source 1..23: mol_type = other RNA
gctgagaagattgacaggttcat

SEQ ID NO: 2730 - RNA, 23 nt, synthetic construct
  source 1..23: mol_type = other RNA
ctgagaagattgacaggttcatg

SEQ ID NO: 2731 - RNA, 23 nt, synthetic construct
  source 1..23: mol_type = other RNA
tgagaagattgacaggttcatgc

SEQ ID NO: 2732 - RNA, 23 nt, synthetic construct
  source 1..23: mol_type = other RNA
gagaagattgacaggttcatgca

SEQ ID NO: 2733 - RNA, 23 nt, synthetic construct
  source 1..23: mol_type = other RNA
agaagattgacaggttcatgcag

SEQ ID NO: 2734 - RNA, 23 nt, synthetic construct
  source 1..23: mol_type = other RNA
gaagattgacaggttcatgcagg

SEQ ID NO: 2735 - RNA, 23 nt, synthetic construct
  source 1..23: mol_type = other RNA
aagattgacaggttcatgcaggc

SEQ ID NO: 2736 - RNA, 23 nt, synthetic construct
  source 1..23: mol_type = other RNA
agattgacaggttcatgcaggct

SEQ ID NO: 2737 - RNA, 23 nt, synthetic construct
  source 1..23: mol_type = other RNA
gattgacaggttcatgcaggctg

SEQ ID NO: 2738 - RNA, 23 nt, synthetic construct
  source 1..23: mol_type = other RNA
attgacaggttcatgcaggctgt

SEQ ID NO: 2739 - RNA, 23 nt, synthetic construct
  source 1..23: mol_type = other RNA
ttgacaggttcatgcaggctgtg

SEQ ID NO: 2740 - RNA, 23 nt, synthetic construct
  source 1..23: mol_type = other RNA
aggttcatgcaggctgtgacagg

SEQ ID NO: 2741 - RNA, 23 nt, synthetic construct
  source 1..23: mol_type = other RNA
tgcaggctgtgacaggatggaag

SEQ ID NO: 2742 - RNA, 23 nt, synthetic construct
  source 1..23: mol_type = other RNA
aggagttctgggtggacaacagc

SEQ ID NO: 2743 - RNA, 23 nt, synthetic construct
  source 1..23: mol_type = other RNA
ggacaacagcacctcagtgtctg

SEQ ID NO: 2744 - RNA, 23 nt, synthetic construct
  source 1..23: mol_type = other RNA
acaacagcacctcagtgtctgtt

SEQ ID NO: 2745 - RNA, 23 nt, synthetic construct
  source 1..23: mol_type = other RNA
ctatgcctctgacctggacaagg

SEQ ID NO: 2746 - RNA, 23 nt, synthetic construct
  source 1..23: mol_type = other RNA
tatgcctctgacctggacaaggt

SEQ ID NO: 2747 - RNA, 23 nt, synthetic construct
  source 1..23: mol_type = other RNA
acaaggtggagggtctcactttc

SEQ ID NO: 2748 - RNA, 23 nt, synthetic construct
  source 1..23: mol_type = other RNA
caaggtggagggtctcactttcc

SEQ ID NO: 2749 - RNA, 23 nt, synthetic construct
  source 1..23: mol_type = other RNA
aaggtggagggtctcactttcca

SEQ ID NO: 2750 - RNA, 23 nt, synthetic construct
  source 1..23: mol_type = other RNA
tggagggtctcactttccagcaa

SEQ ID NO: 2751 - RNA, 23 nt, synthetic construct
  source 1..23: mol_type = other RNA
ggagggtctcactttccagcaaa

SEQ ID NO: 2752 - RNA, 23 nt, synthetic construct
  source 1..23: mol_type = other RNA
gagggtctcactttccagcaaaa

SEQ ID NO: 2753 - RNA, 23 nt, synthetic construct
  source 1..23: mol_type = other RNA
agggtctcactttccagcaaaac

SEQ ID NO: 2754 - RNA, 23 nt, synthetic construct
  source 1..23: mol_type = other RNA
gggtctcactttccagcaaaact

SEQ ID NO: 2755 - RNA, 23 nt, synthetic construct
  source 1..23: mol_type = other RNA
ggtctcactttccagcaaaactc

SEQ ID NO: 2756 - RNA, 23 nt, synthetic construct
  source 1..23: mol_type = other RNA
tctcactttccagcaaaactccc

SEQ ID NO: 2757 - RNA, 23 nt, synthetic construct
  source 1..23: mol_type = other RNA
ctcactttccagcaaaactccct

SEQ ID NO: 2758 - RNA, 23 nt, synthetic construct
  source 1..23: mol_type = other RNA
tcactttccagcaaaactccctc

SEQ ID NO: 2759 - RNA, 23 nt, synthetic construct
  source 1..23: mol_type = other RNA
cactttccagcaaaactccctca

SEQ ID NO: 2760 - RNA, 23 nt, synthetic construct
  source 1..23: mol_type = other RNA
actttccagcaaaactccctcaa

SEQ ID NO: 2761 - RNA, 23 nt, synthetic construct
  source 1..23: mol_type = other RNA
ctttccagcaaaactccctcaac

SEQ ID NO: 2762 - RNA, 23 nt, synthetic construct
  source 1..23: mol_type = other RNA
tttccagcaaaactccctcaact

SEQ ID NO: 2763 - RNA, 23 nt, synthetic construct
  source 1..23: mol_type = other RNA
ttccagcaaaactccctcaactg

SEQ ID NO: 2764 - RNA, 23 nt, synthetic construct
  source 1..23: mol_type = other RNA
cagcaaaactccctcaactggat

SEQ ID NO: 2765 - RNA, 23 nt, synthetic construct
  source 1..23: mol_type = other RNA
agcaaaactccctcaactggatg

SEQ ID NO: 2766 - RNA, 23 nt, synthetic construct
  source 1..23: mol_type = other RNA
caaaactccctcaactggatgaa

SEQ ID NO: 2767 - RNA, 23 nt, synthetic construct
  source 1..23: mol_type = other RNA
aaaactccctcaactggatgaag

SEQ ID NO: 2768 - RNA, 23 nt, synthetic construct
  source 1..23: mol_type = other RNA
aactccctcaactggatgaagaa

SEQ ID NO: 2769 - RNA, 23 nt, synthetic construct
  source 1..23: mol_type = other RNA
actccctcaactggatgaagaaa

SEQ ID NO: 2770 - RNA, 23 nt, synthetic construct
  source 1..23: mol_type = other RNA
ctccctcaactggatgaagaaac

SEQ ID NO: 2771 - RNA, 23 nt, synthetic construct
  source 1..23: mol_type = other RNA
ccctcaactggatgaagaaacta

SEQ ID NO: 2772 - RNA, 23 nt, synthetic construct
  source 1..23: mol_type = other RNA
gcaaggatcttatgacctgcagg

SEQ ID NO: 2773 - RNA, 23 nt, synthetic construct
  source 1..23: mol_type = other RNA
caaggatcttatgacctgcagga

SEQ ID NO: 2774 - RNA, 23 nt, synthetic construct
  source 1..23: mol_type = other RNA
ctgaacctgcaaaaattgagcaa

SEQ ID NO: 2775 - RNA, 23 nt, synthetic construct
  source 1..23: mol_type = other RNA
ggaggtgctgaacagcatttttt

SEQ ID NO: 2776 - RNA, 23 nt, synthetic construct
  source 1..23: mol_type = other RNA
gaggtgctgaacagcattttttt

SEQ ID NO: 2777 - RNA, 23 nt, synthetic construct
  source 1..23: mol_type = other RNA
aggtgctgaacagcatttttttt

SEQ ID NO: 2778 - RNA, 23 nt, synthetic construct
  source 1..23: mol_type = other RNA
ggtgctgaacagcattttttttg

SEQ ID NO: 2779 - RNA, 23 nt, synthetic construct
  source 1..23: mol_type = other RNA
gtgctgaacagcattttttttga

SEQ ID NO: 2780 - RNA, 23 nt, synthetic construct
  source 1..23: mol_type = other RNA
tgctgaacagcattttttttgag

SEQ ID NO: 2781 - RNA, 23 nt, synthetic construct
  source 1..23: mol_type = other RNA
gatgagagagagcccacagagtc

SEQ ID NO: 2782 - RNA, 23 nt, synthetic construct
  source 1..23: mol_type = other RNA
tgagagagagcccacagagtcta

SEQ ID NO: 2783 - RNA, 23 nt, synthetic construct
  source 1..23: mol_type = other RNA
gagagagagcccacagagtctac

SEQ ID NO: 2784 - RNA, 23 nt, synthetic construct
  source 1..23: mol_type = other RNA
ctgaaccgcccattcctgtttgc

SEQ ID NO: 2785 - RNA, 23 nt, synthetic construct
  source 1..23: mol_type = other RNA
ccgcccattcctgtttgctgtgt

SEQ ID NO: 2786 - RNA, 23 nt, synthetic construct
  source 1..23: mol_type = other RNA
cgcccattcctgtttgctgtgta

SEQ ID NO: 2787 - RNA, 23 nt, synthetic construct
  source 1..23: mol_type = other RNA
gcccattcctgtttgctgtgtat

SEQ ID NO: 2788 - RNA, 23 nt, synthetic construct
  source 1..23: mol_type = other RNA
cccattcctgtttgctgtgtatg

SEQ ID NO: 2789 - RNA, 23 nt, synthetic construct
  source 1..23: mol_type = other RNA
cattcctgtttgctgtgtatgat

SEQ ID NO: 2790 - RNA, 23 nt, synthetic construct
  source 1..23: mol_type = other RNA
ttcctgtttgctgtgtatgatca

SEQ ID NO: 2791 - RNA, 23 nt, synthetic construct
  source 1..23: mol_type = other RNA
tcctgtttgctgtgtatgatcaa

SEQ ID NO: 2792 - RNA, 23 nt, synthetic construct
  source 1..23: mol_type = other RNA
cctgtttgctgtgtatgatcaaa

SEQ ID NO: 2793 - RNA, 23 nt, synthetic construct
  source 1..23: mol_type = other RNA
ctgtttgctgtgtatgatcaaag

SEQ ID NO: 2794 - RNA, 23 nt, synthetic construct
  source 1..23: mol_type = other RNA
tgtttgctgtgtatgatcaaagc

SEQ ID NO: 2795 - RNA, 23 nt, synthetic construct
  source 1..23: mol_type = other RNA
cccagtctcccaccttttcttct

SEQ ID NO: 2796 - RNA, 23 nt, synthetic construct
  source 1..23: mol_type = other RNA
cagtctcccaccttttcttctaa

SEQ ID NO: 2797 - RNA, 23 nt, synthetic construct
  source 1..23: mol_type = other RNA
tcccaccttttcttctaatgagt

SEQ ID NO: 2798 - RNA, 23 nt, synthetic construct
  source 1..23: mol_type = other RNA
cccaccttttcttctaatgagtc

SEQ ID NO: 2799 - RNA, 23 nt, synthetic construct
  source 1..23: mol_type = other RNA
ccaccttttcttctaatgagtcg

SEQ ID NO: 2800 - RNA, 23 nt, synthetic construct
  source 1..23: mol_type = other RNA
agccgtttctccttggtctaagt

SEQ ID NO: 2801 - RNA, 23 nt, synthetic construct
  source 1..23: mol_type = other RNA
ttgctgggtttattttagagaat

SEQ ID NO: 2802 - RNA, 23 nt, synthetic construct
  source 1..23: mol_type = other RNA
tgctgggtttattttagagaatg

SEQ ID NO: 2803 - RNA, 23 nt, synthetic construct
  source 1..23: mol_type = other RNA
gctgggtttattttagagaatgg

SEQ ID NO: 2804 - RNA, 23 nt, synthetic construct
  source 1..23: mol_type = other RNA
gggaggcaagaaccagtgtttag

SEQ ID NO: 2805 - RNA, 23 nt, synthetic construct
  source 1..23: mol_type = other RNA
aggcaagaaccagtgtttagcgc

SEQ ID NO: 2806 - RNA, 23 nt, synthetic construct
  source 1..23: mol_type = other RNA
ggcaagaaccagtgtttagcgcg

SEQ ID NO: 2807 - RNA, 23 nt, synthetic construct
  source 1..23: mol_type = other RNA
gcaagaaccagtgtttagcgcgg

SEQ ID NO: 2808 - RNA, 23 nt, synthetic construct
  source 1..23: mol_type = other RNA
caagaaccagtgtttagcgcggg

SEQ ID NO: 2809 - RNA, 23 nt, synthetic construct
  source 1..23: mol_type = other RNA
aagaaccagtgtttagcgcggga

SEQ ID NO: 2810 - RNA, 23 nt, synthetic construct
  source 1..23: mol_type = other RNA
agaaccagtgtttagcgcgggac

SEQ ID NO: 2811 - RNA, 23 nt, synthetic construct
  source 1..23: mol_type = other RNA
actgttccaaaaagaattccaac

SEQ ID NO: 2812 - RNA, 23 nt, synthetic construct
  source 1..23: mol_type = other RNA
ctgttccaaaaagaattccaacc

SEQ ID NO: 2813 - RNA, 23 nt, synthetic construct
  source 1..23: mol_type = other RNA
gttccaaaaagaattccaaccga

SEQ ID NO: 2814 - RNA, 23 nt, synthetic construct
  source 1..23: mol_type = other RNA
ttccaaaaagaattccaaccgac

SEQ ID NO: 2815 - RNA, 23 nt, synthetic construct
  source 1..23: mol_type = other RNA
ccaaaaagaattccaaccgacca

SEQ ID NO: 2816 - RNA, 23 nt, synthetic construct
  source 1..23: mol_type = other RNA
caaaaagaattccaaccgaccag

SEQ ID NO: 2817 - RNA, 23 nt, synthetic construct
  source 1..23: mol_type = other RNA
aaaaagaattccaaccgaccagc

SEQ ID NO: 2818 - RNA, 23 nt, synthetic construct
  source 1..23: mol_type = other RNA
aaaagaattccaaccgaccagct

SEQ ID NO: 2819 - RNA, 23 nt, synthetic construct
  source 1..23: mol_type = other RNA
aaagaattccaaccgaccagctt

SEQ ID NO: 2820 - RNA, 23 nt, synthetic construct
  source 1..23: mol_type = other RNA
aagaattccaaccgaccagcttg

SEQ ID NO: 2821 - RNA, 23 nt, synthetic construct
  source 1..23: mol_type = other RNA
agaattccaaccgaccagcttgt

SEQ ID NO: 2822 - RNA, 23 nt, synthetic construct
  source 1..23: mol_type = other RNA
gaattccaaccgaccagcttgtt

SEQ ID NO: 2823 - RNA, 23 nt, synthetic construct
  source 1..23: mol_type = other RNA
aattccaaccgaccagcttgttt

SEQ ID NO: 2824 - RNA, 23 nt, synthetic construct
  source 1..23: mol_type = other RNA
attccaaccgaccagcttgtttg

SEQ ID NO: 2825 - RNA, 23 nt, synthetic construct
  source 1..23: mol_type = other RNA
ttccaaccgaccagcttgtttgt

SEQ ID NO: 2826 - RNA, 23 nt, synthetic construct
  source 1..23: mol_type = other RNA
tccaaccgaccagcttgtttgtg

SEQ ID NO: 2827 - RNA, 23 nt, synthetic construct
  source 1..23: mol_type = other RNA
ccaaccgaccagcttgtttgtga

SEQ ID NO: 2828 - RNA, 23 nt, synthetic construct
  source 1..23: mol_type = other RNA
aaccgaccagcttgtttgtgaaa

SEQ ID NO: 2829 - RNA, 23 nt, synthetic construct
  source 1..23: mol_type = other RNA
accgaccagcttgtttgtgaaac

SEQ ID NO: 2830 - RNA, 23 nt, synthetic construct
  source 1..23: mol_type = other RNA
ccgaccagcttgtttgtgaaaca

SEQ ID NO: 2831 - RNA, 23 nt, synthetic construct
  source 1..23: mol_type = other RNA
cgaccagcttgtttgtgaaacaa

SEQ ID NO: 2832 - RNA, 23 nt, synthetic construct
  source 1..23: mol_type = other RNA
gaccagcttgtttgtgaaacaaa

SEQ ID NO: 2833 - RNA, 23 nt, synthetic construct
  source 1..23: mol_type = other RNA
accagcttgtttgtgaaacaaaa

SEQ ID NO: 2834 - RNA, 23 nt, synthetic construct
  source 1..23: mol_type = other RNA
ccagcttgtttgtgaaacaaaaa

SEQ ID NO: 2835 - RNA, 23 nt, synthetic construct
  source 1..23: mol_type = other RNA
agcttgtttgtgaaacaaaaaag

SEQ ID NO: 2836 - RNA, 23 nt, synthetic construct
  source 1..23: mol_type = other RNA
gcttgtttgtgaaacaaaaaagt

SEQ ID NO: 2837 - RNA, 23 nt, synthetic construct
  source 1..23: mol_type = other RNA
tgttcccttttcaagttgagaac

SEQ ID NO: 2838 - RNA, 23 nt, synthetic construct
  source 1..23: mol_type = other RNA
agaacaaaaattgggttttaaaa

SEQ ID NO: 2839 - RNA, 23 nt, synthetic construct
  source 1..23: mol_type = other RNA
aaagtatacatttttgcattgcc

SEQ ID NO: 2840 - RNA, 23 nt, synthetic construct
  source 1..23: mol_type = other RNA
agtatacatttttgcattgcctt

SEQ ID NO: 2841 - RNA, 23 nt, synthetic construct
  source 1..23: mol_type = other RNA
ccttcggtttgtatttagtgtct

SEQ ID NO: 2842 - RNA, 23 nt, synthetic construct
  source 1..23: mol_type = other RNA
cttcggtttgtatttagtgtctt

SEQ ID NO: 2843 - RNA, 23 nt, synthetic construct
  source 1..23: mol_type = other RNA
ttcggtttgtatttagtgtcttg

SEQ ID NO: 2844 - RNA, 23 nt, synthetic construct
  source 1..23: mol_type = other RNA
cggtttgtatttagtgtcttgaa

SEQ ID NO: 2845 - RNA, 23 nt, synthetic construct
  source 1..23: mol_type = other RNA
ggtttgtatttagtgtcttgaat

SEQ ID NO: 2846 - RNA, 23 nt, synthetic construct
  source 1..23: mol_type = other RNA
gtttgtatttagtgtcttgaatg

SEQ ID NO: 2847 - RNA, 23 nt, synthetic construct
  source 1..23: mol_type = other RNA
ttgtatttagtgtcttgaatgta

SEQ ID NO: 2848 - RNA, 23 nt, synthetic construct
  source 1..23: mol_type = other RNA
gtatttagtgtcttgaatgtaag

SEQ ID NO: 2849 - RNA, 23 nt, synthetic construct
  source 1..23: mol_type = other RNA
atttagtgtcttgaatgtaagaa

SEQ ID NO: 2850 - RNA, 23 nt, synthetic construct
  source 1..23: mol_type = other RNA
tttagtgtcttgaatgtaagaac

SEQ ID NO: 2851 - RNA, 23 nt, synthetic construct
  source 1..23: mol_type = other RNA
ttagtgtcttgaatgtaagaaca

SEQ ID NO: 2852 - RNA, 23 nt, synthetic construct
  source 1..23: mol_type = other RNA
agtgtcttgaatgtaagaacatg

SEQ ID NO: 2853 - RNA, 23 nt, synthetic construct
  source 1..23: mol_type = other RNA
tcttgaatgtaagaacatgacct

SEQ ID NO: 2854 - RNA, 23 nt, synthetic construct
  source 1..23: mol_type = other RNA
aacatgacctccgtgtagtgtct

SEQ ID NO: 2855 - RNA, 23 nt, synthetic construct
  source 1..23: mol_type = other RNA
acatgacctccgtgtagtgtctg

SEQ ID NO: 2856 - RNA, 23 nt, synthetic construct
  source 1..23: mol_type = other RNA
accttagttttttccacagatgc

SEQ ID NO: 2857 - RNA, 23 nt, synthetic construct
  source 1..23: mol_type = other RNA
ccttagttttttccacagatgct

SEQ ID NO: 2858 - RNA, 23 nt, synthetic construct
  source 1..23: mol_type = other RNA
cttagttttttccacagatgctt

SEQ ID NO: 2859 - RNA, 23 nt, synthetic construct
  source 1..23: mol_type = other RNA
ttagttttttccacagatgcttg

SEQ ID NO: 2860 - RNA, 23 nt, synthetic construct
  source 1..23: mol_type = other RNA
tagttttttccacagatgcttgt

SEQ ID NO: 2861 - RNA, 23 nt, synthetic construct
  source 1..23: mol_type = other RNA
gttttttccacagatgcttgtga

SEQ ID NO: 2862 - RNA, 23 nt, synthetic construct
  source 1..23: mol_type = other RNA
ttttttccacagatgcttgtgat

SEQ ID NO: 2863 - RNA, 23 nt, synthetic construct
  source 1..23: mol_type = other RNA
ttttccacagatgcttgtgattt

SEQ ID NO: 2864 - RNA, 23 nt, synthetic construct
  source 1..23: mol_type = other RNA
tttccacagatgcttgtgatttt

SEQ ID NO: 2865 - RNA, 23 nt, synthetic construct
  source 1..23: mol_type = other RNA
ttccacagatgcttgtgattttt

SEQ ID NO: 2866 - RNA, 23 nt, synthetic construct
  source 1..23: mol_type = other RNA
agtctcccaccttttcttctaat

SEQ ID NO: 2867 - RNA, 23 nt, synthetic construct
  source 1..23: mol_type = other RNA
tccctcaactggatgaagaaact

SEQ ID NO: 2868 - RNA, 21 nt, synthetic construct
  source 1..21: mol_type = other RNA
aacctgcaaaaattgagcaat

SEQ ID NO: 2869 - RNA, 21 nt, synthetic construct
  source 1..21: mol_type = other RNA
acctgcaaaaattgagcaatt

SEQ ID NO: 2870 - RNA, 21 nt, synthetic construct
  source 1..21: mol_type = other RNA
cctgcaaaaattgagcaatgt

SEQ ID NO: 2871 - RNA, 21 nt, synthetic construct
  source 1..21: mol_type = other RNA
ctgcaaaaattgagcaatgat

SEQ ID NO: 2872 - RNA, 21 nt, synthetic construct
  source 1..21: mol_type = other RNA
gcttgtttgtgaaacaaaaat

SEQ ID NO: 2873 - RNA, 21 nt, synthetic construct
  source 1..21: mol_type = other RNA
ccgggtgtacatacacccctt

SEQ ID NO: 2874 - RNA, 21 nt, synthetic construct
  source 1..21: mol_type = other RNA
cgggtgtacatacaccccttt

SEQ ID NO: 2875 - RNA, 21 nt, synthetic construct
  source 1..21: mol_type = other RNA
gggtgtacatacaccccttct

SEQ ID NO: 2876 - RNA, 21 nt, synthetic construct
  source 1..21: mol_type = other RNA
ggtgtacatacaccccttcct

SEQ ID NO: 2877 - RNA, 21 nt, synthetic construct
  source 1..21: mol_type = other RNA
gtgtacatacaccccttccat

SEQ ID NO: 2878 - RNA, 21 nt, synthetic construct
  source 1..21: mol_type = other RNA
tgtacatacaccccttccact

SEQ ID NO: 2879 - RNA, 21 nt, synthetic construct
  source 1..21: mol_type = other RNA
gtacatacaccccttccacct

SEQ ID NO: 2880 - RNA, 21 nt, synthetic construct
  source 1..21: mol_type = other RNA
tacatacaccccttccacctt

SEQ ID NO: 2881 - RNA, 21 nt, synthetic construct
  source 1..21: mol_type = other RNA
acatacaccccttccacctct

SEQ ID NO: 2882 - RNA, 21 nt, synthetic construct
  source 1..21: mol_type = other RNA
catacaccccttccacctcgt

SEQ ID NO: 2883 - RNA, 21 nt, synthetic construct
  source 1..21: mol_type = other RNA
atacaccccttccacctcgtt

SEQ ID NO: 2884 - RNA, 21 nt, synthetic construct
  source 1..21: mol_type = other RNA
cccttccacctcgtcatccat

SEQ ID NO: 2885 - RNA, 21 nt, synthetic construct
  source 1..21: mol_type = other RNA
ccttccacctcgtcatccact

SEQ ID NO: 2886 - RNA, 21 nt, synthetic construct
  source 1..21: mol_type = other RNA
catgcacagtgagctatgggt

SEQ ID NO: 2887 - RNA, 21 nt, synthetic construct
  source 1..21: mol_type = other RNA
atgcacagtgagctatggggt

SEQ ID NO: 2888 - RNA, 21 nt, synthetic construct
  source 1..21: mol_type = other RNA
cctctccccaacggctgtctt

SEQ ID NO: 2889 - RNA, 21 nt, synthetic construct
  source 1..21: mol_type = other RNA
ccccagtctcccaccttttct

SEQ ID NO: 2890 - RNA, 21 nt, synthetic construct
  source 1..21: mol_type = other RNA
cccagtctcccaccttttctt

SEQ ID NO: 2891 - RNA, 21 nt, synthetic construct
  source 1..21: mol_type = other RNA
ccagtctcccaccttttcttt

SEQ ID NO: 2892 - RNA, 21 nt, synthetic construct
  source 1..21: mol_type = other RNA
agtctcccaccttttcttctt

SEQ ID NO: 2893 - RNA, 21 nt, synthetic construct
  source 1..21: mol_type = other RNA
ggtttattttagagaatgggt

SEQ ID NO: 2894 - RNA, 21 nt, synthetic construct
  source 1..21: mol_type = other RNA
gtttattttagagaatggggt

SEQ ID NO: 2895 - RNA, 21 nt, synthetic construct
  source 1..21: mol_type = other RNA
tttattttagagaatgggggt

SEQ ID NO: 2896 - RNA, 21 nt, synthetic construct
  source 1..21: mol_type = other RNA
agaatgggggtggggaggcat

SEQ ID NO: 2897 - RNA, 21 nt, synthetic construct
  source 1..21: mol_type = other RNA
gaatgggggtggggaggcaat

SEQ ID NO: 2898 - RNA, 21 nt, synthetic construct
  source 1..21: mol_type = other RNA
aatgggggtggggaggcaagt

SEQ ID NO: 2899 - RNA, 21 nt, synthetic construct
  source 1..21: mol_type = other RNA
atgggggtggggaggcaagat

SEQ ID NO: 2900 - RNA, 21 nt, synthetic construct
  source 1..21: mol_type = other RNA
tgggggtggggaggcaagaat

SEQ ID NO: 2901 - RNA, 21 nt, synthetic construct
  source 1..21: mol_type = other RNA
gggggtggggaggcaagaact

SEQ ID NO: 2902 - RNA, 21 nt, synthetic construct
  source 1..21: mol_type = other RNA
gtggggaggcaagaaccagtt

SEQ ID NO: 2903 - RNA, 21 nt, synthetic construct
  source 1..21: mol_type = other RNA
tggggaggcaagaaccagtgt

SEQ ID NO: 2904 - RNA, 21 nt, synthetic construct
  source 1..21: mol_type = other RNA
ggggaggcaagaaccagtgtt

SEQ ID NO: 2905 - RNA, 23 nt, synthetic construct
  source 1..23: mol_type = other RNA
aaggcagaggatggtggccctca

SEQ ID NO: 2906 - RNA, 23 nt, synthetic construct
  source 1..23: mol_type = other RNA
agtactctcattgtggatgacga

SEQ ID NO: 2907 - RNA, 23 nt, synthetic construct
  source 1..23: mol_type = other RNA
agtgtatgtacacccggtcacct

SEQ ID NO: 2908 - RNA, 23 nt, synthetic construct
  source 1..23: mol_type = other RNA
atgtggatgacgaggtggaaggg

SEQ ID NO: 2909 - RNA, 23 nt, synthetic construct
  source 1..23: mol_type = other RNA
attgtggatgacgaggtggaagg

SEQ ID NO: 2910 - RNA, 23 nt, synthetic construct
  source 1..23: mol_type = other RNA
acattgtggatgacgaggtggaa

SEQ ID NO: 2911 - RNA, 23 nt, synthetic construct
  source 1..23: mol_type = other RNA
atcattgtggatgacgaggtgga

SEQ ID NO: 2912 - RNA, 23 nt, synthetic construct
  source 1..23: mol_type = other RNA
atctcattgtggatgacgaggtg

SEQ ID NO: 2913 - RNA, 23 nt, synthetic construct
  source 1..23: mol_type = other RNA
actctcattgtggatgacgaggt

SEQ ID NO: 2914 - RNA, 23 nt, synthetic construct
  source 1..23: mol_type = other RNA
aactctcattgtggatgacgagg

SEQ ID NO: 2915 - RNA, 23 nt, synthetic construct
  source 1..23: mol_type = other RNA
atactctcattgtggatgacgag

SEQ ID NO: 2916 - RNA, 23 nt, synthetic construct
  source 1..23: mol_type = other RNA
aggtactctcattgtggatgacg

SEQ ID NO: 2917 - RNA, 23 nt, synthetic construct
  source 1..23: mol_type = other RNA
aaggtactctcattgtggatgac

SEQ ID NO: 2918 - RNA, 23 nt, synthetic construct
  source 1..23: mol_type = other RNA
aacaggtactctcattgtggatg

SEQ ID NO: 2919 - RNA, 23 nt, synthetic construct
  source 1..23: mol_type = other RNA
atcacaggtactctcattgtgga

SEQ ID NO: 2920 - RNA, 23 nt, synthetic construct
  source 1..23: mol_type = other RNA
atgctcacaggtactctcattgt

SEQ ID NO: 2921 - RNA, 23 nt, synthetic construct
  source 1..23: mol_type = other RNA
agctgctcacaggtactctcatt

SEQ ID NO: 2922 - RNA, 23 nt, synthetic construct
  source 1..23: mol_type = other RNA
aagctgctcacaggtactctcat

SEQ ID NO: 2923 - RNA, 23 nt, synthetic construct
  source 1..23: mol_type = other RNA
accagctgctcacaggtactctc

SEQ ID NO: 2924 - RNA, 23 nt, synthetic construct
  source 1..23: mol_type = other RNA
atgccagctgctcacaggtactc

SEQ ID NO: 2925 - RNA, 23 nt, synthetic construct
  source 1..23: mol_type = other RNA
attgccagctgctcacaggtact

SEQ ID NO: 2926 - RNA, 23 nt, synthetic construct
  source 1..23: mol_type = other RNA
atggccagcatcccgaccattgc

SEQ ID NO: 2927 - RNA, 23 nt, synthetic construct
  source 1..23: mol_type = other RNA
attggccagcatcccgaccattg

SEQ ID NO: 2928 - RNA, 23 nt, synthetic construct
  source 1..23: mol_type = other RNA
aagttggccagcatcccgaccat

SEQ ID NO: 2929 - RNA, 23 nt, synthetic construct
  source 1..23: mol_type = other RNA
aaagttggccagcatcccgacca

SEQ ID NO: 2930 - RNA, 23 nt, synthetic construct
  source 1..23: mol_type = other RNA
agaagttggccagcatcccgacc

SEQ ID NO: 2931 - RNA, 23 nt, synthetic construct
  source 1..23: mol_type = other RNA
aagaagttggccagcatcccgac

SEQ ID NO: 2932 - RNA, 23 nt, synthetic construct
  source 1..23: mol_type = other RNA
aatatacggaagcccaagaagtt

SEQ ID NO: 2933 - RNA, 23 nt, synthetic construct
  source 1..23: mol_type = other RNA
atatatacggaagcccaagaagt

SEQ ID NO: 2934 - RNA, 23 nt, synthetic construct
  source 1..23: mol_type = other RNA
atgccatatatacggaagcccaa

SEQ ID NO: 2935 - RNA, 23 nt, synthetic construct
  source 1..23: mol_type = other RNA
aatgccatatatacggaagccca

SEQ ID NO: 2936 - RNA, 23 nt, synthetic construct
  source 1..23: mol_type = other RNA
acactgtgcatgccatatatacg

SEQ ID NO: 2937 - RNA, 23 nt, synthetic construct
  source 1..23: mol_type = other RNA
atcactgtgcatgccatatatac

SEQ ID NO: 2938 - RNA, 23 nt, synthetic construct
  source 1..23: mol_type = other RNA
aagctcactgtgcatgccatata

SEQ ID NO: 2939 - RNA, 23 nt, synthetic construct
  source 1..23: mol_type = other RNA
aatagctcactgtgcatgccata

SEQ ID NO: 2940 - RNA, 23 nt, synthetic construct
  source 1..23: mol_type = other RNA
acatagctcactgtgcatgccat

SEQ ID NO: 2941 - RNA, 23 nt, synthetic construct
  source 1..23: mol_type = other RNA
atagagagaggccagggtgccaa

SEQ ID NO: 2942 - RNA, 23 nt, synthetic construct
  source 1..23: mol_type = other RNA
agttcttgtccttccaaggaaca

SEQ ID NO: 2943 - RNA, 23 nt, synthetic construct
  source 1..23: mol_type = other RNA
agcagttcttgtccttccaagga

SEQ ID NO: 2944 - RNA, 23 nt, synthetic construct
  source 1..23: mol_type = other RNA
atgcacaaacggctgcttcaggt

SEQ ID NO: 2945 - RNA, 23 nt, synthetic construct
  source 1..23: mol_type = other RNA
atagagagccaggccctgcacaa

SEQ ID NO: 2946 - RNA, 23 nt, synthetic construct
  source 1..23: mol_type = other RNA
actgtgaagtccagagagcgtgg

SEQ ID NO: 2947 - RNA, 23 nt, synthetic construct
  source 1..23: mol_type = other RNA
atctgtgaagtccagagagcgtg

SEQ ID NO: 2948 - RNA, 23 nt, synthetic construct
  source 1..23: mol_type = other RNA
agaacctgtcaatcttctcagca

SEQ ID NO: 2949 - RNA, 23 nt, synthetic construct
  source 1..23: mol_type = other RNA
acatgaacctgtcaatcttctca

SEQ ID NO: 2950 - RNA, 23 nt, synthetic construct
  source 1..23: mol_type = other RNA
agcatgaacctgtcaatcttctc

SEQ ID NO: 2951 - RNA, 23 nt, synthetic construct
  source 1..23: mol_type = other RNA
atgcatgaacctgtcaatcttct

SEQ ID NO: 2952 - RNA, 23 nt, synthetic construct
  source 1..23: mol_type = other RNA
actgcatgaacctgtcaatcttc

SEQ ID NO: 2953 - RNA, 23 nt, synthetic construct
  source 1..23: mol_type = other RNA
agcctgcatgaacctgtcaatct

SEQ ID NO: 2954 - RNA, 23 nt, synthetic construct
  source 1..23: mol_type = other RNA
acagcctgcatgaacctgtcaat

SEQ ID NO: 2955 - RNA, 23 nt, synthetic construct
  source 1..23: mol_type = other RNA
aacagcctgcatgaacctgtcaa

SEQ ID NO: 2956 - RNA, 23 nt, synthetic construct
  source 1..23: mol_type = other RNA
attccatcctgtcacagcctgca

SEQ ID NO: 2957 - RNA, 23 nt, synthetic construct
  source 1..23: mol_type = other RNA
actgttgtccacccagaactcct

SEQ ID NO: 2958 - RNA, 23 nt, synthetic construct
  source 1..23: mol_type = other RNA
acttgtccaggtcagaggcatag

SEQ ID NO: 2959 - RNA, 23 nt, synthetic construct
  source 1..23: mol_type = other RNA
agaaagtgagaccctccaccttg

SEQ ID NO: 2960 - RNA, 23 nt, synthetic construct
  source 1..23: mol_type = other RNA
atgctggaaagtgagaccctcca

SEQ ID NO: 2961 - RNA, 23 nt, synthetic construct
  source 1..23: mol_type = other RNA
attgctggaaagtgagaccctcc

SEQ ID NO: 2962 - RNA, 23 nt, synthetic construct
  source 1..23: mol_type = other RNA
attttgctggaaagtgagaccct

SEQ ID NO: 2963 - RNA, 23 nt, synthetic construct
  source 1..23: mol_type = other RNA
agttttgctggaaagtgagaccc

SEQ ID NO: 2964 - RNA, 23 nt, synthetic construct
  source 1..23: mol_type = other RNA
aagttttgctggaaagtgagacc

SEQ ID NO: 2965 - RNA, 23 nt, synthetic construct
  source 1..23: mol_type = other RNA
aggagttttgctggaaagtgaga

SEQ ID NO: 2966 - RNA, 23 nt, synthetic construct
  source 1..23: mol_type = other RNA
agggagttttgctggaaagtgag

SEQ ID NO: 2967 - RNA, 23 nt, synthetic construct
  source 1..23: mol_type = other RNA
agagggagttttgctggaaagtg

SEQ ID NO: 2968 - RNA, 23 nt, synthetic construct
  source 1..23: mol_type = other RNA
atgagggagttttgctggaaagt

SEQ ID NO: 2969 - RNA, 23 nt, synthetic construct
  source 1..23: mol_type = other RNA
attgagggagttttgctggaaag

SEQ ID NO: 2970 - RNA, 23 nt, synthetic construct
  source 1..23: mol_type = other RNA
agttgagggagttttgctggaaa

SEQ ID NO: 2971 - RNA, 23 nt, synthetic construct
  source 1..23: mol_type = other RNA
aagttgagggagttttgctggaa

SEQ ID NO: 2972 - RNA, 23 nt, synthetic construct
  source 1..23: mol_type = other RNA
atccagttgagggagttttgctg

SEQ ID NO: 2973 - RNA, 23 nt, synthetic construct
  source 1..23: mol_type = other RNA
atcatccagttgagggagttttg

SEQ ID NO: 2974 - RNA, 23 nt, synthetic construct
  source 1..23: mol_type = other RNA
attcatccagttgagggagtttt

SEQ ID NO: 2975 - RNA, 23 nt, synthetic construct
  source 1..23: mol_type = other RNA
atcttcatccagttgagggagtt

SEQ ID NO: 2976 - RNA, 23 nt, synthetic construct
  source 1..23: mol_type = other RNA
attcttcatccagttgagggagt

SEQ ID NO: 2977 - RNA, 23 nt, synthetic construct
  source 1..23: mol_type = other RNA
atttcttcatccagttgagggag

SEQ ID NO: 2978 - RNA, 23 nt, synthetic construct
  source 1..23: mol_type = other RNA
aagtttcttcatccagttgaggg

SEQ ID NO: 2979 - RNA, 23 nt, synthetic construct
  source 1..23: mol_type = other RNA
atgctcaatttttgcaggttcag

SEQ ID NO: 2980 - RNA, 23 nt, synthetic construct
  source 1..23: mol_type = other RNA
attgctcaatttttgcaggttca

SEQ ID NO: 2981 - RNA, 23 nt, synthetic construct
  source 1..23: mol_type = other RNA
aattgctcaatttttgcaggttc

SEQ ID NO: 2982 - RNA, 23 nt, synthetic construct
  source 1..23: mol_type = other RNA
acattgctcaatttttgcaggtt

SEQ ID NO: 2983 - RNA, 23 nt, synthetic construct
  source 1..23: mol_type = other RNA
atcattgctcaatttttgcaggt

SEQ ID NO: 2984 - RNA, 23 nt, synthetic construct
  source 1..23: mol_type = other RNA
atagactctgtgggctctctctc

SEQ ID NO: 2985 - RNA, 23 nt, synthetic construct
  source 1..23: mol_type = other RNA
acaaacaggaatgggcggttcag

SEQ ID NO: 2986 - RNA, 23 nt, synthetic construct
  source 1..23: mol_type = other RNA
atcatacacagcaaacaggaatg

SEQ ID NO: 2987 - RNA, 23 nt, synthetic construct
  source 1..23: mol_type = other RNA
agatcatacacagcaaacaggaa

SEQ ID NO: 2988 - RNA, 23 nt, synthetic construct
  source 1..23: mol_type = other RNA
atgatcatacacagcaaacagga

SEQ ID NO: 2989 - RNA, 23 nt, synthetic construct
  source 1..23: mol_type = other RNA
attgatcatacacagcaaacagg

SEQ ID NO: 2990 - RNA, 23 nt, synthetic construct
  source 1..23: mol_type = other RNA
atttgatcatacacagcaaacag

SEQ ID NO: 2991 - RNA, 23 nt, synthetic construct
  source 1..23: mol_type = other RNA
actttgatcatacacagcaaaca

SEQ ID NO: 2992 - RNA, 23 nt, synthetic construct
  source 1..23: mol_type = other RNA
atagaagaaaaggtgggagactg

SEQ ID NO: 2993 - RNA, 23 nt, synthetic construct
  source 1..23: mol_type = other RNA
aactcattagaagaaaaggtggg

SEQ ID NO: 2994 - RNA, 23 nt, synthetic construct
  source 1..23: mol_type = other RNA
agactcattagaagaaaaggtgg

SEQ ID NO: 2995 - RNA, 23 nt, synthetic construct
  source 1..23: mol_type = other RNA
acattctctaaaataaacccagc

SEQ ID NO: 2996 - RNA, 23 nt, synthetic construct
  source 1..23: mol_type = other RNA
ataaacactggttcttgcctccc

SEQ ID NO: 2997 - RNA, 23 nt, synthetic construct
  source 1..23: mol_type = other RNA
acgctaaacactggttcttgcct

SEQ ID NO: 2998 - RNA, 23 nt, synthetic construct
  source 1..23: mol_type = other RNA
acgcgctaaacactggttcttgc

SEQ ID NO: 2999 - RNA, 23 nt, synthetic construct
  source 1..23: mol_type = other RNA
atcccgcgctaaacactggttct

SEQ ID NO: 3000 - RNA, 23 nt, synthetic construct
  source 1..23: mol_type = other RNA
agttggaattctttttggaacag

SEQ ID NO: 3001 - RNA, 23 nt, synthetic construct
  source 1..23: mol_type = other RNA
acggttggaattctttttggaac

SEQ ID NO: 3002 - RNA, 23 nt, synthetic construct
  source 1..23: mol_type = other RNA
atcggttggaattctttttggaa

SEQ ID NO: 3003 - RNA, 23 nt, synthetic construct
  source 1..23: mol_type = other RNA
atggtcggttggaattctttttg

SEQ ID NO: 3004 - RNA, 23 nt, synthetic construct
  source 1..23: mol_type = other RNA
agctggtcggttggaattctttt

SEQ ID NO: 3005 - RNA, 23 nt, synthetic construct
  source 1..23: mol_type = other RNA
acaagctggtcggttggaattct

SEQ ID NO: 3006 - RNA, 23 nt, synthetic construct
  source 1..23: mol_type = other RNA
aacaaacaagctggtcggttgga

SEQ ID NO: 3007 - RNA, 23 nt, synthetic construct
  source 1..23: mol_type = other RNA
attcacaaacaagctggtcggtt

SEQ ID NO: 3008 - RNA, 23 nt, synthetic construct
  source 1..23: mol_type = other RNA
atttcacaaacaagctggtcggt

SEQ ID NO: 3009 - RNA, 23 nt, synthetic construct
  source 1..23: mol_type = other RNA
agtttcacaaacaagctggtcgg

SEQ ID NO: 3010 - RNA, 23 nt, synthetic construct
  source 1..23: mol_type = other RNA
atgtttcacaaacaagctggtcg

SEQ ID NO: 3011 - RNA, 23 nt, synthetic construct
  source 1..23: mol_type = other RNA
attgtttcacaaacaagctggtc

SEQ ID NO: 3012 - RNA, 23 nt, synthetic construct
  source 1..23: mol_type = other RNA
atttgtttcacaaacaagctggt

SEQ ID NO: 3013 - RNA, 23 nt, synthetic construct
  source 1..23: mol_type = other RNA
attttgtttcacaaacaagctgg

SEQ ID NO: 3014 - RNA, 23 nt, synthetic construct
  source 1..23: mol_type = other RNA
attctcaacttgaaaagggaaca

SEQ ID NO: 3015 - RNA, 23 nt, synthetic construct
  source 1..23: mol_type = other RNA
agacactaaatacaaaccgaagg

SEQ ID NO: 3016 - RNA, 23 nt, synthetic construct
  source 1..23: mol_type = other RNA
aagacactaaatacaaaccgaag

SEQ ID NO: 3017 - RNA, 23 nt, synthetic construct
  source 1..23: mol_type = other RNA
atcaagacactaaatacaaaccg

SEQ ID NO: 3018 - RNA, 23 nt, synthetic construct
  source 1..23: mol_type = other RNA
attcaagacactaaatacaaacc

SEQ ID NO: 3019 - RNA, 23 nt, synthetic construct
  source 1..23: mol_type = other RNA
aacattcaagacactaaatacaa

SEQ ID NO: 3020 - RNA, 23 nt, synthetic construct
  source 1..23: mol_type = other RNA
attacattcaagacactaaatac

SEQ ID NO: 3021 - RNA, 23 nt, synthetic construct
  source 1..23: mol_type = other RNA
atcttacattcaagacactaaat

SEQ ID NO: 3022 - RNA, 23 nt, synthetic construct
  source 1..23: mol_type = other RNA
attcttacattcaagacactaaa

SEQ ID NO: 3023 - RNA, 23 nt, synthetic construct
  source 1..23: mol_type = other RNA
agttcttacattcaagacactaa

SEQ ID NO: 3024 - RNA, 23 nt, synthetic construct
  source 1..23: mol_type = other RNA
aatgttcttacattcaagacact

SEQ ID NO: 3025 - RNA, 23 nt, synthetic construct
  source 1..23: mol_type = other RNA
aggtcatgttcttacattcaaga

SEQ ID NO: 3026 - RNA, 23 nt, synthetic construct
  source 1..23: mol_type = other RNA
agacactacacggaggtcatgtt

SEQ ID NO: 3027 - RNA, 23 nt, synthetic construct
  source 1..23: mol_type = other RNA
aaaatcacaagcatctgtggaaa

SEQ ID NO: 3028 - RNA, 23 nt, synthetic construct
  source 1..23: mol_type = other RNA
  modified_base 2: mod_base = OTHER; note = Thymine
  modified_base 12: mod_base = OTHER; note = Thymine
attgctcaatttttgcaggttca

SEQ ID NO: 3029 - RNA, 23 nt, synthetic construct
  source 1..23: mol_type = other RNA
  modified_base 7: mod_base = OTHER; note = Thymine
  modified_base 12: mod_base = OTHER; note = Thymine
aattgctcaatttttgcaggttc

SEQ ID NO: 3030 - RNA, 23 nt, synthetic construct
  source 1..23: mol_type = other RNA
  modified_base 5: mod_base = OTHER; note = Thymine
  modified_base 12: mod_base = OTHER; note = Thymine
acattgctcaatttttgcaggtt

SEQ ID NO: 3031 - RNA, 23 nt, synthetic construct
  source 1..23: mol_type = other RNA
  modified_base 2: mod_base = OTHER; note = Thymine
  modified_base 5: mod_base = OTHER; note = Thymine
atcattgctcaatttttgcaggt

SEQ ID NO: 3032 - RNA, 23 nt, synthetic construct
  source 1..23: mol_type = other RNA
  modified_base 2: mod_base = OTHER; note = Thymine
  modified_base 5: mod_base = OTHER; note = Thymine
atttttgtttcacaaacaagctg

SEQ ID NO: 3033 - RNA, 23 nt, synthetic construct
  source 1..23: mol_type = other RNA
aaggggtgtatgtacacccggtc

SEQ ID NO: 3034 - RNA, 23 nt, synthetic construct
  source 1..23: mol_type = other RNA
  modified_base 7: mod_base = OTHER; note = Thymine
aaggggtgtatgtacacccggtc

SEQ ID NO: 3035 - RNA, 23 nt, synthetic construct
  source 1..23: mol_type = other RNA
aaaggggtgtatgtacacccggt

SEQ ID NO: 3036 - RNA, 23 nt, synthetic construct
  source 1..23: mol_type = other RNA
  modified_base 12: mod_base = OTHER; note = Thymine
aaaggggtgtatgtacacccggt

SEQ ID NO: 3037 - RNA, 23 nt, synthetic construct
  source 1..23: mol_type = other RNA
agaaggggtgtatgtacacccgg

SEQ ID NO: 3038 - RNA, 23 nt, synthetic construct
  source 1..23: mol_type = other RNA
aggaaggggtgtatgtacacccg

SEQ ID NO: 3039 - RNA, 23 nt, synthetic construct
  source 1..23: mol_type = other RNA
  modified_base 12: mod_base = OTHER; note = Thymine
aggaaggggtgtatgtacacccg

SEQ ID NO: 3040 - RNA, 23 nt, synthetic construct
  source 1..23: mol_type = other RNA
atggaaggggtgtatgtacaccc

SEQ ID NO: 3041 - RNA, 23 nt, synthetic construct
  source 1..23: mol_type = other RNA
  modified_base 2: mod_base = OTHER; note = Thymine
atggaaggggtgtatgtacaccc

SEQ ID NO: 3042 - RNA, 23 nt, synthetic construct
  source 1..23: mol_type = other RNA
agtggaaggggtgtatgtacacc

SEQ ID NO: 3043 - RNA, 23 nt, synthetic construct
  source 1..23: mol_type = other RNA
  modified_base 12: mod_base = OTHER; note = Thymine
agtggaaggggtgtatgtacacc

SEQ ID NO: 3044 - RNA, 23 nt, synthetic construct
  source 1..23: mol_type = other RNA
aggtggaaggggtgtatgtacac

SEQ ID NO: 3045 - RNA, 23 nt, synthetic construct
  source 1..23: mol_type = other RNA
aaggtggaaggggtgtatgtaca

SEQ ID NO: 3046 - RNA, 23 nt, synthetic construct
  source 1..23: mol_type = other RNA
  modified_base 5: mod_base = OTHER; note = Thymine
aaggtggaaggggtgtatgtaca

SEQ ID NO: 3047 - RNA, 23 nt, synthetic construct
  source 1..23: mol_type = other RNA
agaggtggaaggggtgtatgtac

SEQ ID NO: 3048 - RNA, 23 nt, synthetic construct
  source 1..23: mol_type = other RNA
acgaggtggaaggggtgtatgta

SEQ ID NO: 3049 - RNA, 23 nt, synthetic construct
  source 1..23: mol_type = other RNA
  modified_base 7: mod_base = OTHER; note = Thymine
acgaggtggaaggggtgtatgta

SEQ ID NO: 3050 - RNA, 23 nt, synthetic construct
  source 1..23: mol_type = other RNA
aacgaggtggaaggggtgtatgt

SEQ ID NO: 3051 - RNA, 23 nt, synthetic construct
  source 1..23: mol_type = other RNA
atggatgacgaggtggaaggggt

SEQ ID NO: 3052 - RNA, 23 nt, synthetic construct
  source 1..23: mol_type = other RNA
  modified_base 2: mod_base = OTHER; note = Thymine
atggatgacgaggtggaaggggt

SEQ ID NO: 3053 - RNA, 23 nt, synthetic construct
  source 1..23: mol_type = other RNA
agtggatgacgaggtggaagggg

SEQ ID NO: 3054 - RNA, 23 nt, synthetic construct
  source 1..23: mol_type = other RNA
  modified_base 7: mod_base = OTHER; note = Thymine
agtggatgacgaggtggaagggg

SEQ ID NO: 3055 - RNA, 23 nt, synthetic construct
  source 1..23: mol_type = other RNA
acccatagctcactgtgcatgcc

SEQ ID NO: 3056 - RNA, 23 nt, synthetic construct
  source 1..23: mol_type = other RNA
accccatagctcactgtgcatgc

SEQ ID NO: 3057 - RNA, 23 nt, synthetic construct
  source 1..23: mol_type = other RNA
  modified_base 7: mod_base = OTHER; note = Thymine
accccatagctcactgtgcatgc

SEQ ID NO: 3058 - RNA, 23 nt, synthetic construct
  source 1..23: mol_type = other RNA
aagacagccgttggggagaggac

SEQ ID NO: 3059 - RNA, 23 nt, synthetic construct
  source 1..23: mol_type = other RNA
  modified_base 12: mod_base = OTHER; note = Thymine
aagacagccgttggggagaggac

SEQ ID NO: 3060 - RNA, 23 nt, synthetic construct
  source 1..23: mol_type = other RNA
aaaaaatgctgttcagcacctcc

SEQ ID NO: 3061 - RNA, 23 nt, synthetic construct
  source 1..23: mol_type = other RNA
aaaaaaaatgctgttcagcacct

SEQ ID NO: 3062 - RNA, 23 nt, synthetic construct
  source 1..23: mol_type = other RNA
atcaaaaaaaatgctgttcagca

SEQ ID NO: 3063 - RNA, 23 nt, synthetic construct
  source 1..23: mol_type = other RNA
agaaaaggtgggagactgggggt

SEQ ID NO: 3064 - RNA, 23 nt, synthetic construct
  source 1..23: mol_type = other RNA
aagaaaaggtgggagactggggg

SEQ ID NO: 3065 - RNA, 23 nt, synthetic construct
  source 1..23: mol_type = other RNA
aaagaaaaggtgggagactgggg

SEQ ID NO: 3066 - RNA, 23 nt, synthetic construct
  source 1..23: mol_type = other RNA
aagaagaaaaggtgggagactgg

SEQ ID NO: 3067 - RNA, 23 nt, synthetic construct
  source 1..23: mol_type = other RNA
acccattctctaaaataaaccca

SEQ ID NO: 3068 - RNA, 23 nt, synthetic construct
  source 1..23: mol_type = other RNA
  modified_base 7: mod_base = OTHER; note = Thymine
acccattctctaaaataaaccca

SEQ ID NO: 3069 - RNA, 23 nt, synthetic construct
  source 1..23: mol_type = other RNA
accccattctctaaaataaaccc

SEQ ID NO: 3070 - RNA, 23 nt, synthetic construct
  source 1..23: mol_type = other RNA
  modified_base 7: mod_base = OTHER; note = Thymine
  modified_base 12: mod_base = OTHER; note = Thymine
accccattctctaaaataaaccc

SEQ ID NO: 3071 - RNA, 23 nt, synthetic construct
  source 1..23: mol_type = other RNA
acccccattctctaaaataaacc

SEQ ID NO: 3072 - RNA, 23 nt, synthetic construct
  source 1..23: mol_type = other RNA
atgcctccccacccccattctct

SEQ ID NO: 3073 - RNA, 23 nt, synthetic construct
  source 1..23: mol_type = other RNA
  modified_base 2: mod_base = OTHER; note = Thymine
atgcctccccacccccattctct

SEQ ID NO: 3074 - RNA, 23 nt, synthetic construct
  source 1..23: mol_type = other RNA
attgcctccccacccccattctc

SEQ ID NO: 3075 - RNA, 23 nt, synthetic construct
  source 1..23: mol_type = other RNA
  modified_base 2: mod_base = OTHER; note = Thymine
  modified_base 7: mod_base = OTHER; note = Thymine
attgcctccccacccccattctc

SEQ ID NO: 3076 - RNA, 23 nt, synthetic construct
  source 1..23: mol_type = other RNA
acttgcctccccacccccattct

SEQ ID NO: 3077 - RNA, 23 nt, synthetic construct
  source 1..23: mol_type = other RNA
atcttgcctccccacccccattc

SEQ ID NO: 3078 - RNA, 23 nt, synthetic construct
  source 1..23: mol_type = other RNA
  modified_base 2: mod_base = OTHER; note = Thymine
  modified_base 5: mod_base = OTHER; note = Thymine
atcttgcctccccacccccattc

SEQ ID NO: 3079 - RNA, 23 nt, synthetic construct
  source 1..23: mol_type = other RNA
attcttgcctccccacccccatt

SEQ ID NO: 3080 - RNA, 23 nt, synthetic construct
  source 1..23: mol_type = other RNA
  modified_base 2: mod_base = OTHER; note = Thymine
  modified_base 5: mod_base = OTHER; note = Thymine
attcttgcctccccacccccatt

SEQ ID NO: 3081 - RNA, 23 nt, synthetic construct
  source 1..23: mol_type = other RNA
agttcttgcctccccacccccat

SEQ ID NO: 3082 - RNA, 23 nt, synthetic construct
  source 1..23: mol_type = other RNA
  modified_base 7: mod_base = OTHER; note = Thymine
agttcttgcctccccacccccat

SEQ ID NO: 3083 - RNA, 23 nt, synthetic construct
  source 1..23: mol_type = other RNA
aactggttcttgcctccccaccc

SEQ ID NO: 3084 - RNA, 23 nt, synthetic construct
  source 1..23: mol_type = other RNA
  modified_base 7: mod_base = OTHER; note = Thymine
aactggttcttgcctccccaccc

SEQ ID NO: 3085 - RNA, 23 nt, synthetic construct
  source 1..23: mol_type = other RNA
acactggttcttgcctccccacc

SEQ ID NO: 3086 - RNA, 23 nt, synthetic construct
  source 1..23: mol_type = other RNA
  modified_base 5: mod_base = OTHER; note = Thymine
  modified_base 12: mod_base = OTHER; note = Thymine
acactggttcttgcctccccacc

SEQ ID NO: 3087 - RNA, 23 nt, synthetic construct
  source 1..23: mol_type = other RNA
aacactggttcttgcctccccac

SEQ ID NO: 3088 - RNA, 23 nt, synthetic construct
  source 1..23: mol_type = other RNA
  modified_base 12: mod_base = OTHER; note = Thymine
aacactggttcttgcctccccac

SEQ ID NO: 3089 - RNA, 23 nt, synthetic construct
  source 1..23: mol_type = other RNA
  modified_base 7: mod_base = OTHER; note = Thymine
aaacactggttcttgcctcccca

SEQ ID NO: 3090 - RNA, 23 nt, synthetic construct
  source 1..23: mol_type = other RNA
  modified_base 12: mod_base = OTHER; note = Thymine
aaaacactggttcttgcctcccc

SEQ ID NO: 3091 - RNA, 23 nt, synthetic construct
  source 1..23: mol_type = other RNA
atttttgtttcacaaacaagctg

SEQ ID NO: 3092 - RNA, 23 nt, synthetic construct
  source 1..23: mol_type = other RNA
attttttgtttcacaaacaagct

SEQ ID NO: 3093 - RNA, 23 nt, synthetic construct
  source 1..23: mol_type = other RNA
acttttttgtttcacaaacaagc

SEQ ID NO: 3094 - RNA, 23 nt, synthetic construct
  source 1..23: mol_type = other RNA
agcatctgtggaaaaaactaagg

SEQ ID NO: 3095 - RNA, 23 nt, synthetic construct
  source 1..23: mol_type = other RNA
acaagcatctgtggaaaaaacta

SEQ ID NO: 3096 - RNA, 23 nt, synthetic construct
  source 1..23: mol_type = other RNA
acacaagcatctgtggaaaaaac

SEQ ID NO: 3097 - RNA, 23 nt, synthetic construct
  source 1..23: mol_type = other RNA
atcacaagcatctgtggaaaaaa

SEQ ID NO: 3098 - RNA, 23 nt, synthetic construct
  source 1..23: mol_type = other RNA
attagaagaaaaggtgggagact

SEQ ID NO: 3099 - RNA, 23 nt, synthetic construct
  source 1..23: mol_type = other RNA
aaacaagctggtcggttggaatt

SEQ ID NO: 3100 - RNA, 23 nt, synthetic construct
  source 1..23: mol_type = other RNA
actcattagaagaaaaggtggga

SEQ ID NO: 3101 - RNA, 23 nt, synthetic construct
  source 1..23: mol_type = other RNA
agtttcttcatccagttgaggga

SEQ ID NO: 3102 - RNA, 23 nt, synthetic construct
  source 1..23: mol_type = other RNA
atacacagcaaacaggaatgggc

SEQ ID NO: 3103 - RNA, 23 nt, synthetic construct
  source 1..23: mol_type = other RNA
aagctggtcggttggaattcttt

SEQ ID NO: 3104 - RNA, 23 nt, synthetic construct
  source 1..23: mol_type = other RNA
attctctaaaataaacccagcaa

SEQ ID NO: 3105 - RNA, 23 nt, synthetic construct
  source 1..23: mol_type = other RNA
atagctcactgtgcatgccatat

SEQ ID NO: 3106 - RNA, 23 nt, synthetic construct
  source 1..23: mol_type = other RNA
atgaacctgtcaatcttctcagc

SEQ ID NO: 3107 - RNA, 21 nt, synthetic construct
  source 1..21: mol_type = other RNA
  modified_base 1: mod_base = OTHER; note = 2'-O-methyladenosine-3'-phosphorothioate
  modified_base 2: mod_base = OTHER; note = 2'-O-methylguanosine-3'-phosphorothioate
  modified_base 3: mod_base = OTHER; note = 2'-O-methylcytidine-3'-phosphate
  modified_base 4: mod_base = OTHER; note = 2'-O-methylcytidine-3'-phosphate
  modified_base 5: mod_base = OTHER; note = 2'-O-methyluridine-3'-phosphate
  modified_base 6: mod_base = OTHER; note = 2'-O-methylguanosine-3'-phosphate
  modified_base 7: mod_base = OTHER; note = 2'-fluoroadenosine-3'-phosphate
  modified_base 8: mod_base = OTHER; note = 2'-O-methylguanosine-3'-phosphate
  modified_base 9: mod_base = OTHER; note = 2'-fluoroguanosine-3'-phosphate
  modified_base 10: mod_base = OTHER; note = 2'-fluoroguanosine-3'-phosphate
  modified_base 11: mod_base = OTHER; note = 2'-fluorocytidine-3'-phosphate
  modified_base 12: mod_base = OTHER; note = 2'-O-methylcytidine-3'-phosphate
  modified_base 13: mod_base = OTHER; note = 2'-O-methyladenosine-3'-phosphate
  modified_base 14: mod_base = OTHER; note = 2'-O-methylcytidine-3'-phosphate
  modified_base 15: mod_base = OTHER; note = 2'-O-methylcytidine-3'-phosphate
  modified_base 16: mod_base = OTHER; note = 2'-O-methyladenosine-3'-phosphate
  modified_base 17: mod_base = OTHER; note = 2'-O-methyluridine-3'-phosphate
  modified_base 18: mod_base = OTHER; note = 2'-O-methylcytidine-3'-phosphate
  modified_base 19: mod_base = OTHER; note = 2'-O-methylcytidine-3'-phosphate
  modified_base 20: mod_base = OTHER; note = 2'-O-methyluridine-3'-phosphate
  modified_base 21: mod_base = OTHER; note = 2'-O-methyluridine-3'-phosphate N-[tris(GalNAc-alkyl)-amidodecanoyl)]-4-hydroxyprolinol (Hyp-(GalNAc-alkyl)3)
agcctgagggccaccatcctt

SEQ ID NO: 3108 - RNA, 21 nt, synthetic construct
  source 1..21: mol_type = other RNA
  modified_base 1: mod_base = OTHER; note = 2'-O-methylcytidine-3'-phosphorothioate
  modified_base 2: mod_base = OTHER; note = 2'-O-methylcytidine-3'-phosphorothioate
  modified_base 3: mod_base = OTHER; note = 2'-O-methyluridine-3'-phosphate
  modified_base 4: mod_base = OTHER; note = 2'-O-methylguanosine-3'-phosphate
  modified_base 5: mod_base = OTHER; note = 2'-O-methyladenosine-3'-phosphate
  modified_base 6: mod_base = OTHER; note = 2'-O-methylguanosine-3'-phosphate
  modified_base 7: mod_base = OTHER; note = 2'-fluoroguanosine-3'-phosphate
  modified_base 8: mod_base = OTHER; note = 2'-O-methylguanosine-3'-phosphate
  modified_base 9: mod_base = OTHER; note = 2'-fluorocytidine-3'-phosphate
  modified_base 10: mod_base = OTHER; note = 2'-fluorocytidine-3'-phosphate
  modified_base 11: mod_base = OTHER; note = 2'-fluoroadenosine-3'-phosphate
  modified_base 12: mod_base = OTHER; note = 2'-O-methylcytidine-3'-phosphate
  modified_base 13: mod_base = OTHER; note = 2'-O-methylcytidine-3'-phosphate
  modified_base 14: mod_base = OTHER; note = 2'-O-methyladenosine-3'-phosphate
  modified_base 15: mod_base = OTHER; note = 2'-O-methyluridine-3'-phosphate
  modified_base 16: mod_base = OTHER; note = 2'-O-methylcytidine-3'-phosphate
  modified_base 17: mod_base = OTHER; note = 2'-O-methylcytidine-3'-phosphate
  modified_base 18: mod_base = OTHER; note = 2'-O-methyluridine-3'-phosphate
  modified_base 19: mod_base = OTHER; note = 2'-O-methylcytidine-3'-phosphate
  modified_base 20: mod_base = OTHER; note = 2'-O-methyluridine-3'-phosphate
  modified_base 21: mod_base = OTHER; note = 2'-O-methyluridine-3'-phosphate N-[tris(GalNAc-alkyl)-amidodecanoyl)]-4-hydroxyprolinol (Hyp-(GalNAc-alkyl)3)
cctgagggccaccatcctctt

SEQ ID NO: 3109 - RNA, 21 nt, synthetic construct
  source 1..21: mol_type = other RNA
  modified_base 1: mod_base = OTHER; note = 2'-O-methyladenosine-3'-phosphorothioate
  modified_base 2: mod_base = OTHER; note = 2'-O-methylguanosine-3'-phosphorothioate
  modified_base 3: mod_base = OTHER; note = 2'-O-methylguanosine-3'-phosphate
  modified_base 4: mod_base = OTHER; note = 2'-O-methylguanosine-3'-phosphate
  modified_base 5: mod_base = OTHER; note = 2'-O-methylcytidine-3'-phosphate
  modified_base 6: mod_base = OTHER; note = 2'-O-methylcytidine-3'-phosphate
  modified_base 7: mod_base = OTHER; note = 2'-fluoroadenosine-3'-phosphate
  modified_base 8: mod_base = OTHER; note = 2'-O-methylcytidine-3'-phosphate
  modified_base 9: mod_base = OTHER; note = 2'-fluorocytidine-3'-phosphate
  modified_base 10: mod_base = OTHER; note = 2'-fluoroadenosine-3'-phosphate
  modified_base 11: mod_base = OTHER; note = 2'-fluorouridine-3'-phosphate
  modified_base 12: mod_base = OTHER; note = 2'-O-methylcytidine-3'-phosphate
  modified_base 13: mod_base = OTHER; note = 2'-O-methylcytidine-3'-phosphate
  modified_base 14: mod_base = OTHER; note = 2'-O-methyluridine-3'-phosphate
  modified_base 15: mod_base = OTHER; note = 2'-O-methylcytidine-3'-phosphate
  modified_base 16: mod_base = OTHER; note = 2'-O-methyluridine-3'-phosphate
  modified_base 17: mod_base = OTHER; note = 2'-O-methylguanosine-3'-phosphate
  modified_base 18: mod_base = OTHER; note = 2'-O-methylcytidine-3'-phosphate
  modified_base 19: mod_base = OTHER; note = 2'-O-methylcytidine-3'-phosphate
  modified_base 20: mod_base = OTHER; note = 2'-O-methyluridine-3'-phosphate
  modified_base 21: mod_base = OTHER; note = 2'-O-methyluridine-3'-phosphate N-[tris(GalNAc-alkyl)-amidodecanoyl)]-4-hydroxyprolinol (Hyp-(GalNAc-alkyl)3)
agggccaccatcctctgcctt

SEQ ID NO: 3110 - RNA, 21 nt, synthetic construct
  source 1..21: mol_type = other RNA
  modified_base 1: mod_base = OTHER; note = 2'-O-methylguanosine-3'-phosphorothioate
  modified_base 2: mod_base = OTHER; note = 2'-O-methyluridine-3'-phosphorothioate
  modified_base 3: mod_base = OTHER; note = 2'-O-methylcytidine-3'-phosphate
  modified_base 4: mod_base = OTHER; note = 2'-O-methyladenosine-3'-phosphate
  modified_base 5: mod_base = OTHER; note = 2'-O-methyluridine-3'-phosphate
  modified_base 6: mod_base = OTHER; note = 2'-O-methylcytidine-3'-phosphate
  modified_base 7: mod_base = OTHER; note = 2'-fluorocytidine-3'-phosphate
  modified_base 8: mod_base = OTHER; note = 2'-O-methyladenosine-3'-phosphate
  modified_base 9: mod_base = OTHER; note = 2'-fluorocytidine-3'-phosphate
  modified_base 10: mod_base = OTHER; note = 2'-fluoroadenosine-3'-phosphate
  modified_base 11: mod_base = OTHER; note = 2'-fluoroadenosine-3'-phosphate
  modified_base 12: mod_base = OTHER; note = 2'-O-methyluridine-3'-phosphate
  modified_base 13: mod_base = OTHER; note = 2'-O-methylguanosine-3'-phosphate
  modified_base 14: mod_base = OTHER; note = 2'-O-methyladenosine-3'-phosphate
  modified_base 15: mod_base = OTHER; note = 2'-O-methylguanosine-3'-phosphate
  modified_base 16: mod_base = OTHER; note = 2'-O-methyladenosine-3'-phosphate
  modified_base 17: mod_base = OTHER; note = 2'-O-methylguanosine-3'-phosphate
  modified_base 18: mod_base = OTHER; note = 2'-O-methyluridine-3'-phosphate
  modified_base 19: mod_base = OTHER; note = 2'-O-methyladenosine-3'-phosphate
  modified_base 20: mod_base = OTHER; note = 2'-O-methylcytidine-3'-phosphate
  modified_base 21: mod_base = OTHER; note = 2'-O-methyluridine-3'-phosphate N-[tris(GalNAc-alkyl)-amidodecanoyl)]-4-hydroxyprolinol (Hyp-(GalNAc-alkyl)3)
gtcatccacaatgagagtact

SEQ ID NO: 3111 - RNA, 21 nt, synthetic construct
  source 1..21: mol_type = other RNA
  modified_base 1: mod_base = OTHER; note = 2'-O-methylguanosine-3'-phosphorothioate
  modified_base 2: mod_base = OTHER; note = 2'-O-methyluridine-3'-phosphorothioate
  modified_base 3: mod_base = OTHER; note = 2'-O-methylguanosine-3'-phosphate
  modified_base 4: mod_base = OTHER; note = 2'-O-methyladenosine-3'-phosphate
  modified_base 5: mod_base = OTHER; note = 2'-O-methylcytidine-3'-phosphate
  modified_base 6: mod_base = OTHER; note = 2'-O-methylcytidine-3'-phosphate
  modified_base 7: mod_base = OTHER; note = 2'-fluoroguanosine-3'-phosphate
  modified_base 8: mod_base = OTHER; note = 2'-O-methylguanosine-3'-phosphate
  modified_base 9: mod_base = OTHER; note = 2'-fluoroguanosine-3'-phosphate
  modified_base 10: mod_base = OTHER; note = 2'-fluorouridine-3'-phosphate
  modified_base 11: mod_base = OTHER; note = 2'-fluoroguanosine-3'-phosphate
  modified_base 12: mod_base = OTHER; note = 2'-O-methyluridine-3'-phosphate
  modified_base 13: mod_base = OTHER; note = 2'-O-methyladenosine-3'-phosphate
  modified_base 14: mod_base = OTHER; note = 2'-O-methylcytidine-3'-phosphate
  modified_base 15: mod_base = OTHER; note = 2'-O-methyladenosine-3'-phosphate
  modified_base 16: mod_base = OTHER; note = 2'-O-methyluridine-3'-phosphate
  modified_base 17: mod_base = OTHER; note = 2'-O-methyladenosine-3'-phosphate
  modified_base 18: mod_base = OTHER; note = 2'-O-methylcytidine-3'-phosphate
  modified_base 19: mod_base = OTHER; note = 2'-O-methyladenosine-3'-phosphate
  modified_base 20: mod_base = OTHER; note = 2'-O-methylcytidine-3'-phosphate
  modified_base 21: mod_base = OTHER; note = 2'-O-methyluridine-3'-phosphate N-[tris(GalNAc-alkyl)-amidodecanoyl)]-4-hydroxyprolinol (Hyp-(GalNAc-alkyl)3)
gtgaccgggtgtacatacact

SEQ ID NO: 3112 - RNA, 21 nt, synthetic construct
  source 1..21: mol_type = other RNA
  modified_base 1: mod_base = OTHER; note = 2'-O-methylcytidine-3'-phosphorothioate
  modified_base 2: mod_base = OTHER; note = 2'-O-methyluridine-3'-phosphorothioate
  modified_base 3: mod_base = OTHER; note = 2'-O-methyluridine-3'-phosphate
  modified_base 4: mod_base = OTHER; note = 2'-O-methylcytidine-3'-phosphate
  modified_base 5: mod_base = OTHER; note = 2'-O-methylcytidine-3'-phosphate
  modified_base 6: mod_base = OTHER; note = 2'-O-methyladenosine-3'-phosphate
  modified_base 7: mod_base = OTHER; note = 2'-fluorocytidine-3'-phosphate
  modified_base 8: mod_base = OTHER; note = 2'-O-methylcytidine-3'-phosphate
  modified_base 9: mod_base = OTHER; note = 2'-fluorouridine-3'-phosphate
  modified_base 10: mod_base = OTHER; note = 2'-fluorocytidine-3'-phosphate
  modified_base 11: mod_base = OTHER; note = 2'-fluoroguanosine-3'-phosphate
  modified_base 12: mod_base = OTHER; note = 2'-O-methyluridine-3'-phosphate
  modified_base 13: mod_base = OTHER; note = 2'-O-methylcytidine-3'-phosphate
  modified_base 14: mod_base = OTHER; note = 2'-O-methyladenosine-3'-phosphate
  modified_base 15: mod_base = OTHER; note = 2'-O-methyluridine-3'-phosphate
  modified_base 16: mod_base = OTHER; note = 2'-O-methylcytidine-3'-phosphate
  modified_base 17: mod_base = OTHER; note = 2'-O-methylcytidine-3'-phosphate
  modified_base 18: mod_base = OTHER; note = 2'-O-methyladenosine-3'-phosphate
  modified_base 19: mod_base = OTHER; note = 2'-O-methylcytidine-3'-phosphate
  modified_base 20: mod_base = OTHER; note = 2'-O-methyladenosine-3'-phosphate
  modified_base 21: mod_base = OTHER; note = 2'-O-methyluridine-3'-phosphate N-[tris(GalNAc-alkyl)-amidodecanoyl)]-4-hydroxyprolinol (Hyp-(GalNAc-alkyl)3)
cttccacctcgtcatccacat

SEQ ID NO: 3113 - RNA, 21 nt, synthetic construct
  source 1..21: mol_type = other RNA
  modified_base 1: mod_base = OTHER; note = 2'-O-methyluridine-3'-phosphorothioate
  modified_base 2: mod_base = OTHER; note = 2'-O-methyluridine-3'-phosphorothioate
  modified_base 3: mod_base = OTHER; note = 2'-O-methylcytidine-3'-phosphate
  modified_base 4: mod_base = OTHER; note = 2'-O-methylcytidine-3'-phosphate
  modified_base 5: mod_base = OTHER; note = 2'-O-methyladenosine-3'-phosphate
  modified_base 6: mod_base = OTHER; note = 2'-O-methylcytidine-3'-phosphate
  modified_base 7: mod_base = OTHER; note = 2'-fluorocytidine-3'-phosphate
  modified_base 8: mod_base = OTHER; note = 2'-O-methyluridine-3'-phosphate
  modified_base 9: mod_base = OTHER; note = 2'-fluorocytidine-3'-phosphate
  modified_base 10: mod_base = OTHER; note = 2'-fluoroguanosine-3'-phosphate
  modified_base 11: mod_base = OTHER; note = 2'-fluorouridine-3'-phosphate
  modified_base 12: mod_base = OTHER; note = 2'-O-methylcytidine-3'-phosphate
  modified_base 13: mod_base = OTHER; note = 2'-O-methyladenosine-3'-phosphate
  modified_base 14: mod_base = OTHER; note = 2'-O-methyluridine-3'-phosphate
  modified_base 15: mod_base = OTHER; note = 2'-O-methylcytidine-3'-phosphate
  modified_base 16: mod_base = OTHER; note = 2'-O-methylcytidine-3'-phosphate
  modified_base 17: mod_base = OTHER; note = 2'-O-methyladenosine-3'-phosphate
  modified_base 18: mod_base = OTHER; note = 2'-O-methylcytidine-3'-phosphate
  modified_base 19: mod_base = OTHER; note = 2'-O-methyladenosine-3'-phosphate
  modified_base 20: mod_base = OTHER; note = 2'-O-methyladenosine-3'-phosphate
  modified_base 21: mod_base = OTHER; note = 2'-O-methyluridine-3'-phosphate N-[tris(GalNAc-alkyl)-amidodecanoyl)]-4-hydroxyprolinol (Hyp-(GalNAc-alkyl)3)
ttccacctcgtcatccacaat

SEQ ID NO: 3114 - RNA, 21 nt, synthetic construct
  source 1..21: mol_type = other RNA
  modified_base 1: mod_base = OTHER; note = 2'-O-methyluridine-3'-phosphorothioate
  modified_base 2: mod_base = OTHER; note = 2'-O-methylcytidine-3'-phosphorothioate
  modified_base 3: mod_base = OTHER; note = 2'-O-methylcytidine-3'-phosphate
  modified_base 4: mod_base = OTHER; note = 2'-O-methyladenosine-3'-phosphate
  modified_base 5: mod_base = OTHER; note = 2'-O-methylcytidine-3'-phosphate
  modified_base 6: mod_base = OTHER; note = 2'-O-methylcytidine-3'-phosphate
  modified_base 7: mod_base = OTHER; note = 2'-fluorouridine-3'-phosphate
  modified_base 8: mod_base = OTHER; note = 2'-O-methylcytidine-3'-phosphate
  modified_base 9: mod_base = OTHER; note = 2'-fluoroguanosine-3'-phosphate
  modified_base 10: mod_base = OTHER; note = 2'-fluorouridine-3'-phosphate
  modified_base 11: mod_base = OTHER; note = 2'-fluorocytidine-3'-phosphate
  modified_base 12: mod_base = OTHER; note = 2'-O-methyladenosine-3'-phosphate
  modified_base 13: mod_base = OTHER; note = 2'-O-methyluridine-3'-phosphate
  modified_base 14: mod_base = OTHER; note = 2'-O-methylcytidine-3'-phosphate
  modified_base 15: mod_base = OTHER; note = 2'-O-methylcytidine-3'-phosphate
  modified_base 16: mod_base = OTHER; note = 2'-O-methyladenosine-3'-phosphate
  modified_base 17: mod_base = OTHER; note = 2'-O-methylcytidine-3'-phosphate
  modified_base 18: mod_base = OTHER; note = 2'-O-methyladenosine-3'-phosphate
  modified_base 19: mod_base = OTHER; note = 2'-O-methyladenosine-3'-phosphate
  modified_base 20: mod_base = OTHER; note = 2'-O-methyluridine-3'-phosphate
  modified_base 21: mod_base = OTHER; note = 2'-O-methyluridine-3'-phosphate N-[tris(GalNAc-alkyl)-amidodecanoyl)]-4-hydroxyprolinol (Hyp-(GalNAc-alkyl)3)
tccacctcgtcatccacaatt

SEQ ID NO: 3115 - RNA, 21 nt, synthetic construct
  source 1..21: mol_type = other RNA
  modified_base 1: mod_base = OTHER; note = 2'-O-methylcytidine-3'-phosphorothioate
  modified_base 2: mod_base = OTHER; note = 2'-O-methylcytidine-3'-phosphorothioate
  modified_base 3: mod_base = OTHER; note = 2'-O-methyladenosine-3'-phosphate
  modified_base 4: mod_base = OTHER; note = 2'-O-methylcytidine-3'-phosphate
  modified_base 5: mod_base = OTHER; note = 2'-O-methylcytidine-3'-phosphate
  modified_base 6: mod_base = OTHER; note = 2'-O-methyluridine-3'-phosphate
  modified_base 7: mod_base = OTHER; note = 2'-fluorocytidine-3'-phosphate
  modified_base 8: mod_base = OTHER; note = 2'-O-methylguanosine-3'-phosphate
  modified_base 9: mod_base = OTHER; note = 2'-fluorouridine-3'-phosphate
  modified_base 10: mod_base = OTHER; note = 2'-fluorocytidine-3'-phosphate
  modified_base 11: mod_base = OTHER; note = 2'-fluoroadenosine-3'-phosphate
  modified_base 12: mod_base = OTHER; note = 2'-O-methyluridine-3'-phosphate
  modified_base 13: mod_base = OTHER; note = 2'-O-methylcytidine-3'-phosphate
  modified_base 14: mod_base = OTHER; note = 2'-O-methylcytidine-3'-phosphate
  modified_base 15: mod_base = OTHER; note = 2'-O-methyladenosine-3'-phosphate
  modified_base 16: mod_base = OTHER; note = 2'-O-methylcytidine-3'-phosphate
  modified_base 17: mod_base = OTHER; note = 2'-O-methyladenosine-3'-phosphate
  modified_base 18: mod_base = OTHER; note = 2'-O-methyladenosine-3'-phosphate
  modified_base 19: mod_base = OTHER; note = 2'-O-methyluridine-3'-phosphate
  modified_base 20: mod_base = OTHER; note = 2'-O-methylguanosine-3'-phosphate
  modified_base 21: mod_base = OTHER; note = 2'-O-methyluridine-3'-phosphate N-[tris(GalNAc-alkyl)-amidodecanoyl)]-4-hydroxyprolinol (Hyp-(GalNAc-alkyl)3)
ccacctcgtcatccacaatgt

SEQ ID NO: 3116 - RNA, 21 nt, synthetic construct
  source 1..21: mol_type = other RNA
  modified_base 1: mod_base = OTHER; note = 2'-O-methylcytidine-3'-phosphorothioate
  modified_base 2: mod_base = OTHER; note = 2'-O-methyladenosine-3'-phosphorothioate
  modified_base 3: mod_base = OTHER; note = 2'-O-methylcytidine-3'-phosphate
  modified_base 4: mod_base = OTHER; note = 2'-O-methylcytidine-3'-phosphate
  modified_base 5: mod_base = OTHER; note = 2'-O-methyluridine-3'-phosphate
  modified_base 6: mod_base = OTHER; note = 2'-O-methylcytidine-3'-phosphate
  modified_base 7: mod_base = OTHER; note = 2'-fluoroguanosine-3'-phosphate
  modified_base 8: mod_base = OTHER; note = 2'-O-methyluridine-3'-phosphate
  modified_base 9: mod_base = OTHER; note = 2'-fluorocytidine-3'-phosphate
  modified_base 10: mod_base = OTHER; note = 2'-fluoroadenosine-3'-phosphate
  modified_base 11: mod_base = OTHER; note = 2'-fluorouridine-3'-phosphate
  modified_base 12: mod_base = OTHER; note = 2'-O-methylcytidine-3'-phosphate
  modified_base 13: mod_base = OTHER; note = 2'-O-methylcytidine-3'-phosphate
  modified_base 14: mod_base = OTHER; note = 2'-O-methyladenosine-3'-phosphate
  modified_base 15: mod_base = OTHER; note = 2'-O-methylcytidine-3'-phosphate
  modified_base 16: mod_base = OTHER; note = 2'-O-methyladenosine-3'-phosphate
  modified_base 17: mod_base = OTHER; note = 2'-O-methyladenosine-3'-phosphate
  modified_base 18: mod_base = OTHER; note = 2'-O-methyluridine-3'-phosphate
  modified_base 19: mod_base = OTHER; note = 2'-O-methylguanosine-3'-phosphate
  modified_base 20: mod_base = OTHER; note = 2'-O-methyladenosine-3'-phosphate
  modified_base 21: mod_base = OTHER; note = 2'-O-methyluridine-3'-phosphate N-[tris(GalNAc-alkyl)-amidodecanoyl)]-4-hydroxyprolinol (Hyp-(GalNAc-alkyl)3)
cacctcgtcatccacaatgat

SEQ ID NO: 3117 - RNA, 21 nt, synthetic construct
  source 1..21: mol_type = other RNA
  modified_base 1: mod_base = OTHER; note = 2'-O-methylcytidine-3'-phosphorothioate
  modified_base 2: mod_base = OTHER; note = 2'-O-methylcytidine-3'-phosphorothioate
  modified_base 3: mod_base = OTHER; note = 2'-O-methyluridine-3'-phosphate
  modified_base 4: mod_base = OTHER; note = 2'-O-methylcytidine-3'-phosphate
  modified_base 5: mod_base = OTHER; note = 2'-O-methylguanosine-3'-phosphate
  modified_base 6: mod_base = OTHER; note = 2'-O-methyluridine-3'-phosphate
  modified_base 7: mod_base = OTHER; note = 2'-fluorocytidine-3'-phosphate
  modified_base 8: mod_base = OTHER; note = 2'-O-methyladenosine-3'-phosphate
  modified_base 9: mod_base = OTHER; note = 2'-fluorouridine-3'-phosphate
  modified_base 10: mod_base = OTHER; note = 2'-fluorocytidine-3'-phosphate
  modified_base 11: mod_base = OTHER; note = 2'-fluorocytidine-3'-phosphate
  modified_base 12: mod_base = OTHER; note = 2'-O-methyladenosine-3'-phosphate
  modified_base 13: mod_base = OTHER; note = 2'-O-methylcytidine-3'-phosphate
  modified_base 14: mod_base = OTHER; note = 2'-O-methyladenosine-3'-phosphate
  modified_base 15: mod_base = OTHER; note = 2'-O-methyladenosine-3'-phosphate
  modified_base 16: mod_base = OTHER; note = 2'-O-methyluridine-3'-phosphate
  modified_base 17: mod_base = OTHER; note = 2'-O-methylguanosine-3'-phosphate
  modified_base 18: mod_base = OTHER; note = 2'-O-methyladenosine-3'-phosphate
  modified_base 19: mod_base = OTHER; note = 2'-O-methylguanosine-3'-phosphate
  modified_base 20: mod_base = OTHER; note = 2'-O-methyladenosine-3'-phosphate
  modified_base 21: mod_base = OTHER; note = 2'-O-methyluridine-3'-phosphate N-[tris(GalNAc-alkyl)-amidodecanoyl)]-4-hydroxyprolinol (Hyp-(GalNAc-alkyl)3)
cctcgtcatccacaatgagat

SEQ ID NO: 3118 - RNA, 21 nt, synthetic construct
  source 1..21: mol_type = other RNA
  modified_base 1: mod_base = OTHER; note = 2'-O-methylcytidine-3'-phosphorothioate
  modified_base 2: mod_base = OTHER; note = 2'-O-methyluridine-3'-phosphorothioate
  modified_base 3: mod_base = OTHER; note = 2'-O-methylcytidine-3'-phosphate
  modified_base 4: mod_base = OTHER; note = 2'-O-methylguanosine-3'-phosphate
  modified_base 5: mod_base = OTHER; note = 2'-O-methyluridine-3'-phosphate
  modified_base 6: mod_base = OTHER; note = 2'-O-methylcytidine-3'-phosphate
  modified_base 7: mod_base = OTHER; note = 2'-fluoroadenosine-3'-phosphate
  modified_base 8: mod_base = OTHER; note = 2'-O-methyluridine-3'-phosphate
  modified_base 9: mod_base = OTHER; note = 2'-fluorocytidine-3'-phosphate
  modified_base 10: mod_base = OTHER; note = 2'-fluorocytidine-3'-phosphate
  modified_base 11: mod_base = OTHER; note = 2'-fluoroadenosine-3'-phosphate
  modified_base 12: mod_base = OTHER; note = 2'-O-methylcytidine-3'-phosphate
  modified_base 13: mod_base = OTHER; note = 2'-O-methyladenosine-3'-phosphate
  modified_base 14: mod_base = OTHER; note = 2'-O-methyladenosine-3'-phosphate
  modified_base 15: mod_base = OTHER; note = 2'-O-methyluridine-3'-phosphate
  modified_base 16: mod_base = OTHER; note = 2'-O-methylguanosine-3'-phosphate
  modified_base 17: mod_base = OTHER; note = 2'-O-methyladenosine-3'-phosphate
  modified_base 18: mod_base = OTHER; note = 2'-O-methylguanosine-3'-phosphate
  modified_base 19: mod_base = OTHER; note = 2'-O-methyladenosine-3'-phosphate
  modified_base 20: mod_base = OTHER; note = 2'-O-methylguanosine-3'-phosphate
  modified_base 21: mod_base = OTHER; note = 2'-O-methyluridine-3'-phosphate N-[tris(GalNAc-alkyl)-amidodecanoyl)]-4-hydroxyprolinol (Hyp-(GalNAc-alkyl)3)
ctcgtcatccacaatgagagt

SEQ ID NO: 3119 - RNA, 21 nt, synthetic construct
  source 1..21: mol_type = other RNA
  modified_base 1: mod_base = OTHER; note = 2'-O-methyluridine-3'-phosphorothioate
  modified_base 2: mod_base = OTHER; note = 2'-O-methylcytidine-3'-phosphorothioate
  modified_base 3: mod_base = OTHER; note = 2'-O-methylguanosine-3'-phosphate
  modified_base 4: mod_base = OTHER; note = 2'-O-methyluridine-3'-phosphate
  modified_base 5: mod_base = OTHER; note = 2'-O-methylcytidine-3'-phosphate
  modified_base 6: mod_base = OTHER; note = 2'-O-methyladenosine-3'-phosphate
  modified_base 7: mod_base = OTHER; note = 2'-fluorouridine-3'-phosphate
  modified_base 8: mod_base = OTHER; note = 2'-O-methylcytidine-3'-phosphate
  modified_base 9: mod_base = OTHER; note = 2'-fluorocytidine-3'-phosphate
  modified_base 10: mod_base = OTHER; note = 2'-fluoroadenosine-3'-phosphate
  modified_base 11: mod_base = OTHER; note = 2'-fluorocytidine-3'-phosphate
  modified_base 12: mod_base = OTHER; note = 2'-O-methyladenosine-3'-phosphate
  modified_base 13: mod_base = OTHER; note = 2'-O-methyladenosine-3'-phosphate
  modified_base 14: mod_base = OTHER; note = 2'-O-methyluridine-3'-phosphate
  modified_base 15: mod_base = OTHER; note = 2'-O-methylguanosine-3'-phosphate
  modified_base 16: mod_base = OTHER; note = 2'-O-methyladenosine-3'-phosphate
  modified_base 17: mod_base = OTHER; note = 2'-O-methylguanosine-3'-phosphate
  modified_base 18: mod_base = OTHER; note = 2'-O-methyladenosine-3'-phosphate
  modified_base 19: mod_base = OTHER; note = 2'-O-methylguanosine-3'-phosphate
  modified_base 20: mod_base = OTHER; note = 2'-O-methyluridine-3'-phosphate
  modified_base 21: mod_base = OTHER; note = 2'-O-methyluridine-3'-phosphate N-[tris(GalNAc-alkyl)-amidodecanoyl)]-4-hydroxyprolinol (Hyp-(GalNAc-alkyl)3)
tcgtcatccacaatgagagtt

SEQ ID NO: 3120 - RNA, 21 nt, synthetic construct
  source 1..21: mol_type = other RNA
  modified_base 1: mod_base = OTHER; note = 2'-O-methylcytidine-3'-phosphorothioate
  modified_base 2: mod_base = OTHER; note = 2'-O-methylguanosine-3'-phosphorothioate
  modified_base 3: mod_base = OTHER; note = 2'-O-methyluridine-3'-phosphate
  modified_base 4: mod_base = OTHER; note = 2'-O-methylcytidine-3'-phosphate
  modified_base 5: mod_base = OTHER; note = 2'-O-methyladenosine-3'-phosphate
  modified_base 6: mod_base = OTHER; note = 2'-O-methyluridine-3'-phosphate
  modified_base 7: mod_base = OTHER; note = 2'-fluorocytidine-3'-phosphate
  modified_base 8: mod_base = OTHER; note = 2'-O-methylcytidine-3'-phosphate
  modified_base 9: mod_base = OTHER; note = 2'-fluoroadenosine-3'-phosphate
  modified_base 10: mod_base = OTHER; note = 2'-fluorocytidine-3'-phosphate
  modified_base 11: mod_base = OTHER; note = 2'-fluoroadenosine-3'-phosphate
  modified_base 12: mod_base = OTHER; note = 2'-O-methyladenosine-3'-phosphate
  modified_base 13: mod_base = OTHER; note = 2'-O-methyluridine-3'-phosphate
  modified_base 14: mod_base = OTHER; note = 2'-O-methylguanosine-3'-phosphate
  modified_base 15: mod_base = OTHER; note = 2'-O-methyladenosine-3'-phosphate
  modified_base 16: mod_base = OTHER; note = 2'-O-methylguanosine-3'-phosphate
  modified_base 17: mod_base = OTHER; note = 2'-O-methyladenosine-3'-phosphate
  modified_base 18: mod_base = OTHER; note = 2'-O-methylguanosine-3'-phosphate
  modified_base 19: mod_base = OTHER; note = 2'-O-methyluridine-3'-phosphate
  modified_base 20: mod_base = OTHER; note = 2'-O-methyladenosine-3'-phosphate
  modified_base 21: mod_base = OTHER; note = 2'-O-methyluridine-3'-phosphate N-[tris(GalNAc-alkyl)-amidodecanoyl)]-4-hydroxyprolinol (Hyp-(GalNAc-alkyl)3)
cgtcatccacaatgagagtat

SEQ ID NO: 3121 - RNA, 21 nt, synthetic construct
  source 1..21: mol_type = other RNA
  modified_base 1: mod_base = OTHER; note = 2'-O-methyluridine-3'-phosphorothioate
  modified_base 2: mod_base = OTHER; note = 2'-O-methylcytidine-3'-phosphorothioate
  modified_base 3: mod_base = OTHER; note = 2'-O-methyladenosine-3'-phosphate
  modified_base 4: mod_base = OTHER; note = 2'-O-methyluridine-3'-phosphate
  modified_base 5: mod_base = OTHER; note = 2'-O-methylcytidine-3'-phosphate
  modified_base 6: mod_base = OTHER; note = 2'-O-methylcytidine-3'-phosphate
  modified_base 7: mod_base = OTHER; note = 2'-fluoroadenosine-3'-phosphate
  modified_base 8: mod_base = OTHER; note = 2'-O-methylcytidine-3'-phosphate
  modified_base 9: mod_base = OTHER; note = 2'-fluoroadenosine-3'-phosphate
  modified_base 10: mod_base = OTHER; note = 2'-fluoroadenosine-3'-phosphate
  modified_base 11: mod_base = OTHER; note = 2'-fluorouridine-3'-phosphate
  modified_base 12: mod_base = OTHER; note = 2'-O-methylguanosine-3'-phosphate
  modified_base 13: mod_base = OTHER; note = 2'-O-methyladenosine-3'-phosphate
  modified_base 14: mod_base = OTHER; note = 2'-O-methylguanosine-3'-phosphate
  modified_base 15: mod_base = OTHER; note = 2'-O-methyladenosine-3'-phosphate
  modified_base 16: mod_base = OTHER; note = 2'-O-methylguanosine-3'-phosphate
  modified_base 17: mod_base = OTHER; note = 2'-O-methyluridine-3'-phosphate
  modified_base 18: mod_base = OTHER; note = 2'-O-methyladenosine-3'-phosphate
  modified_base 19: mod_base = OTHER; note = 2'-O-methylcytidine-3'-phosphate
  modified_base 20: mod_base = OTHER; note = 2'-O-methylcytidine-3'-phosphate
  modified_base 21: mod_base = OTHER; note = 2'-O-methyluridine-3'-phosphate N-[tris(GalNAc-alkyl)-amidodecanoyl)]-4-hydroxyprolinol (Hyp-(GalNAc-alkyl)3)
tcatccacaatgagagtacct

SEQ ID NO: 3122 - RNA, 21 nt, synthetic construct
  source 1..21: mol_type = other RNA
  modified_base 1: mod_base = OTHER; note = 2'-O-methylcytidine-3'-phosphorothioate
  modified_base 2: mod_base = OTHER; note = 2'-O-methyladenosine-3'-phosphorothioate
  modified_base 3: mod_base = OTHER; note = 2'-O-methyluridine-3'-phosphate
  modified_base 4: mod_base = OTHER; note = 2'-O-methylcytidine-3'-phosphate
  modified_base 5: mod_base = OTHER; note = 2'-O-methylcytidine-3'-phosphate
  modified_base 6: mod_base = OTHER; note = 2'-O-methyladenosine-3'-phosphate
  modified_base 7: mod_base = OTHER; note = 2'-fluorocytidine-3'-phosphate
  modified_base 8: mod_base = OTHER; note = 2'-O-methyladenosine-3'-phosphate
  modified_base 9: mod_base = OTHER; note = 2'-fluoroadenosine-3'-phosphate
  modified_base 10: mod_base = OTHER; note = 2'-fluorouridine-3'-phosphate
  modified_base 11: mod_base = OTHER; note = 2'-fluoroguanosine-3'-phosphate
  modified_base 12: mod_base = OTHER; note = 2'-O-methyladenosine-3'-phosphate
  modified_base 13: mod_base = OTHER; note = 2'-O-methylguanosine-3'-phosphate
  modified_base 14: mod_base = OTHER; note = 2'-O-methyladenosine-3'-phosphate
  modified_base 15: mod_base = OTHER; note = 2'-O-methylguanosine-3'-phosphate
  modified_base 16: mod_base = OTHER; note = 2'-O-methyluridine-3'-phosphate
  modified_base 17: mod_base = OTHER; note = 2'-O-methyladenosine-3'-phosphate
  modified_base 18: mod_base = OTHER; note = 2'-O-methylcytidine-3'-phosphate
  modified_base 19: mod_base = OTHER; note = 2'-O-methylcytidine-3'-phosphate
  modified_base 20: mod_base = OTHER; note = 2'-O-methyluridine-3'-phosphate
  modified_base 21: mod_base = OTHER; note = 2'-O-methyluridine-3'-phosphate N-[tris(GalNAc-alkyl)-amidodecanoyl)]-4-hydroxyprolinol (Hyp-(GalNAc-alkyl)3)
catccacaatgagagtacctt

SEQ ID NO: 3123 - RNA, 21 nt, synthetic construct
  source 1..21: mol_type = other RNA
  modified_base 1: mod_base = OTHER; note = 2'-O-methyluridine-3'-phosphorothioate
  modified_base 2: mod_base = OTHER; note = 2'-O-methylcytidine-3'-phosphorothioate
  modified_base 3: mod_base = OTHER; note = 2'-O-methylcytidine-3'-phosphate
  modified_base 4: mod_base = OTHER; note = 2'-O-methyladenosine-3'-phosphate
  modified_base 5: mod_base = OTHER; note = 2'-O-methylcytidine-3'-phosphate
  modified_base 6: mod_base = OTHER; note = 2'-O-methyladenosine-3'-phosphate
  modified_base 7: mod_base = OTHER; note = 2'-fluoroadenosine-3'-phosphate
  modified_base 8: mod_base = OTHER; note = 2'-O-methyluridine-3'-phosphate
  modified_base 9: mod_base = OTHER; note = 2'-fluoroguanosine-3'-phosphate
  modified_base 10: mod_base = OTHER; note = 2'-fluoroadenosine-3'-phosphate
  modified_base 11: mod_base = OTHER; note = 2'-fluoroguanosine-3'-phosphate
  modified_base 12: mod_base = OTHER; note = 2'-O-methyladenosine-3'-phosphate
  modified_base 13: mod_base = OTHER; note = 2'-O-methylguanosine-3'-phosphate
  modified_base 14: mod_base = OTHER; note = 2'-O-methyluridine-3'-phosphate
  modified_base 15: mod_base = OTHER; note = 2'-O-methyladenosine-3'-phosphate
  modified_base 16: mod_base = OTHER; note = 2'-O-methylcytidine-3'-phosphate
  modified_base 17: mod_base = OTHER; note = 2'-O-methylcytidine-3'-phosphate
  modified_base 18: mod_base = OTHER; note = 2'-O-methyluridine-3'-phosphate
  modified_base 19: mod_base = OTHER; note = 2'-O-methylguanosine-3'-phosphate
  modified_base 20: mod_base = OTHER; note = 2'-O-methyluridine-3'-phosphate
  modified_base 21: mod_base = OTHER; note = 2'-O-methyluridine-3'-phosphate N-[tris(GalNAc-alkyl)-amidodecanoyl)]-4-hydroxyprolinol (Hyp-(GalNAc-alkyl)3)
tccacaatgagagtacctgtt

SEQ ID NO: 3124 - RNA, 21 nt, synthetic construct
  source 1..21: mol_type = other RNA
  modified_base 1: mod_base = OTHER; note = 2'-O-methylcytidine-3'-phosphorothioate
  modified_base 2: mod_base = OTHER; note = 2'-O-methylcytidine-3'-phosphorothioate
  modified_base 3: mod_base = OTHER; note = 2'-O-methyladenosine-3'-phosphate
  modified_base 4: mod_base = OTHER; note = 2'-O-methylcytidine-3'-phosphate
  modified_base 5: mod_base = OTHER; note = 2'-O-methyladenosine-3'-phosphate
  modified_base 6: mod_base = OTHER; note = 2'-O-methyladenosine-3'-phosphate
  modified_base 7: mod_base = OTHER; note = 2'-fluorouridine-3'-phosphate
  modified_base 8: mod_base = OTHER; note = 2'-O-methylguanosine-3'-phosphate
  modified_base 9: mod_base = OTHER; note = 2'-fluoroadenosine-3'-phosphate
  modified_base 10: mod_base = OTHER; note = 2'-fluoroguanosine-3'-phosphate
  modified_base 11: mod_base = OTHER; note = 2'-fluoroadenosine-3'-phosphate
  modified_base 12: mod_base = OTHER; note = 2'-O-methylguanosine-3'-phosphate
  modified_base 13: mod_base = OTHER; note = 2'-O-methyluridine-3'-phosphate
  modified_base 14: mod_base = OTHER; note = 2'-O-methyladenosine-3'-phosphate
  modified_base 15: mod_base = OTHER; note = 2'-O-methylcytidine-3'-phosphate
  modified_base 16: mod_base = OTHER; note = 2'-O-methylcytidine-3'-phosphate
  modified_base 17: mod_base = OTHER; note = 2'-O-methyluridine-3'-phosphate
  modified_base 18: mod_base = OTHER; note = 2'-O-methylguanosine-3'-phosphate
  modified_base 19: mod_base = OTHER; note = 2'-O-methyluridine-3'-phosphate
  modified_base 20: mod_base = OTHER; note = 2'-O-methylguanosine-3'-phosphate
  modified_base 21: mod_base = OTHER; note = 2'-O-methyluridine-3'-phosphate N-[tris(GalNAc-alkyl)-amidodecanoyl)]-4-hydroxyprolinol (Hyp-(GalNAc-alkyl)3)
ccacaatgagagtacctgtgt

SEQ ID NO: 3125 - RNA, 21 nt, synthetic construct
  source 1..21: mol_type = other RNA
  modified_base 1: mod_base = OTHER; note = 2'-O-methylcytidine-3'-phosphorothioate
  modified_base 2: mod_base = OTHER; note = 2'-O-methyladenosine-3'-phosphorothioate
  modified_base 3: mod_base = OTHER; note = 2'-O-methylcytidine-3'-phosphate
  modified_base 4: mod_base = OTHER; note = 2'-O-methyladenosine-3'-phosphate
  modified_base 5: mod_base = OTHER; note = 2'-O-methyladenosine-3'-phosphate
  modified_base 6: mod_base = OTHER; note = 2'-O-methyluridine-3'-phosphate
  modified_base 7: mod_base = OTHER; note = 2'-fluoroguanosine-3'-phosphate
  modified_base 8: mod_base = OTHER; note = 2'-O-methyladenosine-3'-phosphate
  modified_base 9: mod_base = OTHER; note = 2'-fluoroguanosine-3'-phosphate
  modified_base 10: mod_base = OTHER; note = 2'-fluoroadenosine-3'-phosphate
  modified_base 11: mod_base = OTHER; note = 2'-fluoroguanosine-3'-phosphate
  modified_base 12: mod_base = OTHER; note = 2'-O-methyluridine-3'-phosphate
  modified_base 13: mod_base = OTHER; note = 2'-O-methyladenosine-3'-phosphate
  modified_base 14: mod_base = OTHER; note = 2'-O-methylcytidine-3'-phosphate
  modified_base 15: mod_base = OTHER; note = 2'-O-methylcytidine-3'-phosphate
  modified_base 16: mod_base = OTHER; note = 2'-O-methyluridine-3'-phosphate
  modified_base 17: mod_base = OTHER; note = 2'-O-methylguanosine-3'-phosphate
  modified_base 18: mod_base = OTHER; note = 2'-O-methyluridine-3'-phosphate
  modified_base 19: mod_base = OTHER; note = 2'-O-methylguanosine-3'-phosphate
  modified_base 20: mod_base = OTHER; note = 2'-O-methyladenosine-3'-phosphate
  modified_base 21: mod_base = OTHER; note = 2'-O-methyluridine-3'-phosphate N-[tris(GalNAc-alkyl)-amidodecanoyl)]-4-hydroxyprolinol (Hyp-(GalNAc-alkyl)3)
cacaatgagagtacctgtgat

SEQ ID NO: 3126 - RNA, 21 nt, synthetic construct
  source 1..21: mol_type = other RNA
  modified_base 1: mod_base = OTHER; note = 2'-O-methylcytidine-3'-phosphorothioate
  modified_base 2: mod_base = OTHER; note = 2'-O-methyladenosine-3'-phosphorothioate
  modified_base 3: mod_base = OTHER; note = 2'-O-methyladenosine-3'-phosphate
  modified_base 4: mod_base = OTHER; note = 2'-O-methyluridine-3'-phosphate
  modified_base 5: mod_base = OTHER; note = 2'-O-methylguanosine-3'-phosphate
  modified_base 6: mod_base = OTHER; note = 2'-O-methyladenosine-3'-phosphate
  modified_base 7: mod_base = OTHER; note = 2'-fluoroguanosine-3'-phosphate
  modified_base 8: mod_base = OTHER; note = 2'-O-methyladenosine-3'-phosphate
  modified_base 9: mod_base = OTHER; note = 2'-fluoroguanosine-3'-phosphate
  modified_base 10: mod_base = OTHER; note = 2'-fluorouridine-3'-phosphate
  modified_base 11: mod_base = OTHER; note = 2'-fluoroadenosine-3'-phosphate
  modified_base 12: mod_base = OTHER; note = 2'-O-methylcytidine-3'-phosphate
  modified_base 13: mod_base = OTHER; note = 2'-O-methylcytidine-3'-phosphate
  modified_base 14: mod_base = OTHER; note = 2'-O-methyluridine-3'-phosphate
  modified_base 15: mod_base = OTHER; note = 2'-O-methylguanosine-3'-phosphate
  modified_base 16: mod_base = OTHER; note = 2'-O-methyluridine-3'-phosphate
  modified_base 17: mod_base = OTHER; note = 2'-O-methylguanosine-3'-phosphate
  modified_base 18: mod_base = OTHER; note = 2'-O-methyladenosine-3'-phosphate
  modified_base 19: mod_base = OTHER; note = 2'-O-methylguanosine-3'-phosphate
  modified_base 20: mod_base = OTHER; note = 2'-O-methylcytidine-3'-phosphate
  modified_base 21: mod_base = OTHER; note = 2'-O-methyluridine-3'-phosphate N-[tris(GalNAc-alkyl)-amidodecanoyl)]-4-hydroxyprolinol (Hyp-(GalNAc-alkyl)3)
caatgagagtacctgtgagct

SEQ ID NO: 3127 - RNA, 21 nt, synthetic construct
  source 1..21: mol_type = other RNA
  modified_base 1: mod_base = OTHER; note = 2'-O-methyladenosine-3'-phosphorothioate
  modified_base 2: mod_base = OTHER; note = 2'-O-methyladenosine-3'-phosphorothioate
  modified_base 3: mod_base = OTHER; note = 2'-O-methyluridine-3'-phosphate
  modified_base 4: mod_base = OTHER; note = 2'-O-methylguanosine-3'-phosphate
  modified_base 5: mod_base = OTHER; note = 2'-O-methyladenosine-3'-phosphate
  modified_base 6: mod_base = OTHER; note = 2'-O-methylguanosine-3'-phosphate
  modified_base 7: mod_base = OTHER; note = 2'-fluoroadenosine-3'-phosphate
  modified_base 8: mod_base = OTHER; note = 2'-O-methylguanosine-3'-phosphate
  modified_base 9: mod_base = OTHER; note = 2'-fluorouridine-3'-phosphate
  modified_base 10: mod_base = OTHER; note = 2'-fluoroadenosine-3'-phosphate
  modified_base 11: mod_base = OTHER; note = 2'-fluorocytidine-3'-phosphate
  modified_base 12: mod_base = OTHER; note = 2'-O-methylcytidine-3'-phosphate
  modified_base 13: mod_base = OTHER; note = 2'-O-methyluridine-3'-phosphate
  modified_base 14: mod_base = OTHER; note = 2'-O-methylguanosine-3'-phosphate
  modified_base 15: mod_base = OTHER; note = 2'-O-methyluridine-3'-phosphate
  modified_base 16: mod_base = OTHER; note = 2'-O-methylguanosine-3'-phosphate
  modified_base 17: mod_base = OTHER; note = 2'-O-methyladenosine-3'-phosphate
  modified_base 18: mod_base = OTHER; note = 2'-O-methylguanosine-3'-phosphate
  modified_base 19: mod_base = OTHER; note = 2'-O-methylcytidine-3'-phosphate
  modified_base 20: mod_base = OTHER; note = 2'-O-methyladenosine-3'-phosphate
  modified_base 21: mod_base = OTHER; note = 2'-O-methyluridine-3'-phosphate N-[tris(GalNAc-alkyl)-amidodecanoyl)]-4-hydroxyprolinol (Hyp-(GalNAc-alkyl)3)
aatgagagtacctgtgagcat

SEQ ID NO: 3128 - RNA, 21 nt, synthetic construct
  source 1..21: mol_type = other RNA
  modified_base 1: mod_base = OTHER; note = 2'-O-methyladenosine-3'-phosphorothioate
  modified_base 2: mod_base = OTHER; note = 2'-O-methyluridine-3'-phosphorothioate
  modified_base 3: mod_base = OTHER; note = 2'-O-methylguanosine-3'-phosphate
  modified_base 4: mod_base = OTHER; note = 2'-O-methyladenosine-3'-phosphate
  modified_base 5: mod_base = OTHER; note = 2'-O-methylguanosine-3'-phosphate
  modified_base 6: mod_base = OTHER; note = 2'-O-methyladenosine-3'-phosphate
  modified_base 7: mod_base = OTHER; note = 2'-fluoroguanosine-3'-phosphate
  modified_base 8: mod_base = OTHER; note = 2'-O-methyluridine-3'-phosphate
  modified_base 9: mod_base = OTHER; note = 2'-fluoroadenosine-3'-phosphate
  modified_base 10: mod_base = OTHER; note = 2'-fluorocytidine-3'-phosphate
  modified_base 11: mod_base = OTHER; note = 2'-fluorocytidine-3'-phosphate
  modified_base 12: mod_base = OTHER; note = 2'-O-methyluridine-3'-phosphate
  modified_base 13: mod_base = OTHER; note = 2'-O-methylguanosine-3'-phosphate
  modified_base 14: mod_base = OTHER; note = 2'-O-methyluridine-3'-phosphate
  modified_base 15: mod_base = OTHER; note = 2'-O-methylguanosine-3'-phosphate
  modified_base 16: mod_base = OTHER; note = 2'-O-methyladenosine-3'-phosphate
  modified_base 17: mod_base = OTHER; note = 2'-O-methylguanosine-3'-phosphate
  modified_base 18: mod_base = OTHER; note = 2'-O-methylcytidine-3'-phosphate
  modified_base 19: mod_base = OTHER; note = 2'-O-methyladenosine-3'-phosphate
  modified_base 20: mod_base = OTHER; note = 2'-O-methylguanosine-3'-phosphate
  modified_base 21: mod_base = OTHER; note = 2'-O-methyluridine-3'-phosphate N-[tris(GalNAc-alkyl)-amidodecanoyl)]-4-hydroxyprolinol (Hyp-(GalNAc-alkyl)3)
atgagagtacctgtgagcagt

SEQ ID NO: 3129 - RNA, 21 nt, synthetic construct
  source 1..21: mol_type = other RNA
  modified_base 1: mod_base = OTHER; note = 2'-O-methyluridine-3'-phosphorothioate
  modified_base 2: mod_base = OTHER; note = 2'-O-methylguanosine-3'-phosphorothioate
  modified_base 3: mod_base = OTHER; note = 2'-O-methyladenosine-3'-phosphate
  modified_base 4: mod_base = OTHER; note = 2'-O-methylguanosine-3'-phosphate
  modified_base 5: mod_base = OTHER; note = 2'-O-methyladenosine-3'-phosphate
  modified_base 6: mod_base = OTHER; note = 2'-O-methylguanosine-3'-phosphate
  modified_base 7: mod_base = OTHER; note = 2'-fluorouridine-3'-phosphate
  modified_base 8: mod_base = OTHER; note = 2'-O-methyladenosine-3'-phosphate
  modified_base 9: mod_base = OTHER; note = 2'-fluorocytidine-3'-phosphate
  modified_base 10: mod_base = OTHER; note = 2'-fluorocytidine-3'-phosphate
  modified_base 11: mod_base = OTHER; note = 2'-fluorouridine-3'-phosphate
  modified_base 12: mod_base = OTHER; note = 2'-O-methylguanosine-3'-phosphate
  modified_base 13: mod_base = OTHER; note = 2'-O-methyluridine-3'-phosphate
  modified_base 14: mod_base = OTHER; note = 2'-O-methylguanosine-3'-phosphate
  modified_base 15: mod_base = OTHER; note = 2'-O-methyladenosine-3'-phosphate
  modified_base 16: mod_base = OTHER; note = 2'-O-methylguanosine-3'-phosphate
  modified_base 17: mod_base = OTHER; note = 2'-O-methylcytidine-3'-phosphate
  modified_base 18: mod_base = OTHER; note = 2'-O-methyladenosine-3'-phosphate
  modified_base 19: mod_base = OTHER; note = 2'-O-methylguanosine-3'-phosphate
  modified_base 20: mod_base = OTHER; note = 2'-O-methylcytidine-3'-phosphate
  modified_base 21: mod_base = OTHER; note = 2'-O-methyluridine-3'-phosphate N-[tris(GalNAc-alkyl)-amidodecanoyl)]-4-hydroxyprolinol (Hyp-(GalNAc-alkyl)3)
tgagagtacctgtgagcagct

SEQ ID NO: 3130 - RNA, 21 nt, synthetic construct
  source 1..21: mol_type = other RNA
  modified_base 1: mod_base = OTHER; note = 2'-O-methylguanosine-3'-phosphorothioate
  modified_base 2: mod_base = OTHER; note = 2'-O-methyladenosine-3'-phosphorothioate
  modified_base 3: mod_base = OTHER; note = 2'-O-methylguanosine-3'-phosphate
  modified_base 4: mod_base = OTHER; note = 2'-O-methyladenosine-3'-phosphate
  modified_base 5: mod_base = OTHER; note = 2'-O-methylguanosine-3'-phosphate
  modified_base 6: mod_base = OTHER; note = 2'-O-methyluridine-3'-phosphate
  modified_base 7: mod_base = OTHER; note = 2'-fluoroadenosine-3'-phosphate
  modified_base 8: mod_base = OTHER; note = 2'-O-methylcytidine-3'-phosphate
  modified_base 9: mod_base = OTHER; note = 2'-fluorocytidine-3'-phosphate
  modified_base 10: mod_base = OTHER; note = 2'-fluorouridine-3'-phosphate
  modified_base 11: mod_base = OTHER; note = 2'-fluoroguanosine-3'-phosphate
  modified_base 12: mod_base = OTHER; note = 2'-O-methyluridine-3'-phosphate
  modified_base 13: mod_base = OTHER; note = 2'-O-methylguanosine-3'-phosphate
  modified_base 14: mod_base = OTHER; note = 2'-O-methyladenosine-3'-phosphate
  modified_base 15: mod_base = OTHER; note = 2'-O-methylguanosine-3'-phosphate
  modified_base 16: mod_base = OTHER; note = 2'-O-methylcytidine-3'-phosphate
  modified_base 17: mod_base = OTHER; note = 2'-O-methyladenosine-3'-phosphate
  modified_base 18: mod_base = OTHER; note = 2'-O-methylguanosine-3'-phosphate
  modified_base 19: mod_base = OTHER; note = 2'-O-methylcytidine-3'-phosphate
  modified_base 20: mod_base = OTHER; note = 2'-O-methyluridine-3'-phosphate
  modified_base 21: mod_base = OTHER; note = 2'-O-methyluridine-3'-phosphate N-[tris(GalNAc-alkyl)-amidodecanoyl)]-4-hydroxyprolinol (Hyp-(GalNAc-alkyl)3)
gagagtacctgtgagcagctt

SEQ ID NO: 3131 - RNA, 21 nt, synthetic construct
  source 1..21: mol_type = other RNA
  modified_base 1: mod_base = OTHER; note = 2'-O-methyladenosine-3'-phosphorothioate
  modified_base 2: mod_base = OTHER; note = 2'-O-methylguanosine-3'-phosphorothioate
  modified_base 3: mod_base = OTHER; note = 2'-O-methyladenosine-3'-phosphate
  modified_base 4: mod_base = OTHER; note = 2'-O-methylguanosine-3'-phosphate
  modified_base 5: mod_base = OTHER; note = 2'-O-methyluridine-3'-phosphate
  modified_base 6: mod_base = OTHER; note = 2'-O-methyladenosine-3'-phosphate
  modified_base 7: mod_base = OTHER; note = 2'-fluorocytidine-3'-phosphate
  modified_base 8: mod_base = OTHER; note = 2'-O-methylcytidine-3'-phosphate
  modified_base 9: mod_base = OTHER; note = 2'-fluorouridine-3'-phosphate
  modified_base 10: mod_base = OTHER; note = 2'-fluoroguanosine-3'-phosphate
  modified_base 11: mod_base = OTHER; note = 2'-fluorouridine-3'-phosphate
  modified_base 12: mod_base = OTHER; note = 2'-O-methylguanosine-3'-phosphate
  modified_base 13: mod_base = OTHER; note = 2'-O-methyladenosine-3'-phosphate
  modified_base 14: mod_base = OTHER; note = 2'-O-methylguanosine-3'-phosphate
  modified_base 15: mod_base = OTHER; note = 2'-O-methylcytidine-3'-phosphate
  modified_base 16: mod_base = OTHER; note = 2'-O-methyladenosine-3'-phosphate
  modified_base 17: mod_base = OTHER; note = 2'-O-methylguanosine-3'-phosphate
  modified_base 18: mod_base = OTHER; note = 2'-O-methylcytidine-3'-phosphate
  modified_base 19: mod_base = OTHER; note = 2'-O-methyluridine-3'-phosphate
  modified_base 20: mod_base = OTHER; note = 2'-O-methylguanosine-3'-phosphate
  modified_base 21: mod_base = OTHER; note = 2'-O-methyluridine-3'-phosphate N-[tris(GalNAc-alkyl)-amidodecanoyl)]-4-hydroxyprolinol (Hyp-(GalNAc-alkyl)3)
agagtacctgtgagcagctgt

SEQ ID NO: 3132 - RNA, 21 nt, synthetic construct
  source 1..21: mol_type = other RNA
  modified_base 1: mod_base = OTHER; note = 2'-O-methylguanosine-3'-phosphorothioate
  modified_base 2: mod_base = OTHER; note = 2'-O-methyladenosine-3'-phosphorothioate
  modified_base 3: mod_base = OTHER; note = 2'-O-methylguanosine-3'-phosphate
  modified_base 4: mod_base = OTHER; note = 2'-O-methyluridine-3'-phosphate
  modified_base 5: mod_base = OTHER; note = 2'-O-methyladenosine-3'-phosphate
  modified_base 6: mod_base = OTHER; note = 2'-O-methylcytidine-3'-phosphate
  modified_base 7: mod_base = OTHER; note = 2'-fluorocytidine-3'-phosphate
  modified_base 8: mod_base = OTHER; note = 2'-O-methyluridine-3'-phosphate
  modified_base 9: mod_base = OTHER; note = 2'-fluoroguanosine-3'-phosphate
  modified_base 10: mod_base = OTHER; note = 2'-fluorouridine-3'-phosphate
  modified_base 11: mod_base = OTHER; note = 2'-fluoroguanosine-3'-phosphate
  modified_base 12: mod_base = OTHER; note = 2'-O-methyladenosine-3'-phosphate
  modified_base 13: mod_base = OTHER; note = 2'-O-methylguanosine-3'-phosphate
  modified_base 14: mod_base = OTHER; note = 2'-O-methylcytidine-3'-phosphate
  modified_base 15: mod_base = OTHER; note = 2'-O-methyladenosine-3'-phosphate
  modified_base 16: mod_base = OTHER; note = 2'-O-methylguanosine-3'-phosphate
  modified_base 17: mod_base = OTHER; note = 2'-O-methylcytidine-3'-phosphate
  modified_base 18: mod_base = OTHER; note = 2'-O-methyluridine-3'-phosphate
  modified_base 19: mod_base = OTHER; note = 2'-O-methylguanosine-3'-phosphate
  modified_base 20: mod_base = OTHER; note = 2'-O-methylguanosine-3'-phosphate
  modified_base 21: mod_base = OTHER; note = 2'-O-methyluridine-3'-phosphate N-[tris(GalNAc-alkyl)-amidodecanoyl)]-4-hydroxyprolinol (Hyp-(GalNAc-alkyl)3)
gagtacctgtgagcagctggt

SEQ ID NO: 3133 - RNA, 21 nt, synthetic construct
  source 1..21: mol_type = other RNA
  modified_base 1: mod_base = OTHER; note = 2'-O-methyladenosine-3'-phosphorothioate
  modified_base 2: mod_base = OTHER; note = 2'-O-methylguanosine-3'-phosphorothioate
  modified_base 3: mod_base = OTHER; note = 2'-O-methyluridine-3'-phosphate
  modified_base 4: mod_base = OTHER; note = 2'-O-methyladenosine-3'-phosphate
  modified_base 5: mod_base = OTHER; note = 2'-O-methylcytidine-3'-phosphate
  modified_base 6: mod_base = OTHER; note = 2'-O-methylcytidine-3'-phosphate
  modified_base 7: mod_base = OTHER; note = 2'-fluorouridine-3'-phosphate
  modified_base 8: mod_base = OTHER; note = 2'-O-methylguanosine-3'-phosphate
  modified_base 9: mod_base = OTHER; note = 2'-fluorouridine-3'-phosphate
  modified_base 10: mod_base = OTHER; note = 2'-fluoroguanosine-3'-phosphate
  modified_base 11: mod_base = OTHER; note = 2'-fluoroadenosine-3'-phosphate
  modified_base 12: mod_base = OTHER; note = 2'-O-methylguanosine-3'-phosphate
  modified_base 13: mod_base = OTHER; note = 2'-O-methylcytidine-3'-phosphate
  modified_base 14: mod_base = OTHER; note = 2'-O-methyladenosine-3'-phosphate
  modified_base 15: mod_base = OTHER; note = 2'-O-methylguanosine-3'-phosphate
  modified_base 16: mod_base = OTHER; note = 2'-O-methylcytidine-3'-phosphate
  modified_base 17: mod_base = OTHER; note = 2'-O-methyluridine-3'-phosphate
  modified_base 18: mod_base = OTHER; note = 2'-O-methylguanosine-3'-phosphate
  modified_base 19: mod_base = OTHER; note = 2'-O-methylguanosine-3'-phosphate
  modified_base 20: mod_base = OTHER; note = 2'-O-methylcytidine-3'-phosphate
  modified_base 21: mod_base = OTHER; note = 2'-O-methyluridine-3'-phosphate N-[tris(GalNAc-alkyl)-amidodecanoyl)]-4-hydroxyprolinol (Hyp-(GalNAc-alkyl)3)
agtacctgtgagcagctggct

SEQ ID NO: 3134 - RNA, 21 nt, synthetic construct
  source 1..21: mol_type = other RNA
  modified_base 1: mod_base = OTHER; note = 2'-O-methylguanosine-3'-phosphorothioate
  modified_base 2: mod_base = OTHER; note = 2'-O-methyluridine-3'-phosphorothioate
  modified_base 3: mod_base = OTHER; note = 2'-O-methyladenosine-3'-phosphate
  modified_base 4: mod_base = OTHER; note = 2'-O-methylcytidine-3'-phosphate
  modified_base 5: mod_base = OTHER; note = 2'-O-methylcytidine-3'-phosphate
  modified_base 6: mod_base = OTHER; note = 2'-O-methyluridine-3'-phosphate
  modified_base 7: mod_base = OTHER; note = 2'-fluoroguanosine-3'-phosphate
  modified_base 8: mod_base = OTHER; note = 2'-O-methyluridine-3'-phosphate
  modified_base 9: mod_base = OTHER; note = 2'-fluoroguanosine-3'-phosphate
  modified_base 10: mod_base = OTHER; note = 2'-fluoroadenosine-3'-phosphate
  modified_base 11: mod_base = OTHER; note = 2'-fluoroguanosine-3'-phosphate
  modified_base 12: mod_base = OTHER; note = 2'-O-methylcytidine-3'-phosphate
  modified_base 13: mod_base = OTHER; note = 2'-O-methyladenosine-3'-phosphate
  modified_base 14: mod_base = OTHER; note = 2'-O-methylguanosine-3'-phosphate
  modified_base 15: mod_base = OTHER; note = 2'-O-methylcytidine-3'-phosphate
  modified_base 16: mod_base = OTHER; note = 2'-O-methyluridine-3'-phosphate
  modified_base 17: mod_base = OTHER; note = 2'-O-methylguanosine-3'-phosphate
  modified_base 18: mod_base = OTHER; note = 2'-O-methylguanosine-3'-phosphate
  modified_base 19: mod_base = OTHER; note = 2'-O-methylcytidine-3'-phosphate
  modified_base 20: mod_base = OTHER; note = 2'-O-methyladenosine-3'-phosphate
  modified_base 21: mod_base = OTHER; note = 2'-O-methyluridine-3'-phosphate N-[tris(GalNAc-alkyl)-amidodecanoyl)]-4-hydroxyprolinol (Hyp-(GalNAc-alkyl)3)
gtacctgtgagcagctggcat

SEQ ID NO: 3135 - RNA, 21 nt, synthetic construct
  source 1..21: mol_type = other RNA
  modified_base 1: mod_base = OTHER; note = 2'-O-methyluridine-3'-phosphorothioate
  modified_base 2: mod_base = OTHER; note = 2'-O-methyladenosine-3'-phosphorothioate
  modified_base 3: mod_base = OTHER; note = 2'-O-methylcytidine-3'-phosphate
  modified_base 4: mod_base = OTHER; note = 2'-O-methylcytidine-3'-phosphate
  modified_base 5: mod_base = OTHER; note = 2'-O-methyluridine-3'-phosphate
  modified_base 6: mod_base = OTHER; note = 2'-O-methylguanosine-3'-phosphate
  modified_base 7: mod_base = OTHER; note = 2'-fluorouridine-3'-phosphate
  modified_base 8: mod_base = OTHER; note = 2'-O-methylguanosine-3'-phosphate
  modified_base 9: mod_base = OTHER; note = 2'-fluoroadenosine-3'-phosphate
  modified_base 10: mod_base = OTHER; note = 2'-fluoroguanosine-3'-phosphate
  modified_base 11: mod_base = OTHER; note = 2'-fluorocytidine-3'-phosphate
  modified_base 12: mod_base = OTHER; note = 2'-O-methyladenosine-3'-phosphate
  modified_base 13: mod_base = OTHER; note = 2'-O-methylguanosine-3'-phosphate
  modified_base 14: mod_base = OTHER; note = 2'-O-methylcytidine-3'-phosphate
  modified_base 15: mod_base = OTHER; note = 2'-O-methyluridine-3'-phosphate
  modified_base 16: mod_base = OTHER; note = 2'-O-methylguanosine-3'-phosphate
  modified_base 17: mod_base = OTHER; note = 2'-O-methylguanosine-3'-phosphate
  modified_base 18: mod_base = OTHER; note = 2'-O-methylcytidine-3'-phosphate
  modified_base 19: mod_base = OTHER; note = 2'-O-methyladenosine-3'-phosphate
  modified_base 20: mod_base = OTHER; note = 2'-O-methyladenosine-3'-phosphate
  modified_base 21: mod_base = OTHER; note = 2'-O-methyluridine-3'-phosphate N-[tris(GalNAc-alkyl)-amidodecanoyl)]-4-hydroxyprolinol (Hyp-(GalNAc-alkyl)3)
tacctgtgagcagctggcaat

SEQ ID NO: 3136 - RNA, 21 nt, synthetic construct
  source 1..21: mol_type = other RNA
  modified_base 1: mod_base = OTHER; note = 2'-O-methyladenosine-3'-phosphorothioate
  modified_base 2: mod_base = OTHER; note = 2'-O-methyladenosine-3'-phosphorothioate
  modified_base 3: mod_base = OTHER; note = 2'-O-methyluridine-3'-phosphate
  modified_base 4: mod_base = OTHER; note = 2'-O-methylguanosine-3'-phosphate
  modified_base 5: mod_base = OTHER; note = 2'-O-methylguanosine-3'-phosphate
  modified_base 6: mod_base = OTHER; note = 2'-O-methyluridine-3'-phosphate
  modified_base 7: mod_base = OTHER; note = 2'-fluorocytidine-3'-phosphate
  modified_base 8: mod_base = OTHER; note = 2'-O-methylguanosine-3'-phosphate
  modified_base 9: mod_base = OTHER; note = 2'-fluoroguanosine-3'-phosphate
  modified_base 10: mod_base = OTHER; note = 2'-fluoroguanosine-3'-phosphate
  modified_base 11: mod_base = OTHER; note = 2'-fluoroadenosine-3'-phosphate
  modified_base 12: mod_base = OTHER; note = 2'-O-methyluridine-3'-phosphate
  modified_base 13: mod_base = OTHER; note = 2'-O-methylguanosine-3'-phosphate
  modified_base 14: mod_base = OTHER; note = 2'-O-methylcytidine-3'-phosphate
  modified_base 15: mod_base = OTHER; note = 2'-O-methyluridine-3'-phosphate
  modified_base 16: mod_base = OTHER; note = 2'-O-methylguanosine-3'-phosphate
  modified_base 17: mod_base = OTHER; note = 2'-O-methylguanosine-3'-phosphate
  modified_base 18: mod_base = OTHER; note = 2'-O-methylcytidine-3'-phosphate
  modified_base 19: mod_base = OTHER; note = 2'-O-methylcytidine-3'-phosphate
  modified_base 20: mod_base = OTHER; note = 2'-O-methyladenosine-3'-phosphate
  modified_base 21: mod_base = OTHER; note = 2'-O-methyluridine-3'-phosphate N-[tris(GalNAc-alkyl)-amidodecanoyl)]-4-hydroxyprolinol (Hyp-(GalNAc-alkyl)3)
aatggtcgggatgctggccat

SEQ ID NO: 3137 - RNA, 21 nt, synthetic construct
  source 1..21: mol_type = other RNA
  modified_base 1: mod_base = OTHER; note = 2'-O-methyladenosine-3'-phosphorothioate
  modified_base 2: mod_base = OTHER; note = 2'-O-methyluridine-3'-phosphorothioate
  modified_base 3: mod_base = OTHER; note = 2'-O-methylguanosine-3'-phosphate
  modified_base 4: mod_base = OTHER; note = 2'-O-methylguanosine-3'-phosphate
  modified_base 5: mod_base = OTHER; note = 2'-O-methyluridine-3'-phosphate
  modified_base 6: mod_base = OTHER; note = 2'-O-methylcytidine-3'-phosphate
  modified_base 7: mod_base = OTHER; note = 2'-fluoroguanosine-3'-phosphate
  modified_base 8: mod_base = OTHER; note = 2'-O-methylguanosine-3'-phosphate
  modified_base 9: mod_base = OTHER; note = 2'-fluoroguanosine-3'-phosphate
  modified_base 10: mod_base = OTHER; note = 2'-fluoroadenosine-3'-phosphate
  modified_base 11: mod_base = OTHER; note = 2'-fluorouridine-3'-phosphate
  modified_base 12: mod_base = OTHER; note = 2'-O-methylguanosine-3'-phosphate
  modified_base 13: mod_base = OTHER; note = 2'-O-methylcytidine-3'-phosphate
  modified_base 14: mod_base = OTHER; note = 2'-O-methyluridine-3'-phosphate
  modified_base 15: mod_base = OTHER; note = 2'-O-methylguanosine-3'-phosphate
  modified_base 16: mod_base = OTHER; note = 2'-O-methylguanosine-3'-phosphate
  modified_base 17: mod_base = OTHER; note = 2'-O-methylcytidine-3'-phosphate
  modified_base 18: mod_base = OTHER; note = 2'-O-methylcytidine-3'-phosphate
  modified_base 19: mod_base = OTHER; note = 2'-O-methyladenosine-3'-phosphate
  modified_base 20: mod_base = OTHER; note = 2'-O-methyladenosine-3'-phosphate
  modified_base 21: mod_base = OTHER; note = 2'-O-methyluridine-3'-phosphate N-[tris(GalNAc-alkyl)-amidodecanoyl)]-4-hydroxyprolinol (Hyp-(GalNAc-alkyl)3)
atggtcgggatgctggccaat

SEQ ID NO: 3138 - RNA, 21 nt, synthetic construct
  source 1..21: mol_type = other RNA
  modified_base 1: mod_base = OTHER; note = 2'-O-methyluridine-3'-phosphorothioate
  modified_base 2: mod_base = OTHER; note = 2'-O-methylguanosine-3'-phosphorothioate
  modified_base 3: mod_base = OTHER; note = 2'-O-methylguanosine-3'-phosphate
  modified_base 4: mod_base = OTHER; note = 2'-O-methyluridine-3'-phosphate
  modified_base 5: mod_base = OTHER; note = 2'-O-methylcytidine-3'-phosphate
  modified_base 6: mod_base = OTHER; note = 2'-O-methylguanosine-3'-phosphate
  modified_base 7: mod_base = OTHER; note = 2'-fluoroguanosine-3'-phosphate
  modified_base 8: mod_base = OTHER; note = 2'-O-methylguanosine-3'-phosphate
  modified_base 9: mod_base = OTHER; note = 2'-fluoroadenosine-3'-phosphate
  modified_base 10: mod_base = OTHER; note = 2'-fluorouridine-3'-phosphate
  modified_base 11: mod_base = OTHER; note = 2'-fluoroguanosine-3'-phosphate
  modified_base 12: mod_base = OTHER; note = 2'-O-methylcytidine-3'-phosphate
  modified_base 13: mod_base = OTHER; note = 2'-O-methyluridine-3'-phosphate
  modified_base 14: mod_base = OTHER; note = 2'-O-methylguanosine-3'-phosphate
  modified_base 15: mod_base = OTHER; note = 2'-O-methylguanosine-3'-phosphate
  modified_base 16: mod_base = OTHER; note = 2'-O-methylcytidine-3'-phosphate
  modified_base 17: mod_base = OTHER; note = 2'-O-methylcytidine-3'-phosphate
  modified_base 18: mod_base = OTHER; note = 2'-O-methyladenosine-3'-phosphate
  modified_base 19: mod_base = OTHER; note = 2'-O-methyladenosine-3'-phosphate
  modified_base 20: mod_base = OTHER; note = 2'-O-methylcytidine-3'-phosphate
  modified_base 21: mod_base = OTHER; note = 2'-O-methyluridine-3'-phosphate N-[tris(GalNAc-alkyl)-amidodecanoyl)]-4-hydroxyprolinol (Hyp-(GalNAc-alkyl)3)
tggtcgggatgctggccaact

SEQ ID NO: 3139 - RNA, 21 nt, synthetic construct
  source 1..21: mol_type = other RNA
  modified_base 1: mod_base = OTHER; note = 2'-O-methylguanosine-3'-phosphorothioate
  modified_base 2: mod_base = OTHER; note = 2'-O-methylguanosine-3'-phosphorothioate
  modified_base 3: mod_base = OTHER; note = 2'-O-methyluridine-3'-phosphate
  modified_base 4: mod_base = OTHER; note = 2'-O-methylcytidine-3'-phosphate
  modified_base 5: mod_base = OTHER; note = 2'-O-methylguanosine-3'-phosphate
  modified_base 6: mod_base = OTHER; note = 2'-O-methylguanosine-3'-phosphate
  modified_base 7: mod_base = OTHER; note = 2'-fluoroguanosine-3'-phosphate
  modified_base 8: mod_base = OTHER; note = 2'-O-methyladenosine-3'-phosphate
  modified_base 9: mod_base = OTHER; note = 2'-fluorouridine-3'-phosphate
  modified_base 10: mod_base = OTHER; note = 2'-fluoroguanosine-3'-phosphate
  modified_base 11: mod_base = OTHER; note = 2'-fluorocytidine-3'-phosphate
  modified_base 12: mod_base = OTHER; note = 2'-O-methyluridine-3'-phosphate
  modified_base 13: mod_base = OTHER; note = 2'-O-methylguanosine-3'-phosphate
  modified_base 14: mod_base = OTHER; note = 2'-O-methylguanosine-3'-phosphate
  modified_base 15: mod_base = OTHER; note = 2'-O-methylcytidine-3'-phosphate
  modified_base 16: mod_base = OTHER; note = 2'-O-methylcytidine-3'-phosphate
  modified_base 17: mod_base = OTHER; note = 2'-O-methyladenosine-3'-phosphate
  modified_base 18: mod_base = OTHER; note = 2'-O-methyladenosine-3'-phosphate
  modified_base 19: mod_base = OTHER; note = 2'-O-methylcytidine-3'-phosphate
  modified_base 20: mod_base = OTHER; note = 2'-O-methyluridine-3'-phosphate
  modified_base 21: mod_base = OTHER; note = 2'-O-methyluridine-3'-phosphate N-[tris(GalNAc-alkyl)-amidodecanoyl)]-4-hydroxyprolinol (Hyp-(GalNAc-alkyl)3)
ggtcgggatgctggccaactt

SEQ ID NO: 3140 - RNA, 21 nt, synthetic construct
  source 1..21: mol_type = other RNA
  modified_base 1: mod_base = OTHER; note = 2'-O-methylguanosine-3'-phosphorothioate
  modified_base 2: mod_base = OTHER; note = 2'-O-methyluridine-3'-phosphorothioate
  modified_base 3: mod_base = OTHER; note = 2'-O-methylcytidine-3'-phosphate
  modified_base 4: mod_base = OTHER; note = 2'-O-methylguanosine-3'-phosphate
  modified_base 5: mod_base = OTHER; note = 2'-O-methylguanosine-3'-phosphate
  modified_base 6: mod_base = OTHER; note = 2'-O-methylguanosine-3'-phosphate
  modified_base 7: mod_base = OTHER; note = 2'-fluoroadenosine-3'-phosphate
  modified_base 8: mod_base = OTHER; note = 2'-O-methyluridine-3'-phosphate
  modified_base 9: mod_base = OTHER; note = 2'-fluoroguanosine-3'-phosphate
  modified_base 10: mod_base = OTHER; note = 2'-fluorocytidine-3'-phosphate
  modified_base 11: mod_base = OTHER; note = 2'-fluorouridine-3'-phosphate
  modified_base 12: mod_base = OTHER; note = 2'-O-methylguanosine-3'-phosphate
  modified_base 13: mod_base = OTHER; note = 2'-O-methylguanosine-3'-phosphate
  modified_base 14: mod_base = OTHER; note = 2'-O-methylcytidine-3'-phosphate
  modified_base 15: mod_base = OTHER; note = 2'-O-methylcytidine-3'-phosphate
  modified_base 16: mod_base = OTHER; note = 2'-O-methyladenosine-3'-phosphate
  modified_base 17: mod_base = OTHER; note = 2'-O-methyladenosine-3'-phosphate
  modified_base 18: mod_base = OTHER; note = 2'-O-methylcytidine-3'-phosphate
  modified_base 19: mod_base = OTHER; note = 2'-O-methyluridine-3'-phosphate
  modified_base 20: mod_base = OTHER; note = 2'-O-methyluridine-3'-phosphate
  modified_base 21: mod_base = OTHER; note = 2'-O-methyluridine-3'-phosphate N-[tris(GalNAc-alkyl)-amidodecanoyl)]-4-hydroxyprolinol (Hyp-(GalNAc-alkyl)3)
gtcgggatgctggccaacttt

SEQ ID NO: 3141 - RNA, 21 nt, synthetic construct
  source 1..21: mol_type = other RNA
  modified_base 1: mod_base = OTHER; note = 2'-O-methyluridine-3'-phosphorothioate
  modified_base 2: mod_base = OTHER; note = 2'-O-methylcytidine-3'-phosphorothioate
  modified_base 3: mod_base = OTHER; note = 2'-O-methylguanosine-3'-phosphate
  modified_base 4: mod_base = OTHER; note = 2'-O-methylguanosine-3'-phosphate
  modified_base 5: mod_base = OTHER; note = 2'-O-methylguanosine-3'-phosphate
  modified_base 6: mod_base = OTHER; note = 2'-O-methyladenosine-3'-phosphate
  modified_base 7: mod_base = OTHER; note = 2'-fluorouridine-3'-phosphate
  modified_base 8: mod_base = OTHER; note = 2'-O-methylguanosine-3'-phosphate
  modified_base 9: mod_base = OTHER; note = 2'-fluorocytidine-3'-phosphate
  modified_base 10: mod_base = OTHER; note = 2'-fluorouridine-3'-phosphate
  modified_base 11: mod_base = OTHER; note = 2'-fluoroguanosine-3'-phosphate
  modified_base 12: mod_base = OTHER; note = 2'-O-methylguanosine-3'-phosphate
  modified_base 13: mod_base = OTHER; note = 2'-O-methylcytidine-3'-phosphate
  modified_base 14: mod_base = OTHER; note = 2'-O-methylcytidine-3'-phosphate
  modified_base 15: mod_base = OTHER; note = 2'-O-methyladenosine-3'-phosphate
  modified_base 16: mod_base = OTHER; note = 2'-O-methyladenosine-3'-phosphate
  modified_base 17: mod_base = OTHER; note = 2'-O-methylcytidine-3'-phosphate
  modified_base 18: mod_base = OTHER; note = 2'-O-methyluridine-3'-phosphate
  modified_base 19: mod_base = OTHER; note = 2'-O-methyluridine-3'-phosphate
  modified_base 20: mod_base = OTHER; note = 2'-O-methylcytidine-3'-phosphate
  modified_base 21: mod_base = OTHER; note = 2'-O-methyluridine-3'-phosphate N-[tris(GalNAc-alkyl)-amidodecanoyl)]-4-hydroxyprolinol (Hyp-(GalNAc-alkyl)3)
tcgggatgctggccaacttct

SEQ ID NO: 3142 - RNA, 21 nt, synthetic construct
  source 1..21: mol_type = other RNA
  modified_base 1: mod_base = OTHER; note = 2'-O-methylcytidine-3'-phosphorothioate
  modified_base 2: mod_base = OTHER; note = 2'-O-methylguanosine-3'-phosphorothioate
  modified_base 3: mod_base = OTHER; note = 2'-O-methylguanosine-3'-phosphate
  modified_base 4: mod_base = OTHER; note = 2'-O-methylguanosine-3'-phosphate
  modified_base 5: mod_base = OTHER; note = 2'-O-methyladenosine-3'-phosphate
  modified_base 6: mod_base = OTHER; note = 2'-O-methyluridine-3'-phosphate
  modified_base 7: mod_base = OTHER; note = 2'-fluoroguanosine-3'-phosphate
  modified_base 8: mod_base = OTHER; note = 2'-O-methylcytidine-3'-phosphate
  modified_base 9: mod_base = OTHER; note = 2'-fluorouridine-3'-phosphate
  modified_base 10: mod_base = OTHER; note = 2'-fluoroguanosine-3'-phosphate
  modified_base 11: mod_base = OTHER; note = 2'-fluoroguanosine-3'-phosphate
  modified_base 12: mod_base = OTHER; note = 2'-O-methylcytidine-3'-phosphate
  modified_base 13: mod_base = OTHER; note = 2'-O-methylcytidine-3'-phosphate
  modified_base 14: mod_base = OTHER; note = 2'-O-methyladenosine-3'-phosphate
  modified_base 15: mod_base = OTHER; note = 2'-O-methyladenosine-3'-phosphate
  modified_base 16: mod_base = OTHER; note = 2'-O-methylcytidine-3'-phosphate
  modified_base 17: mod_base = OTHER; note = 2'-O-methyluridine-3'-phosphate
  modified_base 18: mod_base = OTHER; note = 2'-O-methyluridine-3'-phosphate
  modified_base 19: mod_base = OTHER; note = 2'-O-methylcytidine-3'-phosphate
  modified_base 20: mod_base = OTHER; note = 2'-O-methyluridine-3'-phosphate
  modified_base 21: mod_base = OTHER; note = 2'-O-methyluridine-3'-phosphate N-[tris(GalNAc-alkyl)-amidodecanoyl)]-4-hydroxyprolinol (Hyp-(GalNAc-alkyl)3)
cgggatgctggccaacttctt

SEQ ID NO: 3143 - RNA, 21 nt, synthetic construct
  source 1..21: mol_type = other RNA
  modified_base 1: mod_base = OTHER; note = 2'-O-methylguanosine-3'-phosphorothioate
  modified_base 2: mod_base = OTHER; note = 2'-O-methylguanosine-3'-phosphorothioate
  modified_base 3: mod_base = OTHER; note = 2'-O-methyladenosine-3'-phosphate
  modified_base 4: mod_base = OTHER; note = 2'-O-methyluridine-3'-phosphate
  modified_base 5: mod_base = OTHER; note = 2'-O-methylguanosine-3'-phosphate
  modified_base 6: mod_base = OTHER; note = 2'-O-methylcytidine-3'-phosphate
  modified_base 7: mod_base = OTHER; note = 2'-fluorouridine-3'-phosphate
  modified_base 8: mod_base = OTHER; note = 2'-O-methylguanosine-3'-phosphate
  modified_base 9: mod_base = OTHER; note = 2'-fluoroguanosine-3'-phosphate
  modified_base 10: mod_base = OTHER; note = 2'-fluorocytidine-3'-phosphate
  modified_base 11: mod_base = OTHER; note = 2'-fluorocytidine-3'-phosphate
  modified_base 12: mod_base = OTHER; note = 2'-O-methyladenosine-3'-phosphate
  modified_base 13: mod_base = OTHER; note = 2'-O-methyladenosine-3'-phosphate
  modified_base 14: mod_base = OTHER; note = 2'-O-methylcytidine-3'-phosphate
  modified_base 15: mod_base = OTHER; note = 2'-O-methyluridine-3'-phosphate
  modified_base 16: mod_base = OTHER; note = 2'-O-methyluridine-3'-phosphate
  modified_base 17: mod_base = OTHER; note = 2'-O-methylcytidine-3'-phosphate
  modified_base 18: mod_base = OTHER; note = 2'-O-methyluridine-3'-phosphate
  modified_base 19: mod_base = OTHER; note = 2'-O-methyluridine-3'-phosphate
  modified_base 20: mod_base = OTHER; note = 2'-O-methylguanosine-3'-phosphate
  modified_base 21: mod_base = OTHER; note = 2'-O-methyluridine-3'-phosphate N-[tris(GalNAc-alkyl)-amidodecanoyl)]-4-hydroxyprolinol (Hyp-(GalNAc-alkyl)3)
ggatgctggccaacttcttgt

SEQ ID NO: 3144 - RNA, 21 nt, synthetic construct
  source 1..21: mol_type = other RNA
  modified_base 1: mod_base = OTHER; note = 2'-O-methylguanosine-3'-phosphorothioate
  modified_base 2: mod_base = OTHER; note = 2'-O-methyladenosine-3'-phosphorothioate
  modified_base 3: mod_base = OTHER; note = 2'-O-methyluridine-3'-phosphate
  modified_base 4: mod_base = OTHER; note = 2'-O-methylguanosine-3'-phosphate
  modified_base 5: mod_base = OTHER; note = 2'-O-methylcytidine-3'-phosphate
  modified_base 6: mod_base = OTHER; note = 2'-O-methyluridine-3'-phosphate
  modified_base 7: mod_base = OTHER; note = 2'-fluoroguanosine-3'-phosphate
  modified_base 8: mod_base = OTHER; note = 2'-O-methylguanosine-3'-phosphate
  modified_base 9: mod_base = OTHER; note = 2'-fluorocytidine-3'-phosphate
  modified_base 10: mod_base = OTHER; note = 2'-fluorocytidine-3'-phosphate
  modified_base 11: mod_base = OTHER; note = 2'-fluoroadenosine-3'-phosphate
  modified_base 12: mod_base = OTHER; note = 2'-O-methyladenosine-3'-phosphate
  modified_base 13: mod_base = OTHER; note = 2'-O-methylcytidine-3'-phosphate
  modified_base 14: mod_base = OTHER; note = 2'-O-methyluridine-3'-phosphate
  modified_base 15: mod_base = OTHER; note = 2'-O-methyluridine-3'-phosphate
  modified_base 16: mod_base = OTHER; note = 2'-O-methylcytidine-3'-phosphate
  modified_base 17: mod_base = OTHER; note = 2'-O-methyluridine-3'-phosphate
  modified_base 18: mod_base = OTHER; note = 2'-O-methyluridine-3'-phosphate
  modified_base 19: mod_base = OTHER; note = 2'-O-methylguanosine-3'-phosphate
  modified_base 20: mod_base = OTHER; note = 2'-O-methylguanosine-3'-phosphate
  modified_base 21: mod_base = OTHER; note = 2'-O-methyluridine-3'-phosphate N-[tris(GalNAc-alkyl)-amidodecanoyl)]-4-hydroxyprolinol (Hyp-(GalNAc-alkyl)3)
gatgctggccaacttcttggt

SEQ ID NO: 3145 - RNA, 21 nt, synthetic construct
  source 1..21: mol_type = other RNA
  modified_base 1: mod_base = OTHER; note = 2'-O-methylcytidine-3'-phosphorothioate
  modified_base 2: mod_base = OTHER; note = 2'-O-methyluridine-3'-phosphorothioate
  modified_base 3: mod_base = OTHER; note = 2'-O-methylguanosine-3'-phosphate
  modified_base 4: mod_base = OTHER; note = 2'-O-methylguanosine-3'-phosphate
  modified_base 5: mod_base = OTHER; note = 2'-O-methylcytidine-3'-phosphate
  modified_base 6: mod_base = OTHER; note = 2'-O-methylcytidine-3'-phosphate
  modified_base 7: mod_base = OTHER; note = 2'-fluoroadenosine-3'-phosphate
  modified_base 8: mod_base = OTHER; note = 2'-O-methyladenosine-3'-phosphate
  modified_base 9: mod_base = OTHER; note = 2'-fluorocytidine-3'-phosphate
  modified_base 10: mod_base = OTHER; note = 2'-fluorouridine-3'-phosphate
  modified_base 11: mod_base = OTHER; note = 2'-fluorouridine-3'-phosphate
  modified_base 12: mod_base = OTHER; note = 2'-O-methylcytidine-3'-phosphate
  modified_base 13: mod_base = OTHER; note = 2'-O-methyluridine-3'-phosphate
  modified_base 14: mod_base = OTHER; note = 2'-O-methyluridine-3'-phosphate
  modified_base 15: mod_base = OTHER; note = 2'-O-methylguanosine-3'-phosphate
  modified_base 16: mod_base = OTHER; note = 2'-O-methylguanosine-3'-phosphate
  modified_base 17: mod_base = OTHER; note = 2'-O-methylguanosine-3'-phosphate
  modified_base 18: mod_base = OTHER; note = 2'-O-methylcytidine-3'-phosphate
  modified_base 19: mod_base = OTHER; note = 2'-O-methyluridine-3'-phosphate
  modified_base 20: mod_base = OTHER; note = 2'-O-methyluridine-3'-phosphate
  modified_base 21: mod_base = OTHER; note = 2'-O-methyluridine-3'-phosphate N-[tris(GalNAc-alkyl)-amidodecanoyl)]-4-hydroxyprolinol (Hyp-(GalNAc-alkyl)3)
ctggccaacttcttgggcttt

SEQ ID NO: 3146 - RNA, 21 nt, synthetic construct
  source 1..21: mol_type = other RNA
  modified_base 1: mod_base = OTHER; note = 2'-O-methylguanosine-3'-phosphorothioate
  modified_base 2: mod_base = OTHER; note = 2'-O-methylcytidine-3'-phosphorothioate
  modified_base 3: mod_base = OTHER; note = 2'-O-methylcytidine-3'-phosphate
  modified_base 4: mod_base = OTHER; note = 2'-O-methyladenosine-3'-phosphate
  modified_base 5: mod_base = OTHER; note = 2'-O-methyladenosine-3'-phosphate
  modified_base 6: mod_base = OTHER; note = 2'-O-methylcytidine-3'-phosphate
  modified_base 7: mod_base = OTHER; note = 2'-fluorouridine-3'-phosphate
  modified_base 8: mod_base = OTHER; note = 2'-O-methyluridine-3'-phosphate
  modified_base 9: mod_base = OTHER; note = 2'-fluorocytidine-3'-phosphate
  modified_base 10: mod_base = OTHER; note = 2'-fluorouridine-3'-phosphate
  modified_base 11: mod_base = OTHER; note = 2'-fluorouridine-3'-phosphate
  modified_base 12: mod_base = OTHER; note = 2'-O-methylguanosine-3'-phosphate
  modified_base 13: mod_base = OTHER; note = 2'-O-methylguanosine-3'-phosphate
  modified_base 14: mod_base = OTHER; note = 2'-O-methylguanosine-3'-phosphate
  modified_base 15: mod_base = OTHER; note = 2'-O-methylcytidine-3'-phosphate
  modified_base 16: mod_base = OTHER; note = 2'-O-methyluridine-3'-phosphate
  modified_base 17: mod_base = OTHER; note = 2'-O-methyluridine-3'-phosphate
  modified_base 18: mod_base = OTHER; note = 2'-O-methylcytidine-3'-phosphate
  modified_base 19: mod_base = OTHER; note = 2'-O-methylcytidine-3'-phosphate
  modified_base 20: mod_base = OTHER; note = 2'-O-methylguanosine-3'-phosphate
  modified_base 21: mod_base = OTHER; note = 2'-O-methyluridine-3'-phosphate N-[tris(GalNAc-alkyl)-amidodecanoyl)]-4-hydroxyprolinol (Hyp-(GalNAc-alkyl)3)
gccaacttcttgggcttccgt

SEQ ID NO: 3147 - RNA, 21 nt, synthetic construct
  source 1..21: mol_type = other RNA
  modified_base 1: mod_base = OTHER; note = 2'-O-methylcytidine-3'-phosphorothioate
  modified_base 2: mod_base = OTHER; note = 2'-O-methylcytidine-3'-phosphorothioate
  modified_base 3: mod_base = OTHER; note = 2'-O-methyladenosine-3'-phosphate
  modified_base 4: mod_base = OTHER; note = 2'-O-methyladenosine-3'-phosphate
  modified_base 5: mod_base = OTHER; note = 2'-O-methylcytidine-3'-phosphate
  modified_base 6: mod_base = OTHER; note = 2'-O-methyluridine-3'-phosphate
  modified_base 7: mod_base = OTHER; note = 2'-fluorouridine-3'-phosphate
  modified_base 8: mod_base = OTHER; note = 2'-O-methylcytidine-3'-phosphate
  modified_base 9: mod_base = OTHER; note = 2'-fluorouridine-3'-phosphate
  modified_base 10: mod_base = OTHER; note = 2'-fluorouridine-3'-phosphate
  modified_base 11: mod_base = OTHER; note = 2'-fluoroguanosine-3'-phosphate
  modified_base 12: mod_base = OTHER; note = 2'-O-methylguanosine-3'-phosphate
  modified_base 13: mod_base = OTHER; note = 2'-O-methylguanosine-3'-phosphate
  modified_base 14: mod_base = OTHER; note = 2'-O-methylcytidine-3'-phosphate
  modified_base 15: mod_base = OTHER; note = 2'-O-methyluridine-3'-phosphate
  modified_base 16: mod_base = OTHER; note = 2'-O-methyluridine-3'-phosphate
  modified_base 17: mod_base = OTHER; note = 2'-O-methylcytidine-3'-phosphate
  modified_base 18: mod_base = OTHER; note = 2'-O-methylcytidine-3'-phosphate
  modified_base 19: mod_base = OTHER; note = 2'-O-methylguanosine-3'-phosphate
  modified_base 20: mod_base = OTHER; note = 2'-O-methyluridine-3'-phosphate
  modified_base 21: mod_base = OTHER; note = 2'-O-methyluridine-3'-phosphate N-[tris(GalNAc-alkyl)-amidodecanoyl)]-4-hydroxyprolinol (Hyp-(GalNAc-alkyl)3)
ccaacttcttgggcttccgtt

SEQ ID NO: 3148 - RNA, 21 nt, synthetic construct
  source 1..21: mol_type = other RNA
  modified_base 1: mod_base = OTHER; note = 2'-O-methylcytidine-3'-phosphorothioate
  modified_base 2: mod_base = OTHER; note = 2'-O-methyluridine-3'-phosphorothioate
  modified_base 3: mod_base = OTHER; note = 2'-O-methyluridine-3'-phosphate
  modified_base 4: mod_base = OTHER; note = 2'-O-methylcytidine-3'-phosphate
  modified_base 5: mod_base = OTHER; note = 2'-O-methyluridine-3'-phosphate
  modified_base 6: mod_base = OTHER; note = 2'-O-methyluridine-3'-phosphate
  modified_base 7: mod_base = OTHER; note = 2'-fluoroguanosine-3'-phosphate
  modified_base 8: mod_base = OTHER; note = 2'-O-methylguanosine-3'-phosphate
  modified_base 9: mod_base = OTHER; note = 2'-fluoroguanosine-3'-phosphate
  modified_base 10: mod_base = OTHER; note = 2'-fluorocytidine-3'-phosphate
  modified_base 11: mod_base = OTHER; note = 2'-fluorouridine-3'-phosphate
  modified_base 12: mod_base = OTHER; note = 2'-O-methyluridine-3'-phosphate
  modified_base 13: mod_base = OTHER; note = 2'-O-methylcytidine-3'-phosphate
  modified_base 14: mod_base = OTHER; note = 2'-O-methylcytidine-3'-phosphate
  modified_base 15: mod_base = OTHER; note = 2'-O-methylguanosine-3'-phosphate
  modified_base 16: mod_base = OTHER; note = 2'-O-methyluridine-3'-phosphate
  modified_base 17: mod_base = OTHER; note = 2'-O-methyladenosine-3'-phosphate
  modified_base 18: mod_base = OTHER; note = 2'-O-methyluridine-3'-phosphate
  modified_base 19: mod_base = OTHER; note = 2'-O-methyladenosine-3'-phosphate
  modified_base 20: mod_base = OTHER; note = 2'-O-methyluridine-3'-phosphate
  modified_base 21: mod_base = OTHER; note = 2'-O-methyluridine-3'-phosphate N-[tris(GalNAc-alkyl)-amidodecanoyl)]-4-hydroxyprolinol (Hyp-(GalNAc-alkyl)3)
cttcttgggcttccgtatatt

SEQ ID NO: 3149 - RNA, 21 nt, synthetic construct
  source 1..21: mol_type = other RNA
  modified_base 1: mod_base = OTHER; note = 2'-O-methyluridine-3'-phosphorothioate
  modified_base 2: mod_base = OTHER; note = 2'-O-methyluridine-3'-phosphorothioate
  modified_base 3: mod_base = OTHER; note = 2'-O-methylcytidine-3'-phosphate
  modified_base 4: mod_base = OTHER; note = 2'-O-methyluridine-3'-phosphate
  modified_base 5: mod_base = OTHER; note = 2'-O-methyluridine-3'-phosphate
  modified_base 6: mod_base = OTHER; note = 2'-O-methylguanosine-3'-phosphate
  modified_base 7: mod_base = OTHER; note = 2'-fluoroguanosine-3'-phosphate
  modified_base 8: mod_base = OTHER; note = 2'-O-methylguanosine-3'-phosphate
  modified_base 9: mod_base = OTHER; note = 2'-fluorocytidine-3'-phosphate
  modified_base 10: mod_base = OTHER; note = 2'-fluorouridine-3'-phosphate
  modified_base 11: mod_base = OTHER; note = 2'-fluorouridine-3'-phosphate
  modified_base 12: mod_base = OTHER; note = 2'-O-methylcytidine-3'-phosphate
  modified_base 13: mod_base = OTHER; note = 2'-O-methylcytidine-3'-phosphate
  modified_base 14: mod_base = OTHER; note = 2'-O-methylguanosine-3'-phosphate
  modified_base 15: mod_base = OTHER; note = 2'-O-methyluridine-3'-phosphate
  modified_base 16: mod_base = OTHER; note = 2'-O-methyladenosine-3'-phosphate
  modified_base 17: mod_base = OTHER; note = 2'-O-methyluridine-3'-phosphate
  modified_base 18: mod_base = OTHER; note = 2'-O-methyladenosine-3'-phosphate
  modified_base 19: mod_base = OTHER; note = 2'-O-methyluridine-3'-phosphate
  modified_base 20: mod_base = OTHER; note = 2'-O-methyladenosine-3'-phosphate
  modified_base 21: mod_base = OTHER; note = 2'-O-methyluridine-3'-phosphate N-[tris(GalNAc-alkyl)-amidodecanoyl)]-4-hydroxyprolinol (Hyp-(GalNAc-alkyl)3)
ttcttgggcttccgtatatat

SEQ ID NO: 3150 - RNA, 21 nt, synthetic construct
  source 1..21: mol_type = other RNA
  modified_base 1: mod_base = OTHER; note = 2'-O-methylcytidine-3'-phosphorothioate
  modified_base 2: mod_base = OTHER; note = 2'-O-methyluridine-3'-phosphorothioate
  modified_base 3: mod_base = OTHER; note = 2'-O-methyluridine-3'-phosphate
  modified_base 4: mod_base = OTHER; note = 2'-O-methylguanosine-3'-phosphate
  modified_base 5: mod_base = OTHER; note = 2'-O-methylguanosine-3'-phosphate
  modified_base 6: mod_base = OTHER; note = 2'-O-methylguanosine-3'-phosphate
  modified_base 7: mod_base = OTHER; note = 2'-fluorocytidine-3'-phosphate
  modified_base 8: mod_base = OTHER; note = 2'-O-methyluridine-3'-phosphate
  modified_base 9: mod_base = OTHER; note = 2'-fluorouridine-3'-phosphate
  modified_base 10: mod_base = OTHER; note = 2'-fluorocytidine-3'-phosphate
  modified_base 11: mod_base = OTHER; note = 2'-fluorocytidine-3'-phosphate
  modified_base 12: mod_base = OTHER; note = 2'-O-methylguanosine-3'-phosphate
  modified_base 13: mod_base = OTHER; note = 2'-O-methyluridine-3'-phosphate
  modified_base 14: mod_base = OTHER; note = 2'-O-methyladenosine-3'-phosphate
  modified_base 15: mod_base = OTHER; note = 2'-O-methyluridine-3'-phosphate
  modified_base 16: mod_base = OTHER; note = 2'-O-methyladenosine-3'-phosphate
  modified_base 17: mod_base = OTHER; note = 2'-O-methyluridine-3'-phosphate
  modified_base 18: mod_base = OTHER; note = 2'-O-methyladenosine-3'-phosphate
  modified_base 19: mod_base = OTHER; note = 2'-O-methyluridine-3'-phosphate
  modified_base 20: mod_base = OTHER; note = 2'-O-methylguanosine-3'-phosphate
  modified_base 21: mod_base = OTHER; note = 2'-O-methyluridine-3'-phosphate N-[tris(GalNAc-alkyl)-amidodecanoyl)]-4-hydroxyprolinol (Hyp-(GalNAc-alkyl)3)
cttgggcttccgtatatatgt

SEQ ID NO: 3151 - RNA, 21 nt, synthetic construct
  source 1..21: mol_type = other RNA
  modified_base 1: mod_base = OTHER; note = 2'-O-methylguanosine-3'-phosphorothioate
  modified_base 2: mod_base = OTHER; note = 2'-O-methylguanosine-3'-phosphorothioate
  modified_base 3: mod_base = OTHER; note = 2'-O-methylguanosine-3'-phosphate
  modified_base 4: mod_base = OTHER; note = 2'-O-methylcytidine-3'-phosphate
  modified_base 5: mod_base = OTHER; note = 2'-O-methyluridine-3'-phosphate
  modified_base 6: mod_base = OTHER; note = 2'-O-methyluridine-3'-phosphate
  modified_base 7: mod_base = OTHER; note = 2'-fluorocytidine-3'-phosphate
  modified_base 8: mod_base = OTHER; note = 2'-O-methylcytidine-3'-phosphate
  modified_base 9: mod_base = OTHER; note = 2'-fluoroguanosine-3'-phosphate
  modified_base 10: mod_base = OTHER; note = 2'-fluorouridine-3'-phosphate
  modified_base 11: mod_base = OTHER; note = 2'-fluoroadenosine-3'-phosphate
  modified_base 12: mod_base = OTHER; note = 2'-O-methyluridine-3'-phosphate
  modified_base 13: mod_base = OTHER; note = 2'-O-methyladenosine-3'-phosphate
  modified_base 14: mod_base = OTHER; note = 2'-O-methyluridine-3'-phosphate
  modified_base 15: mod_base = OTHER; note = 2'-O-methyladenosine-3'-phosphate
  modified_base 16: mod_base = OTHER; note = 2'-O-methyluridine-3'-phosphate
  modified_base 17: mod_base = OTHER; note = 2'-O-methylguanosine-3'-phosphate
  modified_base 18: mod_base = OTHER; note = 2'-O-methylguanosine-3'-phosphate
  modified_base 19: mod_base = OTHER; note = 2'-O-methylcytidine-3'-phosphate
  modified_base 20: mod_base = OTHER; note = 2'-O-methyladenosine-3'-phosphate
  modified_base 21: mod_base = OTHER; note = 2'-O-methyluridine-3'-phosphate N-[tris(GalNAc-alkyl)-amidodecanoyl)]-4-hydroxyprolinol (Hyp-(GalNAc-alkyl)3)
gggcttccgtatatatggcat

SEQ ID NO: 3152 - RNA, 21 nt, synthetic construct
  source 1..21: mol_type = other RNA
  modified_base 1: mod_base = OTHER; note = 2'-O-methylguanosine-3'-phosphorothioate
  modified_base 2: mod_base = OTHER; note = 2'-O-methylguanosine-3'-phosphorothioate
  modified_base 3: mod_base = OTHER; note = 2'-O-methylcytidine-3'-phosphate
  modified_base 4: mod_base = OTHER; note = 2'-O-methyluridine-3'-phosphate
  modified_base 5: mod_base = OTHER; note = 2'-O-methyluridine-3'-phosphate
  modified_base 6: mod_base = OTHER; note = 2'-O-methylcytidine-3'-phosphate
  modified_base 7: mod_base = OTHER; note = 2'-fluorocytidine-3'-phosphate
  modified_base 8: mod_base = OTHER; note = 2'-O-methylguanosine-3'-phosphate
  modified_base 9: mod_base = OTHER; note = 2'-fluorouridine-3'-phosphate
  modified_base 10: mod_base = OTHER; note = 2'-fluoroadenosine-3'-phosphate
  modified_base 11: mod_base = OTHER; note = 2'-fluorouridine-3'-phosphate
  modified_base 12: mod_base = OTHER; note = 2'-O-methyladenosine-3'-phosphate
  modified_base 13: mod_base = OTHER; note = 2'-O-methyluridine-3'-phosphate
  modified_base 14: mod_base = OTHER; note = 2'-O-methyladenosine-3'-phosphate
  modified_base 15: mod_base = OTHER; note = 2'-O-methyluridine-3'-phosphate
  modified_base 16: mod_base = OTHER; note = 2'-O-methylguanosine-3'-phosphate
  modified_base 17: mod_base = OTHER; note = 2'-O-methylguanosine-3'-phosphate
  modified_base 18: mod_base = OTHER; note = 2'-O-methylcytidine-3'-phosphate
  modified_base 19: mod_base = OTHER; note = 2'-O-methyladenosine-3'-phosphate
  modified_base 20: mod_base = OTHER; note = 2'-O-methyluridine-3'-phosphate
  modified_base 21: mod_base = OTHER; note = 2'-O-methyluridine-3'-phosphate N-[tris(GalNAc-alkyl)-amidodecanoyl)]-4-hydroxyprolinol (Hyp-(GalNAc-alkyl)3)
ggcttccgtatatatggcatt

SEQ ID NO: 3153 - RNA, 21 nt, synthetic construct
  source 1..21: mol_type = other RNA
  modified_base 1: mod_base = OTHER; note = 2'-O-methylguanosine-3'-phosphorothioate
  modified_base 2: mod_base = OTHER; note = 2'-O-methylcytidine-3'-phosphorothioate
  modified_base 3: mod_base = OTHER; note = 2'-O-methyluridine-3'-phosphate
  modified_base 4: mod_base = OTHER; note = 2'-O-methyluridine-3'-phosphate
  modified_base 5: mod_base = OTHER; note = 2'-O-methylcytidine-3'-phosphate
  modified_base 6: mod_base = OTHER; note = 2'-O-methylcytidine-3'-phosphate
  modified_base 7: mod_base = OTHER; note = 2'-fluoroguanosine-3'-phosphate
  modified_base 8: mod_base = OTHER; note = 2'-O-methyluridine-3'-phosphate
  modified_base 9: mod_base = OTHER; note = 2'-fluoroadenosine-3'-phosphate
  modified_base 10: mod_base = OTHER; note = 2'-fluorouridine-3'-phosphate
  modified_base 11: mod_base = OTHER; note = 2'-fluoroadenosine-3'-phosphate
  modified_base 12: mod_base = OTHER; note = 2'-O-methyluridine-3'-phosphate
  modified_base 13: mod_base = OTHER; note = 2'-O-methyladenosine-3'-phosphate
  modified_base 14: mod_base = OTHER; note = 2'-O-methyluridine-3'-phosphate
  modified_base 15: mod_base = OTHER; note = 2'-O-methylguanosine-3'-phosphate
  modified_base 16: mod_base = OTHER; note = 2'-O-methylguanosine-3'-phosphate
  modified_base 17: mod_base = OTHER; note = 2'-O-methylcytidine-3'-phosphate
  modified_base 18: mod_base = OTHER; note = 2'-O-methyladenosine-3'-phosphate
  modified_base 19: mod_base = OTHER; note = 2'-O-methyluridine-3'-phosphate
  modified_base 20: mod_base = OTHER; note = 2'-O-methylguanosine-3'-phosphate
  modified_base 21: mod_base = OTHER; note = 2'-O-methyluridine-3'-phosphate N-[tris(GalNAc-alkyl)-amidodecanoyl)]-4-hydroxyprolinol (Hyp-(GalNAc-alkyl)3)
gcttccgtatatatggcatgt

SEQ ID NO: 3154 - RNA, 21 nt, synthetic construct
  source 1..21: mol_type = other RNA
  modified_base 1: mod_base = OTHER; note = 2'-O-methyluridine-3'-phosphorothioate
  modified_base 2: mod_base = OTHER; note = 2'-O-methyladenosine-3'-phosphorothioate
  modified_base 3: mod_base = OTHER; note = 2'-O-methyluridine-3'-phosphate
  modified_base 4: mod_base = OTHER; note = 2'-O-methyladenosine-3'-phosphate
  modified_base 5: mod_base = OTHER; note = 2'-O-methyluridine-3'-phosphate
  modified_base 6: mod_base = OTHER; note = 2'-O-methyladenosine-3'-phosphate
  modified_base 7: mod_base = OTHER; note = 2'-fluorouridine-3'-phosphate
  modified_base 8: mod_base = OTHER; note = 2'-O-methylguanosine-3'-phosphate
  modified_base 9: mod_base = OTHER; note = 2'-fluoroguanosine-3'-phosphate
  modified_base 10: mod_base = OTHER; note = 2'-fluorocytidine-3'-phosphate
  modified_base 11: mod_base = OTHER; note = 2'-fluoroadenosine-3'-phosphate
  modified_base 12: mod_base = OTHER; note = 2'-O-methyluridine-3'-phosphate
  modified_base 13: mod_base = OTHER; note = 2'-O-methylguanosine-3'-phosphate
  modified_base 14: mod_base = OTHER; note = 2'-O-methylcytidine-3'-phosphate
  modified_base 15: mod_base = OTHER; note = 2'-O-methyladenosine-3'-phosphate
  modified_base 16: mod_base = OTHER; note = 2'-O-methylcytidine-3'-phosphate
  modified_base 17: mod_base = OTHER; note = 2'-O-methyladenosine-3'-phosphate
  modified_base 18: mod_base = OTHER; note = 2'-O-methylguanosine-3'-phosphate
  modified_base 19: mod_base = OTHER; note = 2'-O-methyluridine-3'-phosphate
  modified_base 20: mod_base = OTHER; note = 2'-O-methylguanosine-3'-phosphate
  modified_base 21: mod_base = OTHER; note = 2'-O-methyluridine-3'-phosphate N-[tris(GalNAc-alkyl)-amidodecanoyl)]-4-hydroxyprolinol (Hyp-(GalNAc-alkyl)3)
tatatatggcatgcacagtgt

SEQ ID NO: 3155 - RNA, 21 nt, synthetic construct
  source 1..21: mol_type = other RNA
  modified_base 1: mod_base = OTHER; note = 2'-O-methyladenosine-3'-phosphorothioate
  modified_base 2: mod_base = OTHER; note = 2'-O-methyluridine-3'-phosphorothioate
  modified_base 3: mod_base = OTHER; note = 2'-O-methyladenosine-3'-phosphate
  modified_base 4: mod_base = OTHER; note = 2'-O-methyluridine-3'-phosphate
  modified_base 5: mod_base = OTHER; note = 2'-O-methyladenosine-3'-phosphate
  modified_base 6: mod_base = OTHER; note = 2'-O-methyluridine-3'-phosphate
  modified_base 7: mod_base = OTHER; note = 2'-fluoroguanosine-3'-phosphate
  modified_base 8: mod_base = OTHER; note = 2'-O-methylguanosine-3'-phosphate
  modified_base 9: mod_base = OTHER; note = 2'-fluorocytidine-3'-phosphate
  modified_base 10: mod_base = OTHER; note = 2'-fluoroadenosine-3'-phosphate
  modified_base 11: mod_base = OTHER; note = 2'-fluorouridine-3'-phosphate
  modified_base 12: mod_base = OTHER; note = 2'-O-methylguanosine-3'-phosphate
  modified_base 13: mod_base = OTHER; note = 2'-O-methylcytidine-3'-phosphate
  modified_base 14: mod_base = OTHER; note = 2'-O-methyladenosine-3'-phosphate
  modified_base 15: mod_base = OTHER; note = 2'-O-methylcytidine-3'-phosphate
  modified_base 16: mod_base = OTHER; note = 2'-O-methyladenosine-3'-phosphate
  modified_base 17: mod_base = OTHER; note = 2'-O-methylguanosine-3'-phosphate
  modified_base 18: mod_base = OTHER; note = 2'-O-methyluridine-3'-phosphate
  modified_base 19: mod_base = OTHER; note = 2'-O-methylguanosine-3'-phosphate
  modified_base 20: mod_base = OTHER; note = 2'-O-methyladenosine-3'-phosphate
  modified_base 21: mod_base = OTHER; note = 2'-O-methyluridine-3'-phosphate N-[tris(GalNAc-alkyl)-amidodecanoyl)]-4-hydroxyprolinol (Hyp-(GalNAc-alkyl)3)
atatatggcatgcacagtgat

SEQ ID NO: 3156 - RNA, 21 nt, synthetic construct
  source 1..21: mol_type = other RNA
  modified_base 1: mod_base = OTHER; note = 2'-O-methyladenosine-3'-phosphorothioate
  modified_base 2: mod_base = OTHER; note = 2'-O-methyluridine-3'-phosphorothioate
  modified_base 3: mod_base = OTHER; note = 2'-O-methyladenosine-3'-phosphate
  modified_base 4: mod_base = OTHER; note = 2'-O-methyluridine-3'-phosphate
  modified_base 5: mod_base = OTHER; note = 2'-O-methylguanosine-3'-phosphate
  modified_base 6: mod_base = OTHER; note = 2'-O-methylguanosine-3'-phosphate
  modified_base 7: mod_base = OTHER; note = 2'-fluorocytidine-3'-phosphate
  modified_base 8: mod_base = OTHER; note = 2'-O-methyladenosine-3'-phosphate
  modified_base 9: mod_base = OTHER; note = 2'-fluorouridine-3'-phosphate
  modified_base 10: mod_base = OTHER; note = 2'-fluoroguanosine-3'-phosphate
  modified_base 11: mod_base = OTHER; note = 2'-fluorocytidine-3'-phosphate
  modified_base 12: mod_base = OTHER; note = 2'-O-methyladenosine-3'-phosphate
  modified_base 13: mod_base = OTHER; note = 2'-O-methylcytidine-3'-phosphate
  modified_base 14: mod_base = OTHER; note = 2'-O-methyladenosine-3'-phosphate
  modified_base 15: mod_base = OTHER; note = 2'-O-methylguanosine-3'-phosphate
  modified_base 16: mod_base = OTHER; note = 2'-O-methyluridine-3'-phosphate
  modified_base 17: mod_base = OTHER; note = 2'-O-methylguanosine-3'-phosphate
  modified_base 18: mod_base = OTHER; note = 2'-O-methyladenosine-3'-phosphate
  modified_base 19: mod_base = OTHER; note = 2'-O-methylguanosine-3'-phosphate
  modified_base 20: mod_base = OTHER; note = 2'-O-methylcytidine-3'-phosphate
  modified_base 21: mod_base = OTHER; note = 2'-O-methyluridine-3'-phosphate N-[tris(GalNAc-alkyl)-amidodecanoyl)]-4-hydroxyprolinol (Hyp-(GalNAc-alkyl)3)
atatggcatgcacagtgagct

SEQ ID NO: 3157 - RNA, 21 nt, synthetic construct
  source 1..21: mol_type = other RNA
  modified_base 1: mod_base = OTHER; note = 2'-O-methyluridine-3'-phosphorothioate
  modified_base 2: mod_base = OTHER; note = 2'-O-methyladenosine-3'-phosphorothioate
  modified_base 3: mod_base = OTHER; note = 2'-O-methyluridine-3'-phosphate
  modified_base 4: mod_base = OTHER; note = 2'-O-methylguanosine-3'-phosphate
  modified_base 5: mod_base = OTHER; note = 2'-O-methylguanosine-3'-phosphate
  modified_base 6: mod_base = OTHER; note = 2'-O-methylcytidine-3'-phosphate
  modified_base 7: mod_base = OTHER; note = 2'-fluoroadenosine-3'-phosphate
  modified_base 8: mod_base = OTHER; note = 2'-O-methyluridine-3'-phosphate
  modified_base 9: mod_base = OTHER; note = 2'-fluoroguanosine-3'-phosphate
  modified_base 10: mod_base = OTHER; note = 2'-fluorocytidine-3'-phosphate
  modified_base 11: mod_base = OTHER; note = 2'-fluoroadenosine-3'-phosphate
  modified_base 12: mod_base = OTHER; note = 2'-O-methylcytidine-3'-phosphate
  modified_base 13: mod_base = OTHER; note = 2'-O-methyladenosine-3'-phosphate
  modified_base 14: mod_base = OTHER; note = 2'-O-methylguanosine-3'-phosphate
  modified_base 15: mod_base = OTHER; note = 2'-O-methyluridine-3'-phosphate
  modified_base 16: mod_base = OTHER; note = 2'-O-methylguanosine-3'-phosphate
  modified_base 17: mod_base = OTHER; note = 2'-O-methyladenosine-3'-phosphate
  modified_base 18: mod_base = OTHER; note = 2'-O-methylguanosine-3'-phosphate
  modified_base 19: mod_base = OTHER; note = 2'-O-methylcytidine-3'-phosphate
  modified_base 20: mod_base = OTHER; note = 2'-O-methyluridine-3'-phosphate
  modified_base 21: mod_base = OTHER; note = 2'-O-methyluridine-3'-phosphate N-[tris(GalNAc-alkyl)-amidodecanoyl)]-4-hydroxyprolinol (Hyp-(GalNAc-alkyl)3)
tatggcatgcacagtgagctt

SEQ ID NO: 3158 - RNA, 21 nt, synthetic construct
  source 1..21: mol_type = other RNA
  modified_base 1: mod_base = OTHER; note = 2'-O-methyluridine-3'-phosphorothioate
  modified_base 2: mod_base = OTHER; note = 2'-O-methylguanosine-3'-phosphorothioate
  modified_base 3: mod_base = OTHER; note = 2'-O-methylguanosine-3'-phosphate
  modified_base 4: mod_base = OTHER; note = 2'-O-methylcytidine-3'-phosphate
  modified_base 5: mod_base = OTHER; note = 2'-O-methyladenosine-3'-phosphate
  modified_base 6: mod_base = OTHER; note = 2'-O-methyluridine-3'-phosphate
  modified_base 7: mod_base = OTHER; note = 2'-fluoroguanosine-3'-phosphate
  modified_base 8: mod_base = OTHER; note = 2'-O-methylcytidine-3'-phosphate
  modified_base 9: mod_base = OTHER; note = 2'-fluoroadenosine-3'-phosphate
  modified_base 10: mod_base = OTHER; note = 2'-fluorocytidine-3'-phosphate
  modified_base 11: mod_base = OTHER; note = 2'-fluoroadenosine-3'-phosphate
  modified_base 12: mod_base = OTHER; note = 2'-O-methylguanosine-3'-phosphate
  modified_base 13: mod_base = OTHER; note = 2'-O-methyluridine-3'-phosphate
  modified_base 14: mod_base = OTHER; note = 2'-O-methylguanosine-3'-phosphate
  modified_base 15: mod_base = OTHER; note = 2'-O-methyladenosine-3'-phosphate
  modified_base 16: mod_base = OTHER; note = 2'-O-methylguanosine-3'-phosphate
  modified_base 17: mod_base = OTHER; note = 2'-O-methylcytidine-3'-phosphate
  modified_base 18: mod_base = OTHER; note = 2'-O-methyluridine-3'-phosphate
  modified_base 19: mod_base = OTHER; note = 2'-O-methyladenosine-3'-phosphate
  modified_base 20: mod_base = OTHER; note = 2'-O-methyluridine-3'-phosphate
  modified_base 21: mod_base = OTHER; note = 2'-O-methyluridine-3'-phosphate N-[tris(GalNAc-alkyl)-amidodecanoyl)]-4-hydroxyprolinol (Hyp-(GalNAc-alkyl)3)
tggcatgcacagtgagctatt

SEQ ID NO: 3159 - RNA, 21 nt, synthetic construct
  source 1..21: mol_type = other RNA
  modified_base 1: mod_base = OTHER; note = 2'-O-methylguanosine-3'-phosphorothioate
  modified_base 2: mod_base = OTHER; note = 2'-O-methylguanosine-3'-phosphorothioate
  modified_base 3: mod_base = OTHER; note = 2'-O-methylcytidine-3'-phosphate
  modified_base 4: mod_base = OTHER; note = 2'-O-methyladenosine-3'-phosphate
  modified_base 5: mod_base = OTHER; note = 2'-O-methyluridine-3'-phosphate
  modified_base 6: mod_base = OTHER; note = 2'-O-methylguanosine-3'-phosphate
  modified_base 7: mod_base = OTHER; note = 2'-fluorocytidine-3'-phosphate
  modified_base 8: mod_base = OTHER; note = 2'-O-methyladenosine-3'-phosphate
  modified_base 9: mod_base = OTHER; note = 2'-fluorocytidine-3'-phosphate
  modified_base 10: mod_base = OTHER; note = 2'-fluoroadenosine-3'-phosphate
  modified_base 11: mod_base = OTHER; note = 2'-fluoroguanosine-3'-phosphate
  modified_base 12: mod_base = OTHER; note = 2'-O-methyluridine-3'-phosphate
  modified_base 13: mod_base = OTHER; note = 2'-O-methylguanosine-3'-phosphate
  modified_base 14: mod_base = OTHER; note = 2'-O-methyladenosine-3'-phosphate
  modified_base 15: mod_base = OTHER; note = 2'-O-methylguanosine-3'-phosphate
  modified_base 16: mod_base = OTHER; note = 2'-O-methylcytidine-3'-phosphate
  modified_base 17: mod_base = OTHER; note = 2'-O-methyluridine-3'-phosphate
  modified_base 18: mod_base = OTHER; note = 2'-O-methyladenosine-3'-phosphate
  modified_base 19: mod_base = OTHER; note = 2'-O-methyluridine-3'-phosphate
  modified_base 20: mod_base = OTHER; note = 2'-O-methylguanosine-3'-phosphate
  modified_base 21: mod_base = OTHER; note = 2'-O-methyluridine-3'-phosphate N-[tris(GalNAc-alkyl)-amidodecanoyl)]-4-hydroxyprolinol (Hyp-(GalNAc-alkyl)3)
ggcatgcacagtgagctatgt

SEQ ID NO: 3160 - RNA, 21 nt, synthetic construct
  source 1..21: mol_type = other RNA
  modified_base 1: mod_base = OTHER; note = 2'-O-methyluridine-3'-phosphorothioate
  modified_base 2: mod_base = OTHER; note = 2'-O-methylguanosine-3'-phosphorothioate
  modified_base 3: mod_base = OTHER; note = 2'-O-methylguanosine-3'-phosphate
  modified_base 4: mod_base = OTHER; note = 2'-O-methylcytidine-3'-phosphate
  modified_base 5: mod_base = OTHER; note = 2'-O-methyladenosine-3'-phosphate
  modified_base 6: mod_base = OTHER; note = 2'-O-methylcytidine-3'-phosphate
  modified_base 7: mod_base = OTHER; note = 2'-fluorocytidine-3'-phosphate
  modified_base 8: mod_base = OTHER; note = 2'-O-methylcytidine-3'-phosphate
  modified_base 9: mod_base = OTHER; note = 2'-fluorouridine-3'-phosphate
  modified_base 10: mod_base = OTHER; note = 2'-fluoroguanosine-3'-phosphate
  modified_base 11: mod_base = OTHER; note = 2'-fluoroguanosine-3'-phosphate
  modified_base 12: mod_base = OTHER; note = 2'-O-methylcytidine-3'-phosphate
  modified_base 13: mod_base = OTHER; note = 2'-O-methylcytidine-3'-phosphate
  modified_base 14: mod_base = OTHER; note = 2'-O-methyluridine-3'-phosphate
  modified_base 15: mod_base = OTHER; note = 2'-O-methylcytidine-3'-phosphate
  modified_base 16: mod_base = OTHER; note = 2'-O-methyluridine-3'-phosphate
  modified_base 17: mod_base = OTHER; note = 2'-O-methylcytidine-3'-phosphate
  modified_base 18: mod_base = OTHER; note = 2'-O-methyluridine-3'-phosphate
  modified_base 19: mod_base = OTHER; note = 2'-O-methylcytidine-3'-phosphate
  modified_base 20: mod_base = OTHER; note = 2'-O-methyluridine-3'-phosphate
  modified_base 21: mod_base = OTHER; note = 2'-O-methyluridine-3'-phosphate N-[tris(GalNAc-alkyl)-amidodecanoyl)]-4-hydroxyprolinol (Hyp-(GalNAc-alkyl)3)
tggcaccctggcctctctctt

SEQ ID NO: 3161 - RNA, 21 nt, synthetic construct
  source 1..21: mol_type = other RNA
  modified_base 1: mod_base = OTHER; note = 2'-O-methylguanosine-3'-phosphorothioate
  modified_base 2: mod_base = OTHER; note = 2'-O-methylguanosine-3'-phosphorothioate
  modified_base 3: mod_base = OTHER; note = 2'-O-methylcytidine-3'-phosphate
  modified_base 4: mod_base = OTHER; note = 2'-O-methyladenosine-3'-phosphate
  modified_base 5: mod_base = OTHER; note = 2'-O-methylcytidine-3'-phosphate
  modified_base 6: mod_base = OTHER; note = 2'-O-methylcytidine-3'-phosphate
  modified_base 7: mod_base = OTHER; note = 2'-fluorocytidine-3'-phosphate
  modified_base 8: mod_base = OTHER; note = 2'-O-methyluridine-3'-phosphate
  modified_base 9: mod_base = OTHER; note = 2'-fluoroguanosine-3'-phosphate
  modified_base 10: mod_base = OTHER; note = 2'-fluoroguanosine-3'-phosphate
  modified_base 11: mod_base = OTHER; note = 2'-fluorocytidine-3'-phosphate
  modified_base 12: mod_base = OTHER; note = 2'-O-methylcytidine-3'-phosphate
  modified_base 13: mod_base = OTHER; note = 2'-O-methyluridine-3'-phosphate
  modified_base 14: mod_base = OTHER; note = 2'-O-methylcytidine-3'-phosphate
  modified_base 15: mod_base = OTHER; note = 2'-O-methyluridine-3'-phosphate
  modified_base 16: mod_base = OTHER; note = 2'-O-methylcytidine-3'-phosphate
  modified_base 17: mod_base = OTHER; note = 2'-O-methyluridine-3'-phosphate
  modified_base 18: mod_base = OTHER; note = 2'-O-methylcytidine-3'-phosphate
  modified_base 19: mod_base = OTHER; note = 2'-O-methyluridine-3'-phosphate
  modified_base 20: mod_base = OTHER; note = 2'-O-methyladenosine-3'-phosphate
  modified_base 21: mod_base = OTHER; note = 2'-O-methyluridine-3'-phosphate N-[tris(GalNAc-alkyl)-amidodecanoyl)]-4-hydroxyprolinol (Hyp-(GalNAc-alkyl)3)
ggcaccctggcctctctctat

SEQ ID NO: 3162 - RNA, 21 nt, synthetic construct
  source 1..21: mol_type = other RNA
  modified_base 1: mod_base = OTHER; note = 2'-O-methyluridine-3'-phosphorothioate
  modified_base 2: mod_base = OTHER; note = 2'-O-methyluridine-3'-phosphorothioate
  modified_base 3: mod_base = OTHER; note = 2'-O-methylcytidine-3'-phosphate
  modified_base 4: mod_base = OTHER; note = 2'-O-methylcytidine-3'-phosphate
  modified_base 5: mod_base = OTHER; note = 2'-O-methyluridine-3'-phosphate
  modified_base 6: mod_base = OTHER; note = 2'-O-methyluridine-3'-phosphate
  modified_base 7: mod_base = OTHER; note = 2'-fluoroguanosine-3'-phosphate
  modified_base 8: mod_base = OTHER; note = 2'-O-methylguanosine-3'-phosphate
  modified_base 9: mod_base = OTHER; note = 2'-fluoroadenosine-3'-phosphate
  modified_base 10: mod_base = OTHER; note = 2'-fluoroadenosine-3'-phosphate
  modified_base 11: mod_base = OTHER; note = 2'-fluoroguanosine-3'-phosphate
  modified_base 12: mod_base = OTHER; note = 2'-O-methylguanosine-3'-phosphate
  modified_base 13: mod_base = OTHER; note = 2'-O-methyladenosine-3'-phosphate
  modified_base 14: mod_base = OTHER; note = 2'-O-methylcytidine-3'-phosphate
  modified_base 15: mod_base = OTHER; note = 2'-O-methyladenosine-3'-phosphate
  modified_base 16: mod_base = OTHER; note = 2'-O-methyladenosine-3'-phosphate
  modified_base 17: mod_base = OTHER; note = 2'-O-methylguanosine-3'-phosphate
  modified_base 18: mod_base = OTHER; note = 2'-O-methyladenosine-3'-phosphate
  modified_base 19: mod_base = OTHER; note = 2'-O-methyladenosine-3'-phosphate
  modified_base 20: mod_base = OTHER; note = 2'-O-methylcytidine-3'-phosphate
  modified_base 21: mod_base = OTHER; note = 2'-O-methyluridine-3'-phosphate N-[tris(GalNAc-alkyl)-amidodecanoyl)]-4-hydroxyprolinol (Hyp-(GalNAc-alkyl)3)
ttccttggaaggacaagaact

SEQ ID NO: 3163 - RNA, 21 nt, synthetic construct
  source 1..21: mol_type = other RNA
  modified_base 1: mod_base = OTHER; note = 2'-O-methylcytidine-3'-phosphorothioate
  modified_base 2: mod_base = OTHER; note = 2'-O-methyluridine-3'-phosphorothioate
  modified_base 3: mod_base = OTHER; note = 2'-O-methyluridine-3'-phosphate
  modified_base 4: mod_base = OTHER; note = 2'-O-methylguanosine-3'-phosphate
  modified_base 5: mod_base = OTHER; note = 2'-O-methylguanosine-3'-phosphate
  modified_base 6: mod_base = OTHER; note = 2'-O-methyladenosine-3'-phosphate
  modified_base 7: mod_base = OTHER; note = 2'-fluoroadenosine-3'-phosphate
  modified_base 8: mod_base = OTHER; note = 2'-O-methylguanosine-3'-phosphate
  modified_base 9: mod_base = OTHER; note = 2'-fluoroguanosine-3'-phosphate
  modified_base 10: mod_base = OTHER; note = 2'-fluoroadenosine-3'-phosphate
  modified_base 11: mod_base = OTHER; note = 2'-fluorocytidine-3'-phosphate
  modified_base 12: mod_base = OTHER; note = 2'-O-methyladenosine-3'-phosphate
  modified_base 13: mod_base = OTHER; note = 2'-O-methyladenosine-3'-phosphate
  modified_base 14: mod_base = OTHER; note = 2'-O-methylguanosine-3'-phosphate
  modified_base 15: mod_base = OTHER; note = 2'-O-methyladenosine-3'-phosphate
  modified_base 16: mod_base = OTHER; note = 2'-O-methyladenosine-3'-phosphate
  modified_base 17: mod_base = OTHER; note = 2'-O-methylcytidine-3'-phosphate
  modified_base 18: mod_base = OTHER; note = 2'-O-methyluridine-3'-phosphate
  modified_base 19: mod_base = OTHER; note = 2'-O-methylguanosine-3'-phosphate
  modified_base 20: mod_base = OTHER; note = 2'-O-methylcytidine-3'-phosphate
  modified_base 21: mod_base = OTHER; note = 2'-O-methyluridine-3'-phosphate N-[tris(GalNAc-alkyl)-amidodecanoyl)]-4-hydroxyprolinol (Hyp-(GalNAc-alkyl)3)
cttggaaggacaagaactgct

SEQ ID NO: 3164 - RNA, 21 nt, synthetic construct
  source 1..21: mol_type = other RNA
  modified_base 1: mod_base = OTHER; note = 2'-O-methylcytidine-3'-phosphorothioate
  modified_base 2: mod_base = OTHER; note = 2'-O-methyluridine-3'-phosphorothioate
  modified_base 3: mod_base = OTHER; note = 2'-O-methylguanosine-3'-phosphate
  modified_base 4: mod_base = OTHER; note = 2'-O-methyladenosine-3'-phosphate
  modified_base 5: mod_base = OTHER; note = 2'-O-methyladenosine-3'-phosphate
  modified_base 6: mod_base = OTHER; note = 2'-O-methylguanosine-3'-phosphate
  modified_base 7: mod_base = OTHER; note = 2'-fluorocytidine-3'-phosphate
  modified_base 8: mod_base = OTHER; note = 2'-O-methyladenosine-3'-phosphate
  modified_base 9: mod_base = OTHER; note = 2'-fluoroguanosine-3'-phosphate
  modified_base 10: mod_base = OTHER; note = 2'-fluorocytidine-3'-phosphate
  modified_base 11: mod_base = OTHER; note = 2'-fluorocytidine-3'-phosphate
  modified_base 12: mod_base = OTHER; note = 2'-O-methylguanosine-3'-phosphate
  modified_base 13: mod_base = OTHER; note = 2'-O-methyluridine-3'-phosphate
  modified_base 14: mod_base = OTHER; note = 2'-O-methyluridine-3'-phosphate
  modified_base 15: mod_base = OTHER; note = 2'-O-methyluridine-3'-phosphate
  modified_base 16: mod_base = OTHER; note = 2'-O-methylguanosine-3'-phosphate
  modified_base 17: mod_base = OTHER; note = 2'-O-methyluridine-3'-phosphate
  modified_base 18: mod_base = OTHER; note = 2'-O-methylguanosine-3'-phosphate
  modified_base 19: mod_base = OTHER; note = 2'-O-methylcytidine-3'-phosphate
  modified_base 20: mod_base = OTHER; note = 2'-O-methyladenosine-3'-phosphate
  modified_base 21: mod_base = OTHER; note = 2'-O-methyluridine-3'-phosphate N-[tris(GalNAc-alkyl)-amidodecanoyl)]-4-hydroxyprolinol (Hyp-(GalNAc-alkyl)3)
ctgaagcagccgtttgtgcat

SEQ ID NO: 3165 - RNA, 21 nt, synthetic construct
  source 1..21: mol_type = other RNA
  modified_base 1: mod_base = OTHER; note = 2'-O-methyluridine-3'-phosphorothioate
  modified_base 2: mod_base = OTHER; note = 2'-O-methyluridine-3'-phosphorothioate
  modified_base 3: mod_base = OTHER; note = 2'-O-methyluridine-3'-phosphate
  modified_base 4: mod_base = OTHER; note = 2'-O-methylguanosine-3'-phosphate
  modified_base 5: mod_base = OTHER; note = 2'-O-methyluridine-3'-phosphate
  modified_base 6: mod_base = OTHER; note = 2'-O-methylguanosine-3'-phosphate
  modified_base 7: mod_base = OTHER; note = 2'-fluorocytidine-3'-phosphate
  modified_base 8: mod_base = OTHER; note = 2'-O-methyladenosine-3'-phosphate
  modified_base 9: mod_base = OTHER; note = 2'-fluoroguanosine-3'-phosphate
  modified_base 10: mod_base = OTHER; note = 2'-fluoroguanosine-3'-phosphate
  modified_base 11: mod_base = OTHER; note = 2'-fluoroguanosine-3'-phosphate
  modified_base 12: mod_base = OTHER; note = 2'-O-methylcytidine-3'-phosphate
  modified_base 13: mod_base = OTHER; note = 2'-O-methylcytidine-3'-phosphate
  modified_base 14: mod_base = OTHER; note = 2'-O-methyluridine-3'-phosphate
  modified_base 15: mod_base = OTHER; note = 2'-O-methylguanosine-3'-phosphate
  modified_base 16: mod_base = OTHER; note = 2'-O-methylguanosine-3'-phosphate
  modified_base 17: mod_base = OTHER; note = 2'-O-methylcytidine-3'-phosphate
  modified_base 18: mod_base = OTHER; note = 2'-O-methyluridine-3'-phosphate
  modified_base 19: mod_base = OTHER; note = 2'-O-methylcytidine-3'-phosphate
  modified_base 20: mod_base = OTHER; note = 2'-O-methyluridine-3'-phosphate
  modified_base 21: mod_base = OTHER; note = 2'-O-methyluridine-3'-phosphate N-[tris(GalNAc-alkyl)-amidodecanoyl)]-4-hydroxyprolinol (Hyp-(GalNAc-alkyl)3)
tttgtgcagggcctggctctt

SEQ ID NO: 3166 - RNA, 21 nt, synthetic construct
  source 1..21: mol_type = other RNA
  modified_base 1: mod_base = OTHER; note = 2'-O-methyluridine-3'-phosphorothioate
  modified_base 2: mod_base = OTHER; note = 2'-O-methyluridine-3'-phosphorothioate
  modified_base 3: mod_base = OTHER; note = 2'-O-methylguanosine-3'-phosphate
  modified_base 4: mod_base = OTHER; note = 2'-O-methyluridine-3'-phosphate
  modified_base 5: mod_base = OTHER; note = 2'-O-methylguanosine-3'-phosphate
  modified_base 6: mod_base = OTHER; note = 2'-O-methylcytidine-3'-phosphate
  modified_base 7: mod_base = OTHER; note = 2'-fluoroadenosine-3'-phosphate
  modified_base 8: mod_base = OTHER; note = 2'-O-methylguanosine-3'-phosphate
  modified_base 9: mod_base = OTHER; note = 2'-fluoroguanosine-3'-phosphate
  modified_base 10: mod_base = OTHER; note = 2'-fluoroguanosine-3'-phosphate
  modified_base 11: mod_base = OTHER; note = 2'-fluorocytidine-3'-phosphate
  modified_base 12: mod_base = OTHER; note = 2'-O-methylcytidine-3'-phosphate
  modified_base 13: mod_base = OTHER; note = 2'-O-methyluridine-3'-phosphate
  modified_base 14: mod_base = OTHER; note = 2'-O-methylguanosine-3'-phosphate
  modified_base 15: mod_base = OTHER; note = 2'-O-methylguanosine-3'-phosphate
  modified_base 16: mod_base = OTHER; note = 2'-O-methylcytidine-3'-phosphate
  modified_base 17: mod_base = OTHER; note = 2'-O-methyluridine-3'-phosphate
  modified_base 18: mod_base = OTHER; note = 2'-O-methylcytidine-3'-phosphate
  modified_base 19: mod_base = OTHER; note = 2'-O-methyluridine-3'-phosphate
  modified_base 20: mod_base = OTHER; note = 2'-O-methylcytidine-3'-phosphate
  modified_base 21: mod_base = OTHER; note = 2'-O-methyluridine-3'-phosphate N-[tris(GalNAc-alkyl)-amidodecanoyl)]-4-hydroxyprolinol (Hyp-(GalNAc-alkyl)3)
ttgtgcagggcctggctctct

SEQ ID NO: 3167 - RNA, 21 nt, synthetic construct
  source 1..21: mol_type = other RNA
  modified_base 1: mod_base = OTHER; note = 2'-O-methyluridine-3'-phosphorothioate
  modified_base 2: mod_base = OTHER; note = 2'-O-methylguanosine-3'-phosphorothioate
  modified_base 3: mod_base = OTHER; note = 2'-O-methyluridine-3'-phosphate
  modified_base 4: mod_base = OTHER; note = 2'-O-methylguanosine-3'-phosphate
  modified_base 5: mod_base = OTHER; note = 2'-O-methylcytidine-3'-phosphate
  modified_base 6: mod_base = OTHER; note = 2'-O-methyladenosine-3'-phosphate
  modified_base 7: mod_base = OTHER; note = 2'-fluoroguanosine-3'-phosphate
  modified_base 8: mod_base = OTHER; note = 2'-O-methylguanosine-3'-phosphate
  modified_base 9: mod_base = OTHER; note = 2'-fluoroguanosine-3'-phosphate
  modified_base 10: mod_base = OTHER; note = 2'-fluorocytidine-3'-phosphate
  modified_base 11: mod_base = OTHER; note = 2'-fluorocytidine-3'-phosphate
  modified_base 12: mod_base = OTHER; note = 2'-O-methyluridine-3'-phosphate
  modified_base 13: mod_base = OTHER; note = 2'-O-methylguanosine-3'-phosphate
  modified_base 14: mod_base = OTHER; note = 2'-O-methylguanosine-3'-phosphate
  modified_base 15: mod_base = OTHER; note = 2'-O-methylcytidine-3'-phosphate
  modified_base 16: mod_base = OTHER; note = 2'-O-methyluridine-3'-phosphate
  modified_base 17: mod_base = OTHER; note = 2'-O-methylcytidine-3'-phosphate
  modified_base 18: mod_base = OTHER; note = 2'-O-methyluridine-3'-phosphate
  modified_base 19: mod_base = OTHER; note = 2'-O-methylcytidine-3'-phosphate
  modified_base 20: mod_base = OTHER; note = 2'-O-methyluridine-3'-phosphate
  modified_base 21: mod_base = OTHER; note = 2'-O-methyluridine-3'-phosphate N-[tris(GalNAc-alkyl)-amidodecanoyl)]-4-hydroxyprolinol (Hyp-(GalNAc-alkyl)3)
tgtgcagggcctggctctctt

SEQ ID NO: 3168 - RNA, 21 nt, synthetic construct
  source 1..21: mol_type = other RNA
  modified_base 1: mod_base = OTHER; note = 2'-O-methylguanosine-3'-phosphorothioate
  modified_base 2: mod_base = OTHER; note = 2'-O-methyluridine-3'-phosphorothioate
  modified_base 3: mod_base = OTHER; note = 2'-O-methylguanosine-3'-phosphate
  modified_base 4: mod_base = OTHER; note = 2'-O-methylcytidine-3'-phosphate
  modified_base 5: mod_base = OTHER; note = 2'-O-methyladenosine-3'-phosphate
  modified_base 6: mod_base = OTHER; note = 2'-O-methylguanosine-3'-phosphate
  modified_base 7: mod_base = OTHER; note = 2'-fluoroguanosine-3'-phosphate
  modified_base 8: mod_base = OTHER; note = 2'-O-methylguanosine-3'-phosphate
  modified_base 9: mod_base = OTHER; note = 2'-fluorocytidine-3'-phosphate
  modified_base 10: mod_base = OTHER; note = 2'-fluorocytidine-3'-phosphate
  modified_base 11: mod_base = OTHER; note = 2'-fluorouridine-3'-phosphate
  modified_base 12: mod_base = OTHER; note = 2'-O-methylguanosine-3'-phosphate
  modified_base 13: mod_base = OTHER; note = 2'-O-methylguanosine-3'-phosphate
  modified_base 14: mod_base = OTHER; note = 2'-O-methylcytidine-3'-phosphate
  modified_base 15: mod_base = OTHER; note = 2'-O-methyluridine-3'-phosphate
  modified_base 16: mod_base = OTHER; note = 2'-O-methylcytidine-3'-phosphate
  modified_base 17: mod_base = OTHER; note = 2'-O-methyluridine-3'-phosphate
  modified_base 18: mod_base = OTHER; note = 2'-O-methylcytidine-3'-phosphate
  modified_base 19: mod_base = OTHER; note = 2'-O-methyluridine-3'-phosphate
  modified_base 20: mod_base = OTHER; note = 2'-O-methyladenosine-3'-phosphate
  modified_base 21: mod_base = OTHER; note = 2'-O-methyluridine-3'-phosphate N-[tris(GalNAc-alkyl)-amidodecanoyl)]-4-hydroxyprolinol (Hyp-(GalNAc-alkyl)3)
gtgcagggcctggctctctat

SEQ ID NO: 3169 - RNA, 21 nt, synthetic construct
  source 1..21: mol_type = other RNA
  modified_base 1: mod_base = OTHER; note = 2'-O-methyluridine-3'-phosphorothioate
  modified_base 2: mod_base = OTHER; note = 2'-O-methylguanosine-3'-phosphorothioate
  modified_base 3: mod_base = OTHER; note = 2'-O-methylcytidine-3'-phosphate
  modified_base 4: mod_base = OTHER; note = 2'-O-methyladenosine-3'-phosphate
  modified_base 5: mod_base = OTHER; note = 2'-O-methylguanosine-3'-phosphate
  modified_base 6: mod_base = OTHER; note = 2'-O-methylguanosine-3'-phosphate
  modified_base 7: mod_base = OTHER; note = 2'-fluoroguanosine-3'-phosphate
  modified_base 8: mod_base = OTHER; note = 2'-O-methylcytidine-3'-phosphate
  modified_base 9: mod_base = OTHER; note = 2'-fluorocytidine-3'-phosphate
  modified_base 10: mod_base = OTHER; note = 2'-fluorouridine-3'-phosphate
  modified_base 11: mod_base = OTHER; note = 2'-fluoroguanosine-3'-phosphate
  modified_base 12: mod_base = OTHER; note = 2'-O-methylguanosine-3'-phosphate
  modified_base 13: mod_base = OTHER; note = 2'-O-methylcytidine-3'-phosphate
  modified_base 14: mod_base = OTHER; note = 2'-O-methyluridine-3'-phosphate
  modified_base 15: mod_base = OTHER; note = 2'-O-methylcytidine-3'-phosphate
  modified_base 16: mod_base = OTHER; note = 2'-O-methyluridine-3'-phosphate
  modified_base 17: mod_base = OTHER; note = 2'-O-methylcytidine-3'-phosphate
  modified_base 18: mod_base = OTHER; note = 2'-O-methyluridine-3'-phosphate
  modified_base 19: mod_base = OTHER; note = 2'-O-methyladenosine-3'-phosphate
  modified_base 20: mod_base = OTHER; note = 2'-O-methyluridine-3'-phosphate
  modified_base 21: mod_base = OTHER; note = 2'-O-methyluridine-3'-phosphate N-[tris(GalNAc-alkyl)-amidodecanoyl)]-4-hydroxyprolinol (Hyp-(GalNAc-alkyl)3)
tgcagggcctggctctctatt

SEQ ID NO: 3170 - RNA, 21 nt, synthetic construct
  source 1..21: mol_type = other RNA
  modified_base 1: mod_base = OTHER; note = 2'-O-methyladenosine-3'-phosphorothioate
  modified_base 2: mod_base = OTHER; note = 2'-O-methylcytidine-3'-phosphorothioate
  modified_base 3: mod_base = OTHER; note = 2'-O-methylguanosine-3'-phosphate
  modified_base 4: mod_base = OTHER; note = 2'-O-methylcytidine-3'-phosphate
  modified_base 5: mod_base = OTHER; note = 2'-O-methyluridine-3'-phosphate
  modified_base 6: mod_base = OTHER; note = 2'-O-methylcytidine-3'-phosphate
  modified_base 7: mod_base = OTHER; note = 2'-fluorouridine-3'-phosphate
  modified_base 8: mod_base = OTHER; note = 2'-O-methylcytidine-3'-phosphate
  modified_base 9: mod_base = OTHER; note = 2'-fluorouridine-3'-phosphate
  modified_base 10: mod_base = OTHER; note = 2'-fluoroguanosine-3'-phosphate
  modified_base 11: mod_base = OTHER; note = 2'-fluoroguanosine-3'-phosphate
  modified_base 12: mod_base = OTHER; note = 2'-O-methyladenosine-3'-phosphate
  modified_base 13: mod_base = OTHER; note = 2'-O-methylcytidine-3'-phosphate
  modified_base 14: mod_base = OTHER; note = 2'-O-methyluridine-3'-phosphate
  modified_base 15: mod_base = OTHER; note = 2'-O-methyluridine-3'-phosphate
  modified_base 16: mod_base = OTHER; note = 2'-O-methylcytidine-3'-phosphate
  modified_base 17: mod_base = OTHER; note = 2'-O-methyladenosine-3'-phosphate
  modified_base 18: mod_base = OTHER; note = 2'-O-methylcytidine-3'-phosphate
  modified_base 19: mod_base = OTHER; note = 2'-O-methyladenosine-3'-phosphate
  modified_base 20: mod_base = OTHER; note = 2'-O-methylguanosine-3'-phosphate
  modified_base 21: mod_base = OTHER; note = 2'-O-methyluridine-3'-phosphate N-[tris(GalNAc-alkyl)-amidodecanoyl)]-4-hydroxyprolinol (Hyp-(GalNAc-alkyl)3)
acgctctctggacttcacagt

SEQ ID NO: 3171 - RNA, 21 nt, synthetic construct
  source 1..21: mol_type = other RNA
  modified_base 1: mod_base = OTHER; note = 2'-O-methylcytidine-3'-phosphorothioate
  modified_base 2: mod_base = OTHER; note = 2'-O-methylguanosine-3'-phosphorothioate
  modified_base 3: mod_base = OTHER; note = 2'-O-methylcytidine-3'-phosphate
  modified_base 4: mod_base = OTHER; note = 2'-O-methyluridine-3'-phosphate
  modified_base 5: mod_base = OTHER; note = 2'-O-methylcytidine-3'-phosphate
  modified_base 6: mod_base = OTHER; note = 2'-O-methyluridine-3'-phosphate
  modified_base 7: mod_base = OTHER; note = 2'-fluorocytidine-3'-phosphate
  modified_base 8: mod_base = OTHER; note = 2'-O-methyluridine-3'-phosphate
  modified_base 9: mod_base = OTHER; note = 2'-fluoroguanosine-3'-phosphate
  modified_base 10: mod_base = OTHER; note = 2'-fluoroguanosine-3'-phosphate
  modified_base 11: mod_base = OTHER; note = 2'-fluoroadenosine-3'-phosphate
  modified_base 12: mod_base = OTHER; note = 2'-O-methylcytidine-3'-phosphate
  modified_base 13: mod_base = OTHER; note = 2'-O-methyluridine-3'-phosphate
  modified_base 14: mod_base = OTHER; note = 2'-O-methyluridine-3'-phosphate
  modified_base 15: mod_base = OTHER; note = 2'-O-methylcytidine-3'-phosphate
  modified_base 16: mod_base = OTHER; note = 2'-O-methyladenosine-3'-phosphate
  modified_base 17: mod_base = OTHER; note = 2'-O-methylcytidine-3'-phosphate
  modified_base 18: mod_base = OTHER; note = 2'-O-methyladenosine-3'-phosphate
  modified_base 19: mod_base = OTHER; note = 2'-O-methylguanosine-3'-phosphate
  modified_base 20: mod_base = OTHER; note = 2'-O-methyladenosine-3'-phosphate
  modified_base 21: mod_base = OTHER; note = 2'-O-methyluridine-3'-phosphate N-[tris(GalNAc-alkyl)-amidodecanoyl)]-4-hydroxyprolinol (Hyp-(GalNAc-alkyl)3)
cgctctctggacttcacagat

SEQ ID NO: 3172 - RNA, 21 nt, synthetic construct
  source 1..21: mol_type = other RNA
  modified_base 1: mod_base = OTHER; note = 2'-O-methylcytidine-3'-phosphorothioate
  modified_base 2: mod_base = OTHER; note = 2'-O-methyluridine-3'-phosphorothioate
  modified_base 3: mod_base = OTHER; note = 2'-O-methylguanosine-3'-phosphate
  modified_base 4: mod_base = OTHER; note = 2'-O-methyladenosine-3'-phosphate
  modified_base 5: mod_base = OTHER; note = 2'-O-methylguanosine-3'-phosphate
  modified_base 6: mod_base = OTHER; note = 2'-O-methyladenosine-3'-phosphate
  modified_base 7: mod_base = OTHER; note = 2'-fluoroadenosine-3'-phosphate
  modified_base 8: mod_base = OTHER; note = 2'-O-methylguanosine-3'-phosphate
  modified_base 9: mod_base = OTHER; note = 2'-fluoroadenosine-3'-phosphate
  modified_base 10: mod_base = OTHER; note = 2'-fluorouridine-3'-phosphate
  modified_base 11: mod_base = OTHER; note = 2'-fluorouridine-3'-phosphate
  modified_base 12: mod_base = OTHER; note = 2'-O-methylguanosine-3'-phosphate
  modified_base 13: mod_base = OTHER; note = 2'-O-methyladenosine-3'-phosphate
  modified_base 14: mod_base = OTHER; note = 2'-O-methylcytidine-3'-phosphate
  modified_base 15: mod_base = OTHER; note = 2'-O-methyladenosine-3'-phosphate
  modified_base 16: mod_base = OTHER; note = 2'-O-methylguanosine-3'-phosphate
  modified_base 17: mod_base = OTHER; note = 2'-O-methylguanosine-3'-phosphate
  modified_base 18: mod_base = OTHER; note = 2'-O-methyluridine-3'-phosphate
  modified_base 19: mod_base = OTHER; note = 2'-O-methyluridine-3'-phosphate
  modified_base 20: mod_base = OTHER; note = 2'-O-methylcytidine-3'-phosphate
  modified_base 21: mod_base = OTHER; note = 2'-O-methyluridine-3'-phosphate N-[tris(GalNAc-alkyl)-amidodecanoyl)]-4-hydroxyprolinol (Hyp-(GalNAc-alkyl)3)
ctgagaagattgacaggttct

SEQ ID NO: 3173 - RNA, 21 nt, synthetic construct
  source 1..21: mol_type = other RNA
  modified_base 1: mod_base = OTHER; note = 2'-O-methylguanosine-3'-phosphorothioate
  modified_base 2: mod_base = OTHER; note = 2'-O-methyladenosine-3'-phosphorothioate
  modified_base 3: mod_base = OTHER; note = 2'-O-methylguanosine-3'-phosphate
  modified_base 4: mod_base = OTHER; note = 2'-O-methyladenosine-3'-phosphate
  modified_base 5: mod_base = OTHER; note = 2'-O-methyladenosine-3'-phosphate
  modified_base 6: mod_base = OTHER; note = 2'-O-methylguanosine-3'-phosphate
  modified_base 7: mod_base = OTHER; note = 2'-fluoroadenosine-3'-phosphate
  modified_base 8: mod_base = OTHER; note = 2'-O-methyluridine-3'-phosphate
  modified_base 9: mod_base = OTHER; note = 2'-fluorouridine-3'-phosphate
  modified_base 10: mod_base = OTHER; note = 2'-fluoroguanosine-3'-phosphate
  modified_base 11: mod_base = OTHER; note = 2'-fluoroadenosine-3'-phosphate
  modified_base 12: mod_base = OTHER; note = 2'-O-methylcytidine-3'-phosphate
  modified_base 13: mod_base = OTHER; note = 2'-O-methyladenosine-3'-phosphate
  modified_base 14: mod_base = OTHER; note = 2'-O-methylguanosine-3'-phosphate
  modified_base 15: mod_base = OTHER; note = 2'-O-methylguanosine-3'-phosphate
  modified_base 16: mod_base = OTHER; note = 2'-O-methyluridine-3'-phosphate
  modified_base 17: mod_base = OTHER; note = 2'-O-methyluridine-3'-phosphate
  modified_base 18: mod_base = OTHER; note = 2'-O-methylcytidine-3'-phosphate
  modified_base 19: mod_base = OTHER; note = 2'-O-methyladenosine-3'-phosphate
  modified_base 20: mod_base = OTHER; note = 2'-O-methyluridine-3'-phosphate
  modified_base 21: mod_base = OTHER; note = 2'-O-methyluridine-3'-phosphate N-[tris(GalNAc-alkyl)-amidodecanoyl)]-4-hydroxyprolinol (Hyp-(GalNAc-alkyl)3)
gagaagattgacaggttcatt

SEQ ID NO: 3174 - RNA, 21 nt, synthetic construct
  source 1..21: mol_type = other RNA
  modified_base 1: mod_base = OTHER; note = 2'-O-methyladenosine-3'-phosphorothioate
  modified_base 2: mod_base = OTHER; note = 2'-O-methylguanosine-3'-phosphorothioate
  modified_base 3: mod_base = OTHER; note = 2'-O-methyladenosine-3'-phosphate
  modified_base 4: mod_base = OTHER; note = 2'-O-methyladenosine-3'-phosphate
  modified_base 5: mod_base = OTHER; note = 2'-O-methylguanosine-3'-phosphate
  modified_base 6: mod_base = OTHER; note = 2'-O-methyladenosine-3'-phosphate
  modified_base 7: mod_base = OTHER; note = 2'-fluorouridine-3'-phosphate
  modified_base 8: mod_base = OTHER; note = 2'-O-methyluridine-3'-phosphate
  modified_base 9: mod_base = OTHER; note = 2'-fluoroguanosine-3'-phosphate
  modified_base 10: mod_base = OTHER; note = 2'-fluoroadenosine-3'-phosphate
  modified_base 11: mod_base = OTHER; note = 2'-fluorocytidine-3'-phosphate
  modified_base 12: mod_base = OTHER; note = 2'-O-methyladenosine-3'-phosphate
  modified_base 13: mod_base = OTHER; note = 2'-O-methylguanosine-3'-phosphate
  modified_base 14: mod_base = OTHER; note = 2'-O-methylguanosine-3'-phosphate
  modified_base 15: mod_base = OTHER; note = 2'-O-methyluridine-3'-phosphate
  modified_base 16: mod_base = OTHER; note = 2'-O-methyluridine-3'-phosphate
  modified_base 17: mod_base = OTHER; note = 2'-O-methylcytidine-3'-phosphate
  modified_base 18: mod_base = OTHER; note = 2'-O-methyladenosine-3'-phosphate
  modified_base 19: mod_base = OTHER; note = 2'-O-methyluridine-3'-phosphate
  modified_base 20: mod_base = OTHER; note = 2'-O-methylguanosine-3'-phosphate
  modified_base 21: mod_base = OTHER; note = 2'-O-methyluridine-3'-phosphate N-[tris(GalNAc-alkyl)-amidodecanoyl)]-4-hydroxyprolinol (Hyp-(GalNAc-alkyl)3)
agaagattgacaggttcatgt

SEQ ID NO: 3175 - RNA, 21 nt, synthetic construct
  source 1..21: mol_type = other RNA
  modified_base 1: mod_base = OTHER; note = 2'-O-methylguanosine-3'-phosphorothioate
  modified_base 2: mod_base = OTHER; note = 2'-O-methyladenosine-3'-phosphorothioate
  modified_base 3: mod_base = OTHER; note = 2'-O-methyladenosine-3'-phosphate
  modified_base 4: mod_base = OTHER; note = 2'-O-methylguanosine-3'-phosphate
  modified_base 5: mod_base = OTHER; note = 2'-O-methyladenosine-3'-phosphate
  modified_base 6: mod_base = OTHER; note = 2'-O-methyluridine-3'-phosphate
  modified_base 7: mod_base = OTHER; note = 2'-fluorouridine-3'-phosphate
  modified_base 8: mod_base = OTHER; note = 2'-O-methylguanosine-3'-phosphate
  modified_base 9: mod_base = OTHER; note = 2'-fluoroadenosine-3'-phosphate
  modified_base 10: mod_base = OTHER; note = 2'-fluorocytidine-3'-phosphate
  modified_base 11: mod_base = OTHER; note = 2'-fluoroadenosine-3'-phosphate
  modified_base 12: mod_base = OTHER; note = 2'-O-methylguanosine-3'-phosphate
  modified_base 13: mod_base = OTHER; note = 2'-O-methylguanosine-3'-phosphate
  modified_base 14: mod_base = OTHER; note = 2'-O-methyluridine-3'-phosphate
  modified_base 15: mod_base = OTHER; note = 2'-O-methyluridine-3'-phosphate
  modified_base 16: mod_base = OTHER; note = 2'-O-methylcytidine-3'-phosphate
  modified_base 17: mod_base = OTHER; note = 2'-O-methyladenosine-3'-phosphate
  modified_base 18: mod_base = OTHER; note = 2'-O-methyluridine-3'-phosphate
  modified_base 19: mod_base = OTHER; note = 2'-O-methylguanosine-3'-phosphate
  modified_base 20: mod_base = OTHER; note = 2'-O-methylcytidine-3'-phosphate
  modified_base 21: mod_base = OTHER; note = 2'-O-methyluridine-3'-phosphate N-[tris(GalNAc-alkyl)-amidodecanoyl)]-4-hydroxyprolinol (Hyp-(GalNAc-alkyl)3)
gaagattgacaggttcatgct

SEQ ID NO: 3176 - RNA, 21 nt, synthetic construct
  source 1..21: mol_type = other RNA
  modified_base 1: mod_base = OTHER; note = 2'-O-methyladenosine-3'-phosphorothioate
  modified_base 2: mod_base = OTHER; note = 2'-O-methyladenosine-3'-phosphorothioate
  modified_base 3: mod_base = OTHER; note = 2'-O-methylguanosine-3'-phosphate
  modified_base 4: mod_base = OTHER; note = 2'-O-methyladenosine-3'-phosphate
  modified_base 5: mod_base = OTHER; note = 2'-O-methyluridine-3'-phosphate
  modified_base 6: mod_base = OTHER; note = 2'-O-methyluridine-3'-phosphate
  modified_base 7: mod_base = OTHER; note = 2'-fluoroguanosine-3'-phosphate
  modified_base 8: mod_base = OTHER; note = 2'-O-methyladenosine-3'-phosphate
  modified_base 9: mod_base = OTHER; note = 2'-fluorocytidine-3'-phosphate
  modified_base 10: mod_base = OTHER; note = 2'-fluoroadenosine-3'-phosphate
  modified_base 11: mod_base = OTHER; note = 2'-fluoroguanosine-3'-phosphate
  modified_base 12: mod_base = OTHER; note = 2'-O-methylguanosine-3'-phosphate
  modified_base 13: mod_base = OTHER; note = 2'-O-methyluridine-3'-phosphate
  modified_base 14: mod_base = OTHER; note = 2'-O-methyluridine-3'-phosphate
  modified_base 15: mod_base = OTHER; note = 2'-O-methylcytidine-3'-phosphate
  modified_base 16: mod_base = OTHER; note = 2'-O-methyladenosine-3'-phosphate
  modified_base 17: mod_base = OTHER; note = 2'-O-methyluridine-3'-phosphate
  modified_base 18: mod_base = OTHER; note = 2'-O-methylguanosine-3'-phosphate
  modified_base 19: mod_base = OTHER; note = 2'-O-methylcytidine-3'-phosphate
  modified_base 20: mod_base = OTHER; note = 2'-O-methyladenosine-3'-phosphate
  modified_base 21: mod_base = OTHER; note = 2'-O-methyluridine-3'-phosphate N-[tris(GalNAc-alkyl)-amidodecanoyl)]-4-hydroxyprolinol (Hyp-(GalNAc-alkyl)3)
aagattgacaggttcatgcat

SEQ ID NO: 3177 - RNA, 21 nt, synthetic construct
  source 1..21: mol_type = other RNA
  modified_base 1: mod_base = OTHER; note = 2'-O-methyladenosine-3'-phosphorothioate
  modified_base 2: mod_base = OTHER; note = 2'-O-methylguanosine-3'-phosphorothioate
  modified_base 3: mod_base = OTHER; note = 2'-O-methyladenosine-3'-phosphate
  modified_base 4: mod_base = OTHER; note = 2'-O-methyluridine-3'-phosphate
  modified_base 5: mod_base = OTHER; note = 2'-O-methyluridine-3'-phosphate
  modified_base 6: mod_base = OTHER; note = 2'-O-methylguanosine-3'-phosphate
  modified_base 7: mod_base = OTHER; note = 2'-fluoroadenosine-3'-phosphate
  modified_base 8: mod_base = OTHER; note = 2'-O-methylcytidine-3'-phosphate
  modified_base 9: mod_base = OTHER; note = 2'-fluoroadenosine-3'-phosphate
  modified_base 10: mod_base = OTHER; note = 2'-fluoroguanosine-3'-phosphate
  modified_base 11: mod_base = OTHER; note = 2'-fluoroguanosine-3'-phosphate
  modified_base 12: mod_base = OTHER; note = 2'-O-methyluridine-3'-phosphate
  modified_base 13: mod_base = OTHER; note = 2'-O-methyluridine-3'-phosphate
  modified_base 14: mod_base = OTHER; note = 2'-O-methylcytidine-3'-phosphate
  modified_base 15: mod_base = OTHER; note = 2'-O-methyladenosine-3'-phosphate
  modified_base 16: mod_base = OTHER; note = 2'-O-methyluridine-3'-phosphate
  modified_base 17: mod_base = OTHER; note = 2'-O-methylguanosine-3'-phosphate
  modified_base 18: mod_base = OTHER; note = 2'-O-methylcytidine-3'-phosphate
  modified_base 19: mod_base = OTHER; note = 2'-O-methyladenosine-3'-phosphate
  modified_base 20: mod_base = OTHER; note = 2'-O-methylguanosine-3'-phosphate
  modified_base 21: mod_base = OTHER; note = 2'-O-methyluridine-3'-phosphate N-[tris(GalNAc-alkyl)-amidodecanoyl)]-4-hydroxyprolinol (Hyp-(GalNAc-alkyl)3)
agattgacaggttcatgcagt

SEQ ID NO: 3178 - RNA, 21 nt, synthetic construct
  source 1..21: mol_type = other RNA
  modified_base 1: mod_base = OTHER; note = 2'-O-methylguanosine-3'-phosphorothioate
  modified_base 2: mod_base = OTHER; note = 2'-O-methyladenosine-3'-phosphorothioate
  modified_base 3: mod_base = OTHER; note = 2'-O-methyluridine-3'-phosphate
  modified_base 4: mod_base = OTHER; note = 2'-O-methyluridine-3'-phosphate
  modified_base 5: mod_base = OTHER; note = 2'-O-methylguanosine-3'-phosphate
  modified_base 6: mod_base = OTHER; note = 2'-O-methyladenosine-3'-phosphate
  modified_base 7: mod_base = OTHER; note = 2'-fluorocytidine-3'-phosphate
  modified_base 8: mod_base = OTHER; note = 2'-O-methyladenosine-3'-phosphate
  modified_base 9: mod_base = OTHER; note = 2'-fluoroguanosine-3'-phosphate
  modified_base 10: mod_base = OTHER; note = 2'-fluoroguanosine-3'-phosphate
  modified_base 11: mod_base = OTHER; note = 2'-fluorouridine-3'-phosphate
  modified_base 12: mod_base = OTHER; note = 2'-O-methyluridine-3'-phosphate
  modified_base 13: mod_base = OTHER; note = 2'-O-methylcytidine-3'-phosphate
  modified_base 14: mod_base = OTHER; note = 2'-O-methyladenosine-3'-phosphate
  modified_base 15: mod_base = OTHER; note = 2'-O-methyluridine-3'-phosphate
  modified_base 16: mod_base = OTHER; note = 2'-O-methylguanosine-3'-phosphate
  modified_base 17: mod_base = OTHER; note = 2'-O-methylcytidine-3'-phosphate
  modified_base 18: mod_base = OTHER; note = 2'-O-methyladenosine-3'-phosphate
  modified_base 19: mod_base = OTHER; note = 2'-O-methylguanosine-3'-phosphate
  modified_base 20: mod_base = OTHER; note = 2'-O-methylguanosine-3'-phosphate
  modified_base 21: mod_base = OTHER; note = 2'-O-methyluridine-3'-phosphate N-[tris(GalNAc-alkyl)-amidodecanoyl)]-4-hydroxyprolinol (Hyp-(GalNAc-alkyl)3)
gattgacaggttcatgcaggt

SEQ ID NO: 3179 - RNA, 21 nt, synthetic construct
  source 1..21: mol_type = other RNA
  modified_base 1: mod_base = OTHER; note = 2'-O-methyladenosine-3'-phosphorothioate
  modified_base 2: mod_base = OTHER; note = 2'-O-methyluridine-3'-phosphorothioate
  modified_base 3: mod_base = OTHER; note = 2'-O-methyluridine-3'-phosphate
  modified_base 4: mod_base = OTHER; note = 2'-O-methylguanosine-3'-phosphate
  modified_base 5: mod_base = OTHER; note = 2'-O-methyladenosine-3'-phosphate
  modified_base 6: mod_base = OTHER; note = 2'-O-methylcytidine-3'-phosphate
  modified_base 7: mod_base = OTHER; note = 2'-fluoroadenosine-3'-phosphate
  modified_base 8: mod_base = OTHER; note = 2'-O-methylguanosine-3'-phosphate
  modified_base 9: mod_base = OTHER; note = 2'-fluoroguanosine-3'-phosphate
  modified_base 10: mod_base = OTHER; note = 2'-fluorouridine-3'-phosphate
  modified_base 11: mod_base = OTHER; note = 2'-fluorouridine-3'-phosphate
  modified_base 12: mod_base = OTHER; note = 2'-O-methylcytidine-3'-phosphate
  modified_base 13: mod_base = OTHER; note = 2'-O-methyladenosine-3'-phosphate
  modified_base 14: mod_base = OTHER; note = 2'-O-methyluridine-3'-phosphate
  modified_base 15: mod_base = OTHER; note = 2'-O-methylguanosine-3'-phosphate
  modified_base 16: mod_base = OTHER; note = 2'-O-methylcytidine-3'-phosphate
  modified_base 17: mod_base = OTHER; note = 2'-O-methyladenosine-3'-phosphate
  modified_base 18: mod_base = OTHER; note = 2'-O-methylguanosine-3'-phosphate
  modified_base 19: mod_base = OTHER; note = 2'-O-methylguanosine-3'-phosphate
  modified_base 20: mod_base = OTHER; note = 2'-O-methylcytidine-3'-phosphate
  modified_base 21: mod_base = OTHER; note = 2'-O-methyluridine-3'-phosphate N-[tris(GalNAc-alkyl)-amidodecanoyl)]-4-hydroxyprolinol (Hyp-(GalNAc-alkyl)3)
attgacaggttcatgcaggct

SEQ ID NO: 3180 - RNA, 21 nt, synthetic construct
  source 1..21: mol_type = other RNA
  modified_base 1: mod_base = OTHER; note = 2'-O-methyluridine-3'-phosphorothioate
  modified_base 2: mod_base = OTHER; note = 2'-O-methyluridine-3'-phosphorothioate
  modified_base 3: mod_base = OTHER; note = 2'-O-methylguanosine-3'-phosphate
  modified_base 4: mod_base = OTHER; note = 2'-O-methyladenosine-3'-phosphate
  modified_base 5: mod_base = OTHER; note = 2'-O-methylcytidine-3'-phosphate
  modified_base 6: mod_base = OTHER; note = 2'-O-methyladenosine-3'-phosphate
  modified_base 7: mod_base = OTHER; note = 2'-fluoroguanosine-3'-phosphate
  modified_base 8: mod_base = OTHER; note = 2'-O-methylguanosine-3'-phosphate
  modified_base 9: mod_base = OTHER; note = 2'-fluorouridine-3'-phosphate
  modified_base 10: mod_base = OTHER; note = 2'-fluorouridine-3'-phosphate
  modified_base 11: mod_base = OTHER; note = 2'-fluorocytidine-3'-phosphate
  modified_base 12: mod_base = OTHER; note = 2'-O-methyladenosine-3'-phosphate
  modified_base 13: mod_base = OTHER; note = 2'-O-methyluridine-3'-phosphate
  modified_base 14: mod_base = OTHER; note = 2'-O-methylguanosine-3'-phosphate
  modified_base 15: mod_base = OTHER; note = 2'-O-methylcytidine-3'-phosphate
  modified_base 16: mod_base = OTHER; note = 2'-O-methyladenosine-3'-phosphate
  modified_base 17: mod_base = OTHER; note = 2'-O-methylguanosine-3'-phosphate
  modified_base 18: mod_base = OTHER; note = 2'-O-methylguanosine-3'-phosphate
  modified_base 19: mod_base = OTHER; note = 2'-O-methylcytidine-3'-phosphate
  modified_base 20: mod_base = OTHER; note = 2'-O-methyluridine-3'-phosphate
  modified_base 21: mod_base = OTHER; note = 2'-O-methyluridine-3'-phosphate N-[tris(GalNAc-alkyl)-amidodecanoyl)]-4-hydroxyprolinol (Hyp-(GalNAc-alkyl)3)
ttgacaggttcatgcaggctt

SEQ ID NO: 3181 - RNA, 21 nt, synthetic construct
  source 1..21: mol_type = other RNA
  modified_base 1: mod_base = OTHER; note = 2'-O-methyluridine-3'-phosphorothioate
  modified_base 2: mod_base = OTHER; note = 2'-O-methylguanosine-3'-phosphorothioate
  modified_base 3: mod_base = OTHER; note = 2'-O-methyladenosine-3'-phosphate
  modified_base 4: mod_base = OTHER; note = 2'-O-methylcytidine-3'-phosphate
  modified_base 5: mod_base = OTHER; note = 2'-O-methyladenosine-3'-phosphate
  modified_base 6: mod_base = OTHER; note = 2'-O-methylguanosine-3'-phosphate
  modified_base 7: mod_base = OTHER; note = 2'-fluoroguanosine-3'-phosphate
  modified_base 8: mod_base = OTHER; note = 2'-O-methyluridine-3'-phosphate
  modified_base 9: mod_base = OTHER; note = 2'-fluorouridine-3'-phosphate
  modified_base 10: mod_base = OTHER; note = 2'-fluorocytidine-3'-phosphate
  modified_base 11: mod_base = OTHER; note = 2'-fluoroadenosine-3'-phosphate
  modified_base 12: mod_base = OTHER; note = 2'-O-methyluridine-3'-phosphate
  modified_base 13: mod_base = OTHER; note = 2'-O-methylguanosine-3'-phosphate
  modified_base 14: mod_base = OTHER; note = 2'-O-methylcytidine-3'-phosphate
  modified_base 15: mod_base = OTHER; note = 2'-O-methyladenosine-3'-phosphate
  modified_base 16: mod_base = OTHER; note = 2'-O-methylguanosine-3'-phosphate
  modified_base 17: mod_base = OTHER; note = 2'-O-methylguanosine-3'-phosphate
  modified_base 18: mod_base = OTHER; note = 2'-O-methylcytidine-3'-phosphate
  modified_base 19: mod_base = OTHER; note = 2'-O-methyluridine-3'-phosphate
  modified_base 20: mod_base = OTHER; note = 2'-O-methylguanosine-3'-phosphate
  modified_base 21: mod_base = OTHER; note = 2'-O-methyluridine-3'-phosphate N-[tris(GalNAc-alkyl)-amidodecanoyl)]-4-hydroxyprolinol (Hyp-(GalNAc-alkyl)3)
tgacaggttcatgcaggctgt

SEQ ID NO: 3182 - RNA, 21 nt, synthetic construct
  source 1..21: mol_type = other RNA
  modified_base 1: mod_base = OTHER; note = 2'-O-methylguanosine-3'-phosphorothioate
  modified_base 2: mod_base = OTHER; note = 2'-O-methyladenosine-3'-phosphorothioate
  modified_base 3: mod_base = OTHER; note = 2'-O-methylcytidine-3'-phosphate
  modified_base 4: mod_base = OTHER; note = 2'-O-methyladenosine-3'-phosphate
  modified_base 5: mod_base = OTHER; note = 2'-O-methylguanosine-3'-phosphate
  modified_base 6: mod_base = OTHER; note = 2'-O-methylguanosine-3'-phosphate
  modified_base 7: mod_base = OTHER; note = 2'-fluorouridine-3'-phosphate
  modified_base 8: mod_base = OTHER; note = 2'-O-methyluridine-3'-phosphate
  modified_base 9: mod_base = OTHER; note = 2'-fluorocytidine-3'-phosphate
  modified_base 10: mod_base = OTHER; note = 2'-fluoroadenosine-3'-phosphate
  modified_base 11: mod_base = OTHER; note = 2'-fluorouridine-3'-phosphate
  modified_base 12: mod_base = OTHER; note = 2'-O-methylguanosine-3'-phosphate
  modified_base 13: mod_base = OTHER; note = 2'-O-methylcytidine-3'-phosphate
  modified_base 14: mod_base = OTHER; note = 2'-O-methyladenosine-3'-phosphate
  modified_base 15: mod_base = OTHER; note = 2'-O-methylguanosine-3'-phosphate
  modified_base 16: mod_base = OTHER; note = 2'-O-methylguanosine-3'-phosphate
  modified_base 17: mod_base = OTHER; note = 2'-O-methylcytidine-3'-phosphate
  modified_base 18: mod_base = OTHER; note = 2'-O-methyluridine-3'-phosphate
  modified_base 19: mod_base = OTHER; note = 2'-O-methylguanosine-3'-phosphate
  modified_base 20: mod_base = OTHER; note = 2'-O-methyluridine-3'-phosphate
  modified_base 21: mod_base = OTHER; note = 2'-O-methyluridine-3'-phosphate N-[tris(GalNAc-alkyl)-amidodecanoyl)]-4-hydroxyprolinol (Hyp-(GalNAc-alkyl)3)
gacaggttcatgcaggctgtt

SEQ ID NO: 3183 - RNA, 21 nt, synthetic construct
  source 1..21: mol_type = other RNA
  modified_base 1: mod_base = OTHER; note = 2'-O-methylcytidine-3'-phosphorothioate
  modified_base 2: mod_base = OTHER; note = 2'-O-methyladenosine-3'-phosphorothioate
  modified_base 3: mod_base = OTHER; note = 2'-O-methylguanosine-3'-phosphate
  modified_base 4: mod_base = OTHER; note = 2'-O-methylguanosine-3'-phosphate
  modified_base 5: mod_base = OTHER; note = 2'-O-methylcytidine-3'-phosphate
  modified_base 6: mod_base = OTHER; note = 2'-O-methyluridine-3'-phosphate
  modified_base 7: mod_base = OTHER; note = 2'-fluoroguanosine-3'-phosphate
  modified_base 8: mod_base = OTHER; note = 2'-O-methyluridine-3'-phosphate
  modified_base 9: mod_base = OTHER; note = 2'-fluoroguanosine-3'-phosphate
  modified_base 10: mod_base = OTHER; note = 2'-fluoroadenosine-3'-phosphate
  modified_base 11: mod_base = OTHER; note = 2'-fluorocytidine-3'-phosphate
  modified_base 12: mod_base = OTHER; note = 2'-O-methyladenosine-3'-phosphate
  modified_base 13: mod_base = OTHER; note = 2'-O-methylguanosine-3'-phosphate
  modified_base 14: mod_base = OTHER; note = 2'-O-methylguanosine-3'-phosphate
  modified_base 15: mod_base = OTHER; note = 2'-O-methyladenosine-3'-phosphate
  modified_base 16: mod_base = OTHER; note = 2'-O-methyluridine-3'-phosphate
  modified_base 17: mod_base = OTHER; note = 2'-O-methylguanosine-3'-phosphate
  modified_base 18: mod_base = OTHER; note = 2'-O-methylguanosine-3'-phosphate
  modified_base 19: mod_base = OTHER; note = 2'-O-methyladenosine-3'-phosphate
  modified_base 20: mod_base = OTHER; note = 2'-O-methyladenosine-3'-phosphate
  modified_base 21: mod_base = OTHER; note = 2'-O-methyluridine-3'-phosphate N-[tris(GalNAc-alkyl)-amidodecanoyl)]-4-hydroxyprolinol (Hyp-(GalNAc-alkyl)3)
caggctgtgacaggatggaat

SEQ ID NO: 3184 - RNA, 21 nt, synthetic construct
  source 1..21: mol_type = other RNA
  modified_base 1: mod_base = OTHER; note = 2'-O-methylguanosine-3'-phosphorothioate
  modified_base 2: mod_base = OTHER; note = 2'-O-methyladenosine-3'-phosphorothioate
  modified_base 3: mod_base = OTHER; note = 2'-O-methylguanosine-3'-phosphate
  modified_base 4: mod_base = OTHER; note = 2'-O-methyluridine-3'-phosphate
  modified_base 5: mod_base = OTHER; note = 2'-O-methyluridine-3'-phosphate
  modified_base 6: mod_base = OTHER; note = 2'-O-methylcytidine-3'-phosphate
  modified_base 7: mod_base = OTHER; note = 2'-fluorouridine-3'-phosphate
  modified_base 8: mod_base = OTHER; note = 2'-O-methylguanosine-3'-phosphate
  modified_base 9: mod_base = OTHER; note = 2'-fluoroguanosine-3'-phosphate
  modified_base 10: mod_base = OTHER; note = 2'-fluoroguanosine-3'-phosphate
  modified_base 11: mod_base = OTHER; note = 2'-fluorouridine-3'-phosphate
  modified_base 12: mod_base = OTHER; note = 2'-O-methylguanosine-3'-phosphate
  modified_base 13: mod_base = OTHER; note = 2'-O-methylguanosine-3'-phosphate
  modified_base 14: mod_base = OTHER; note = 2'-O-methyladenosine-3'-phosphate
  modified_base 15: mod_base = OTHER; note = 2'-O-methylcytidine-3'-phosphate
  modified_base 16: mod_base = OTHER; note = 2'-O-methyladenosine-3'-phosphate
  modified_base 17: mod_base = OTHER; note = 2'-O-methyladenosine-3'-phosphate
  modified_base 18: mod_base = OTHER; note = 2'-O-methylcytidine-3'-phosphate
  modified_base 19: mod_base = OTHER; note = 2'-O-methyladenosine-3'-phosphate
  modified_base 20: mod_base = OTHER; note = 2'-O-methylguanosine-3'-phosphate
  modified_base 21: mod_base = OTHER; note = 2'-O-methyluridine-3'-phosphate N-[tris(GalNAc-alkyl)-amidodecanoyl)]-4-hydroxyprolinol (Hyp-(GalNAc-alkyl)3)
gagttctgggtggacaacagt

SEQ ID NO: 3185 - RNA, 21 nt, synthetic construct
  source 1..21: mol_type = other RNA
  modified_base 1: mod_base = OTHER; note = 2'-O-methyladenosine-3'-phosphorothioate
  modified_base 2: mod_base = OTHER; note = 2'-O-methylcytidine-3'-phosphorothioate
  modified_base 3: mod_base = OTHER; note = 2'-O-methyladenosine-3'-phosphate
  modified_base 4: mod_base = OTHER; note = 2'-O-methyladenosine-3'-phosphate
  modified_base 5: mod_base = OTHER; note = 2'-O-methylcytidine-3'-phosphate
  modified_base 6: mod_base = OTHER; note = 2'-O-methyladenosine-3'-phosphate
  modified_base 7: mod_base = OTHER; note = 2'-fluoroguanosine-3'-phosphate
  modified_base 8: mod_base = OTHER; note = 2'-O-methylcytidine-3'-phosphate
  modified_base 9: mod_base = OTHER; note = 2'-fluoroadenosine-3'-phosphate
  modified_base 10: mod_base = OTHER; note = 2'-fluorocytidine-3'-phosphate
  modified_base 11: mod_base = OTHER; note = 2'-fluorocytidine-3'-phosphate
  modified_base 12: mod_base = OTHER; note = 2'-O-methyluridine-3'-phosphate
  modified_base 13: mod_base = OTHER; note = 2'-O-methylcytidine-3'-phosphate
  modified_base 14: mod_base = OTHER; note = 2'-O-methyladenosine-3'-phosphate
  modified_base 15: mod_base = OTHER; note = 2'-O-methylguanosine-3'-phosphate
  modified_base 16: mod_base = OTHER; note = 2'-O-methyluridine-3'-phosphate
  modified_base 17: mod_base = OTHER; note = 2'-O-methylguanosine-3'-phosphate
  modified_base 18: mod_base = OTHER; note = 2'-O-methyluridine-3'-phosphate
  modified_base 19: mod_base = OTHER; note = 2'-O-methylcytidine-3'-phosphate
  modified_base 20: mod_base = OTHER; note = 2'-O-methyluridine-3'-phosphate
  modified_base 21: mod_base = OTHER; note = 2'-O-methyluridine-3'-phosphate N-[tris(GalNAc-alkyl)-amidodecanoyl)]-4-hydroxyprolinol (Hyp-(GalNAc-alkyl)3)
acaacagcacctcagtgtctt

SEQ ID NO: 3186 - RNA, 21 nt, synthetic construct
  source 1..21: mol_type = other RNA
  modified_base 1: mod_base = OTHER; note = 2'-O-methyladenosine-3'-phosphorothioate
  modified_base 2: mod_base = OTHER; note = 2'-O-methyladenosine-3'-phosphorothioate
  modified_base 3: mod_base = OTHER; note = 2'-O-methylcytidine-3'-phosphate
  modified_base 4: mod_base = OTHER; note = 2'-O-methyladenosine-3'-phosphate
  modified_base 5: mod_base = OTHER; note = 2'-O-methylguanosine-3'-phosphate
  modified_base 6: mod_base = OTHER; note = 2'-O-methylcytidine-3'-phosphate
  modified_base 7: mod_base = OTHER; note = 2'-fluoroadenosine-3'-phosphate
  modified_base 8: mod_base = OTHER; note = 2'-O-methylcytidine-3'-phosphate
  modified_base 9: mod_base = OTHER; note = 2'-fluorocytidine-3'-phosphate
  modified_base 10: mod_base = OTHER; note = 2'-fluorouridine-3'-phosphate
  modified_base 11: mod_base = OTHER; note = 2'-fluorocytidine-3'-phosphate
  modified_base 12: mod_base = OTHER; note = 2'-O-methyladenosine-3'-phosphate
  modified_base 13: mod_base = OTHER; note = 2'-O-methylguanosine-3'-phosphate
  modified_base 14: mod_base = OTHER; note = 2'-O-methyluridine-3'-phosphate
  modified_base 15: mod_base = OTHER; note = 2'-O-methylguanosine-3'-phosphate
  modified_base 16: mod_base = OTHER; note = 2'-O-methyluridine-3'-phosphate
  modified_base 17: mod_base = OTHER; note = 2'-O-methylcytidine-3'-phosphate
  modified_base 18: mod_base = OTHER; note = 2'-O-methyluridine-3'-phosphate
  modified_base 19: mod_base = OTHER; note = 2'-O-methylguanosine-3'-phosphate
  modified_base 20: mod_base = OTHER; note = 2'-O-methyluridine-3'-phosphate
  modified_base 21: mod_base = OTHER; note = 2'-O-methyluridine-3'-phosphate N-[tris(GalNAc-alkyl)-amidodecanoyl)]-4-hydroxyprolinol (Hyp-(GalNAc-alkyl)3)
aacagcacctcagtgtctgtt

SEQ ID NO: 3187 - RNA, 21 nt, synthetic construct
  source 1..21: mol_type = other RNA
  modified_base 1: mod_base = OTHER; note = 2'-O-methyladenosine-3'-phosphorothioate
  modified_base 2: mod_base = OTHER; note = 2'-O-methyluridine-3'-phosphorothioate
  modified_base 3: mod_base = OTHER; note = 2'-O-methylguanosine-3'-phosphate
  modified_base 4: mod_base = OTHER; note = 2'-O-methylcytidine-3'-phosphate
  modified_base 5: mod_base = OTHER; note = 2'-O-methylcytidine-3'-phosphate
  modified_base 6: mod_base = OTHER; note = 2'-O-methyluridine-3'-phosphate
  modified_base 7: mod_base = OTHER; note = 2'-fluorocytidine-3'-phosphate
  modified_base 8: mod_base = OTHER; note = 2'-O-methyluridine-3'-phosphate
  modified_base 9: mod_base = OTHER; note = 2'-fluoroguanosine-3'-phosphate
  modified_base 10: mod_base = OTHER; note = 2'-fluoroadenosine-3'-phosphate
  modified_base 11: mod_base = OTHER; note = 2'-fluorocytidine-3'-phosphate
  modified_base 12: mod_base = OTHER; note = 2'-O-methylcytidine-3'-phosphate
  modified_base 13: mod_base = OTHER; note = 2'-O-methyluridine-3'-phosphate
  modified_base 14: mod_base = OTHER; note = 2'-O-methylguanosine-3'-phosphate
  modified_base 15: mod_base = OTHER; note = 2'-O-methylguanosine-3'-phosphate
  modified_base 16: mod_base = OTHER; note = 2'-O-methyladenosine-3'-phosphate
  modified_base 17: mod_base = OTHER; note = 2'-O-methylcytidine-3'-phosphate
  modified_base 18: mod_base = OTHER; note = 2'-O-methyladenosine-3'-phosphate
  modified_base 19: mod_base = OTHER; note = 2'-O-methyladenosine-3'-phosphate
  modified_base 20: mod_base = OTHER; note = 2'-O-methylguanosine-3'-phosphate
  modified_base 21: mod_base = OTHER; note = 2'-O-methyluridine-3'-phosphate N-[tris(GalNAc-alkyl)-amidodecanoyl)]-4-hydroxyprolinol (Hyp-(GalNAc-alkyl)3)
atgcctctgacctggacaagt

SEQ ID NO: 3188 - RNA, 21 nt, synthetic construct
  source 1..21: mol_type = other RNA
  modified_base 1: mod_base = OTHER; note = 2'-O-methyladenosine-3'-phosphorothioate
  modified_base 2: mod_base = OTHER; note = 2'-O-methyladenosine-3'-phosphorothioate
  modified_base 3: mod_base = OTHER; note = 2'-O-methylguanosine-3'-phosphate
  modified_base 4: mod_base = OTHER; note = 2'-O-methylguanosine-3'-phosphate
  modified_base 5: mod_base = OTHER; note = 2'-O-methyluridine-3'-phosphate
  modified_base 6: mod_base = OTHER; note = 2'-O-methylguanosine-3'-phosphate
  modified_base 7: mod_base = OTHER; note = 2'-fluoroguanosine-3'-phosphate
  modified_base 8: mod_base = OTHER; note = 2'-O-methyladenosine-3'-phosphate
  modified_base 9: mod_base = OTHER; note = 2'-fluoroguanosine-3'-phosphate
  modified_base 10: mod_base = OTHER; note = 2'-fluoroguanosine-3'-phosphate
  modified_base 11: mod_base = OTHER; note = 2'-fluoroguanosine-3'-phosphate
  modified_base 12: mod_base = OTHER; note = 2'-O-methyluridine-3'-phosphate
  modified_base 13: mod_base = OTHER; note = 2'-O-methylcytidine-3'-phosphate
  modified_base 14: mod_base = OTHER; note = 2'-O-methyluridine-3'-phosphate
  modified_base 15: mod_base = OTHER; note = 2'-O-methylcytidine-3'-phosphate
  modified_base 16: mod_base = OTHER; note = 2'-O-methyladenosine-3'-phosphate
  modified_base 17: mod_base = OTHER; note = 2'-O-methylcytidine-3'-phosphate
  modified_base 18: mod_base = OTHER; note = 2'-O-methyluridine-3'-phosphate
  modified_base 19: mod_base = OTHER; note = 2'-O-methyluridine-3'-phosphate
  modified_base 20: mod_base = OTHER; note = 2'-O-methyluridine-3'-phosphate
  modified_base 21: mod_base = OTHER; note = 2'-O-methyluridine-3'-phosphate N-[tris(GalNAc-alkyl)-amidodecanoyl)]-4-hydroxyprolinol (Hyp-(GalNAc-alkyl)3)
aaggtggagggtctcactttt

SEQ ID NO: 3189 - RNA, 21 nt, synthetic construct
  source 1..21: mol_type = other RNA
  modified_base 1: mod_base = OTHER; note = 2'-O-methyladenosine-3'-phosphorothioate
  modified_base 2: mod_base = OTHER; note = 2'-O-methylguanosine-3'-phosphorothioate
  modified_base 3: mod_base = OTHER; note = 2'-O-methylguanosine-3'-phosphate
  modified_base 4: mod_base = OTHER; note = 2'-O-methyluridine-3'-phosphate
  modified_base 5: mod_base = OTHER; note = 2'-O-methylguanosine-3'-phosphate
  modified_base 6: mod_base = OTHER; note = 2'-O-methylguanosine-3'-phosphate
  modified_base 7: mod_base = OTHER; note = 2'-fluoroadenosine-3'-phosphate
  modified_base 8: mod_base = OTHER; note = 2'-O-methylguanosine-3'-phosphate
  modified_base 9: mod_base = OTHER; note = 2'-fluoroguanosine-3'-phosphate
  modified_base 10: mod_base = OTHER; note = 2'-fluoroguanosine-3'-phosphate
  modified_base 11: mod_base = OTHER; note = 2'-fluorouridine-3'-phosphate
  modified_base 12: mod_base = OTHER; note = 2'-O-methylcytidine-3'-phosphate
  modified_base 13: mod_base = OTHER; note = 2'-O-methyluridine-3'-phosphate
  modified_base 14: mod_base = OTHER; note = 2'-O-methylcytidine-3'-phosphate
  modified_base 15: mod_base = OTHER; note = 2'-O-methyladenosine-3'-phosphate
  modified_base 16: mod_base = OTHER; note = 2'-O-methylcytidine-3'-phosphate
  modified_base 17: mod_base = OTHER; note = 2'-O-methyluridine-3'-phosphate
  modified_base 18: mod_base = OTHER; note = 2'-O-methyluridine-3'-phosphate
  modified_base 19: mod_base = OTHER; note = 2'-O-methyluridine-3'-phosphate
  modified_base 20: mod_base = OTHER; note = 2'-O-methylcytidine-3'-phosphate
  modified_base 21: mod_base = OTHER; note = 2'-O-methyluridine-3'-phosphate N-[tris(GalNAc-alkyl)-amidodecanoyl)]-4-hydroxyprolinol (Hyp-(GalNAc-alkyl)3)
aggtggagggtctcactttct

SEQ ID NO: 3190 - RNA, 21 nt, synthetic construct
  source 1..21: mol_type = other RNA
  modified_base 1: mod_base = OTHER; note = 2'-O-methylguanosine-3'-phosphorothioate
  modified_base 2: mod_base = OTHER; note = 2'-O-methylguanosine-3'-phosphorothioate
  modified_base 3: mod_base = OTHER; note = 2'-O-methyluridine-3'-phosphate
  modified_base 4: mod_base = OTHER; note = 2'-O-methylguanosine-3'-phosphate
  modified_base 5: mod_base = OTHER; note = 2'-O-methylguanosine-3'-phosphate
  modified_base 6: mod_base = OTHER; note = 2'-O-methyladenosine-3'-phosphate
  modified_base 7: mod_base = OTHER; note = 2'-fluoroguanosine-3'-phosphate
  modified_base 8: mod_base = OTHER; note = 2'-O-methylguanosine-3'-phosphate
  modified_base 9: mod_base = OTHER; note = 2'-fluoroguanosine-3'-phosphate
  modified_base 10: mod_base = OTHER; note = 2'-fluorouridine-3'-phosphate
  modified_base 11: mod_base = OTHER; note = 2'-fluorocytidine-3'-phosphate
  modified_base 12: mod_base = OTHER; note = 2'-O-methyluridine-3'-phosphate
  modified_base 13: mod_base = OTHER; note = 2'-O-methylcytidine-3'-phosphate
  modified_base 14: mod_base = OTHER; note = 2'-O-methyladenosine-3'-phosphate
  modified_base 15: mod_base = OTHER; note = 2'-O-methylcytidine-3'-phosphate
  modified_base 16: mod_base = OTHER; note = 2'-O-methyluridine-3'-phosphate
  modified_base 17: mod_base = OTHER; note = 2'-O-methyluridine-3'-phosphate
  modified_base 18: mod_base = OTHER; note = 2'-O-methyluridine-3'-phosphate
  modified_base 19: mod_base = OTHER; note = 2'-O-methylcytidine-3'-phosphate
  modified_base 20: mod_base = OTHER; note = 2'-O-methylcytidine-3'-phosphate
  modified_base 21: mod_base = OTHER; note = 2'-O-methyluridine-3'-phosphate N-[tris(GalNAc-alkyl)-amidodecanoyl)]-4-hydroxyprolinol (Hyp-(GalNAc-alkyl)3)
ggtggagggtctcactttcct

SEQ ID NO: 3191 - RNA, 21 nt, synthetic construct
  source 1..21: mol_type = other RNA
  modified_base 1: mod_base = OTHER; note = 2'-O-methylguanosine-3'-phosphorothioate
  modified_base 2: mod_base = OTHER; note = 2'-O-methyladenosine-3'-phosphorothioate
  modified_base 3: mod_base = OTHER; note = 2'-O-methylguanosine-3'-phosphate
  modified_base 4: mod_base = OTHER; note = 2'-O-methylguanosine-3'-phosphate
  modified_base 5: mod_base = OTHER; note = 2'-O-methylguanosine-3'-phosphate
  modified_base 6: mod_base = OTHER; note = 2'-O-methyluridine-3'-phosphate
  modified_base 7: mod_base = OTHER; note = 2'-fluorocytidine-3'-phosphate
  modified_base 8: mod_base = OTHER; note = 2'-O-methyluridine-3'-phosphate
  modified_base 9: mod_base = OTHER; note = 2'-fluorocytidine-3'-phosphate
  modified_base 10: mod_base = OTHER; note = 2'-fluoroadenosine-3'-phosphate
  modified_base 11: mod_base = OTHER; note = 2'-fluorocytidine-3'-phosphate
  modified_base 12: mod_base = OTHER; note = 2'-O-methyluridine-3'-phosphate
  modified_base 13: mod_base = OTHER; note = 2'-O-methyluridine-3'-phosphate
  modified_base 14: mod_base = OTHER; note = 2'-O-methyluridine-3'-phosphate
  modified_base 15: mod_base = OTHER; note = 2'-O-methylcytidine-3'-phosphate
  modified_base 16: mod_base = OTHER; note = 2'-O-methylcytidine-3'-phosphate
  modified_base 17: mod_base = OTHER; note = 2'-O-methyladenosine-3'-phosphate
  modified_base 18: mod_base = OTHER; note = 2'-O-methylguanosine-3'-phosphate
  modified_base 19: mod_base = OTHER; note = 2'-O-methylcytidine-3'-phosphate
  modified_base 20: mod_base = OTHER; note = 2'-O-methyladenosine-3'-phosphate
  modified_base 21: mod_base = OTHER; note = 2'-O-methyluridine-3'-phosphate N-[tris(GalNAc-alkyl)-amidodecanoyl)]-4-hydroxyprolinol (Hyp-(GalNAc-alkyl)3)
gagggtctcactttccagcat

SEQ ID NO: 3192 - RNA, 21 nt, synthetic construct
  source 1..21: mol_type = other RNA
  modified_base 1: mod_base = OTHER; note = 2'-O-methyladenosine-3'-phosphorothioate
  modified_base 2: mod_base = OTHER; note = 2'-O-methylguanosine-3'-phosphorothioate
  modified_base 3: mod_base = OTHER; note = 2'-O-methylguanosine-3'-phosphate
  modified_base 4: mod_base = OTHER; note = 2'-O-methylguanosine-3'-phosphate
  modified_base 5: mod_base = OTHER; note = 2'-O-methyluridine-3'-phosphate
  modified_base 6: mod_base = OTHER; note = 2'-O-methylcytidine-3'-phosphate
  modified_base 7: mod_base = OTHER; note = 2'-fluorouridine-3'-phosphate
  modified_base 8: mod_base = OTHER; note = 2'-O-methylcytidine-3'-phosphate
  modified_base 9: mod_base = OTHER; note = 2'-fluoroadenosine-3'-phosphate
  modified_base 10: mod_base = OTHER; note = 2'-fluorocytidine-3'-phosphate
  modified_base 11: mod_base = OTHER; note = 2'-fluorouridine-3'-phosphate
  modified_base 12: mod_base = OTHER; note = 2'-O-methyluridine-3'-phosphate
  modified_base 13: mod_base = OTHER; note = 2'-O-methyluridine-3'-phosphate
  modified_base 14: mod_base = OTHER; note = 2'-O-methylcytidine-3'-phosphate
  modified_base 15: mod_base = OTHER; note = 2'-O-methylcytidine-3'-phosphate
  modified_base 16: mod_base = OTHER; note = 2'-O-methyladenosine-3'-phosphate
  modified_base 17: mod_base = OTHER; note = 2'-O-methylguanosine-3'-phosphate
  modified_base 18: mod_base = OTHER; note = 2'-O-methylcytidine-3'-phosphate
  modified_base 19: mod_base = OTHER; note = 2'-O-methyladenosine-3'-phosphate
  modified_base 20: mod_base = OTHER; note = 2'-O-methyladenosine-3'-phosphate
  modified_base 21: mod_base = OTHER; note = 2'-O-methyluridine-3'-phosphate N-[tris(GalNAc-alkyl)-amidodecanoyl)]-4-hydroxyprolinol (Hyp-(GalNAc-alkyl)3)
agggtctcactttccagcaat

SEQ ID NO: 3193 - RNA, 21 nt, synthetic construct
  source 1..21: mol_type = other RNA
  modified_base 1: mod_base = OTHER; note = 2'-O-methylguanosine-3'-phosphorothioate
  modified_base 2: mod_base = OTHER; note = 2'-O-methylguanosine-3'-phosphorothioate
  modified_base 3: mod_base = OTHER; note = 2'-O-methyluridine-3'-phosphate
  modified_base 4: mod_base = OTHER; note = 2'-O-methylcytidine-3'-phosphate
  modified_base 5: mod_base = OTHER; note = 2'-O-methyluridine-3'-phosphate
  modified_base 6: mod_base = OTHER; note = 2'-O-methylcytidine-3'-phosphate
  modified_base 7: mod_base = OTHER; note = 2'-fluoroadenosine-3'-phosphate
  modified_base 8: mod_base = OTHER; note = 2'-O-methylcytidine-3'-phosphate
  modified_base 9: mod_base = OTHER; note = 2'-fluorouridine-3'-phosphate
  modified_base 10: mod_base = OTHER; note = 2'-fluorouridine-3'-phosphate
  modified_base 11: mod_base = OTHER; note = 2'-fluorouridine-3'-phosphate
  modified_base 12: mod_base = OTHER; note = 2'-O-methylcytidine-3'-phosphate
  modified_base 13: mod_base = OTHER; note = 2'-O-methylcytidine-3'-phosphate
  modified_base 14: mod_base = OTHER; note = 2'-O-methyladenosine-3'-phosphate
  modified_base 15: mod_base = OTHER; note = 2'-O-methylguanosine-3'-phosphate
  modified_base 16: mod_base = OTHER; note = 2'-O-methylcytidine-3'-phosphate
  modified_base 17: mod_base = OTHER; note = 2'-O-methyladenosine-3'-phosphate
  modified_base 18: mod_base = OTHER; note = 2'-O-methyladenosine-3'-phosphate
  modified_base 19: mod_base = OTHER; note = 2'-O-methyladenosine-3'-phosphate
  modified_base 20: mod_base = OTHER; note = 2'-O-methyladenosine-3'-phosphate
  modified_base 21: mod_base = OTHER; note = 2'-O-methyluridine-3'-phosphate N-[tris(GalNAc-alkyl)-amidodecanoyl)]-4-hydroxyprolinol (Hyp-(GalNAc-alkyl)3)
ggtctcactttccagcaaaat

SEQ ID NO: 3194 - RNA, 21 nt, synthetic construct
  source 1..21: mol_type = other RNA
  modified_base 1: mod_base = OTHER; note = 2'-O-methylguanosine-3'-phosphorothioate
  modified_base 2: mod_base = OTHER; note = 2'-O-methyluridine-3'-phosphorothioate
  modified_base 3: mod_base = OTHER; note = 2'-O-methylcytidine-3'-phosphate
  modified_base 4: mod_base = OTHER; note = 2'-O-methyluridine-3'-phosphate
  modified_base 5: mod_base = OTHER; note = 2'-O-methylcytidine-3'-phosphate
  modified_base 6: mod_base = OTHER; note = 2'-O-methyladenosine-3'-phosphate
  modified_base 7: mod_base = OTHER; note = 2'-fluorocytidine-3'-phosphate
  modified_base 8: mod_base = OTHER; note = 2'-O-methyluridine-3'-phosphate
  modified_base 9: mod_base = OTHER; note = 2'-fluorouridine-3'-phosphate
  modified_base 10: mod_base = OTHER; note = 2'-fluorouridine-3'-phosphate
  modified_base 11: mod_base = OTHER; note = 2'-fluorocytidine-3'-phosphate
  modified_base 12: mod_base = OTHER; note = 2'-O-methylcytidine-3'-phosphate
  modified_base 13: mod_base = OTHER; note = 2'-O-methyladenosine-3'-phosphate
  modified_base 14: mod_base = OTHER; note = 2'-O-methylguanosine-3'-phosphate
  modified_base 15: mod_base = OTHER; note = 2'-O-methylcytidine-3'-phosphate
  modified_base 16: mod_base = OTHER; note = 2'-O-methyladenosine-3'-phosphate
  modified_base 17: mod_base = OTHER; note = 2'-O-methyladenosine-3'-phosphate
  modified_base 18: mod_base = OTHER; note = 2'-O-methyladenosine-3'-phosphate
  modified_base 19: mod_base = OTHER; note = 2'-O-methyladenosine-3'-phosphate
  modified_base 20: mod_base = OTHER; note = 2'-O-methylcytidine-3'-phosphate
  modified_base 21: mod_base = OTHER; note = 2'-O-methyluridine-3'-phosphate N-[tris(GalNAc-alkyl)-amidodecanoyl)]-4-hydroxyprolinol (Hyp-(GalNAc-alkyl)3)
gtctcactttccagcaaaact

SEQ ID NO: 3195 - RNA, 21 nt, synthetic construct
  source 1..21: mol_type = other RNA
  modified_base 1: mod_base = OTHER; note = 2'-O-methyluridine-3'-phosphorothioate
  modified_base 2: mod_base = OTHER; note = 2'-O-methylcytidine-3'-phosphorothioate
  modified_base 3: mod_base = OTHER; note = 2'-O-methyluridine-3'-phosphate
  modified_base 4: mod_base = OTHER; note = 2'-O-methylcytidine-3'-phosphate
  modified_base 5: mod_base = OTHER; note = 2'-O-methyladenosine-3'-phosphate
  modified_base 6: mod_base = OTHER; note = 2'-O-methylcytidine-3'-phosphate
  modified_base 7: mod_base = OTHER; note = 2'-fluorouridine-3'-phosphate
  modified_base 8: mod_base = OTHER; note = 2'-O-methyluridine-3'-phosphate
  modified_base 9: mod_base = OTHER; note = 2'-fluorouridine-3'-phosphate
  modified_base 10: mod_base = OTHER; note = 2'-fluorocytidine-3'-phosphate
  modified_base 11: mod_base = OTHER; note = 2'-fluorocytidine-3'-phosphate
  modified_base 12: mod_base = OTHER; note = 2'-O-methyladenosine-3'-phosphate
  modified_base 13: mod_base = OTHER; note = 2'-O-methylguanosine-3'-phosphate
  modified_base 14: mod_base = OTHER; note = 2'-O-methylcytidine-3'-phosphate
  modified_base 15: mod_base = OTHER; note = 2'-O-methyladenosine-3'-phosphate
  modified_base 16: mod_base = OTHER; note = 2'-O-methyladenosine-3'-phosphate
  modified_base 17: mod_base = OTHER; note = 2'-O-methyladenosine-3'-phosphate
  modified_base 18: mod_base = OTHER; note = 2'-O-methyladenosine-3'-phosphate
  modified_base 19: mod_base = OTHER; note = 2'-O-methylcytidine-3'-phosphate
  modified_base 20: mod_base = OTHER; note = 2'-O-methyluridine-3'-phosphate
  modified_base 21: mod_base = OTHER; note = 2'-O-methyluridine-3'-phosphate N-[tris(GalNAc-alkyl)-amidodecanoyl)]-4-hydroxyprolinol (Hyp-(GalNAc-alkyl)3)
tctcactttccagcaaaactt

SEQ ID NO: 3196 - RNA, 21 nt, synthetic construct
  source 1..21: mol_type = other RNA
  modified_base 1: mod_base = OTHER; note = 2'-O-methyluridine-3'-phosphorothioate
  modified_base 2: mod_base = OTHER; note = 2'-O-methylcytidine-3'-phosphorothioate
  modified_base 3: mod_base = OTHER; note = 2'-O-methyladenosine-3'-phosphate
  modified_base 4: mod_base = OTHER; note = 2'-O-methylcytidine-3'-phosphate
  modified_base 5: mod_base = OTHER; note = 2'-O-methyluridine-3'-phosphate
  modified_base 6: mod_base = OTHER; note = 2'-O-methyluridine-3'-phosphate
  modified_base 7: mod_base = OTHER; note = 2'-fluorouridine-3'-phosphate
  modified_base 8: mod_base = OTHER; note = 2'-O-methylcytidine-3'-phosphate
  modified_base 9: mod_base = OTHER; note = 2'-fluorocytidine-3'-phosphate
  modified_base 10: mod_base = OTHER; note = 2'-fluoroadenosine-3'-phosphate
  modified_base 11: mod_base = OTHER; note = 2'-fluoroguanosine-3'-phosphate
  modified_base 12: mod_base = OTHER; note = 2'-O-methylcytidine-3'-phosphate
  modified_base 13: mod_base = OTHER; note = 2'-O-methyladenosine-3'-phosphate
  modified_base 14: mod_base = OTHER; note = 2'-O-methyladenosine-3'-phosphate
  modified_base 15: mod_base = OTHER; note = 2'-O-methyladenosine-3'-phosphate
  modified_base 16: mod_base = OTHER; note = 2'-O-methyladenosine-3'-phosphate
  modified_base 17: mod_base = OTHER; note = 2'-O-methylcytidine-3'-phosphate
  modified_base 18: mod_base = OTHER; note = 2'-O-methyluridine-3'-phosphate
  modified_base 19: mod_base = OTHER; note = 2'-O-methylcytidine-3'-phosphate
  modified_base 20: mod_base = OTHER; note = 2'-O-methylcytidine-3'-phosphate
  modified_base 21: mod_base = OTHER; note = 2'-O-methyluridine-3'-phosphate N-[tris(GalNAc-alkyl)-amidodecanoyl)]-4-hydroxyprolinol (Hyp-(GalNAc-alkyl)3)
tcactttccagcaaaactcct

SEQ ID NO: 3197 - RNA, 21 nt, synthetic construct
  source 1..21: mol_type = other RNA
  modified_base 1: mod_base = OTHER; note = 2'-O-methylcytidine-3'-phosphorothioate
  modified_base 2: mod_base = OTHER; note = 2'-O-methyladenosine-3'-phosphorothioate
  modified_base 3: mod_base = OTHER; note = 2'-O-methylcytidine-3'-phosphate
  modified_base 4: mod_base = OTHER; note = 2'-O-methyluridine-3'-phosphate
  modified_base 5: mod_base = OTHER; note = 2'-O-methyluridine-3'-phosphate
  modified_base 6: mod_base = OTHER; note = 2'-O-methyluridine-3'-phosphate
  modified_base 7: mod_base = OTHER; note = 2'-fluorocytidine-3'-phosphate
  modified_base 8: mod_base = OTHER; note = 2'-O-methylcytidine-3'-phosphate
  modified_base 9: mod_base = OTHER; note = 2'-fluoroadenosine-3'-phosphate
  modified_base 10: mod_base = OTHER; note = 2'-fluoroguanosine-3'-phosphate
  modified_base 11: mod_base = OTHER; note = 2'-fluorocytidine-3'-phosphate
  modified_base 12: mod_base = OTHER; note = 2'-O-methyladenosine-3'-phosphate
  modified_base 13: mod_base = OTHER; note = 2'-O-methyladenosine-3'-phosphate
  modified_base 14: mod_base = OTHER; note = 2'-O-methyladenosine-3'-phosphate
  modified_base 15: mod_base = OTHER; note = 2'-O-methyladenosine-3'-phosphate
  modified_base 16: mod_base = OTHER; note = 2'-O-methylcytidine-3'-phosphate
  modified_base 17: mod_base = OTHER; note = 2'-O-methyluridine-3'-phosphate
  modified_base 18: mod_base = OTHER; note = 2'-O-methylcytidine-3'-phosphate
  modified_base 19: mod_base = OTHER; note = 2'-O-methylcytidine-3'-phosphate
  modified_base 20: mod_base = OTHER; note = 2'-O-methylcytidine-3'-phosphate
  modified_base 21: mod_base = OTHER; note = 2'-O-methyluridine-3'-phosphate N-[tris(GalNAc-alkyl)-amidodecanoyl)]-4-hydroxyprolinol (Hyp-(GalNAc-alkyl)3)
cactttccagcaaaactccct

SEQ ID NO: 3198 - RNA, 21 nt, synthetic construct
  source 1..21: mol_type = other RNA
  modified_base 1: mod_base = OTHER; note = 2'-O-methyladenosine-3'-phosphorothioate
  modified_base 2: mod_base = OTHER; note = 2'-O-methylcytidine-3'-phosphorothioate
  modified_base 3: mod_base = OTHER; note = 2'-O-methyluridine-3'-phosphate
  modified_base 4: mod_base = OTHER; note = 2'-O-methyluridine-3'-phosphate
  modified_base 5: mod_base = OTHER; note = 2'-O-methyluridine-3'-phosphate
  modified_base 6: mod_base = OTHER; note = 2'-O-methylcytidine-3'-phosphate
  modified_base 7: mod_base = OTHER; note = 2'-fluorocytidine-3'-phosphate
  modified_base 8: mod_base = OTHER; note = 2'-O-methyladenosine-3'-phosphate
  modified_base 9: mod_base = OTHER; note = 2'-fluoroguanosine-3'-phosphate
  modified_base 10: mod_base = OTHER; note = 2'-fluorocytidine-3'-phosphate
  modified_base 11: mod_base = OTHER; note = 2'-fluoroadenosine-3'-phosphate
  modified_base 12: mod_base = OTHER; note = 2'-O-methyladenosine-3'-phosphate
  modified_base 13: mod_base = OTHER; note = 2'-O-methyladenosine-3'-phosphate
  modified_base 14: mod_base = OTHER; note = 2'-O-methyladenosine-3'-phosphate
  modified_base 15: mod_base = OTHER; note = 2'-O-methylcytidine-3'-phosphate
  modified_base 16: mod_base = OTHER; note = 2'-O-methyluridine-3'-phosphate
  modified_base 17: mod_base = OTHER; note = 2'-O-methylcytidine-3'-phosphate
  modified_base 18: mod_base = OTHER; note = 2'-O-methylcytidine-3'-phosphate
  modified_base 19: mod_base = OTHER; note = 2'-O-methylcytidine-3'-phosphate
  modified_base 20: mod_base = OTHER; note = 2'-O-methyluridine-3'-phosphate
  modified_base 21: mod_base = OTHER; note = 2'-O-methyluridine-3'-phosphate N-[tris(GalNAc-alkyl)-amidodecanoyl)]-4-hydroxyprolinol (Hyp-(GalNAc-alkyl)3)
actttccagcaaaactccctt

SEQ ID NO: 3199 - RNA, 21 nt, synthetic construct
  source 1..21: mol_type = other RNA
  modified_base 1: mod_base = OTHER; note = 2'-O-methylcytidine-3'-phosphorothioate
  modified_base 2: mod_base = OTHER; note = 2'-O-methyluridine-3'-phosphorothioate
  modified_base 3: mod_base = OTHER; note = 2'-O-methyluridine-3'-phosphate
  modified_base 4: mod_base = OTHER; note = 2'-O-methyluridine-3'-phosphate
  modified_base 5: mod_base = OTHER; note = 2'-O-methylcytidine-3'-phosphate
  modified_base 6: mod_base = OTHER; note = 2'-O-methylcytidine-3'-phosphate
  modified_base 7: mod_base = OTHER; note = 2'-fluoroadenosine-3'-phosphate
  modified_base 8: mod_base = OTHER; note = 2'-O-methylguanosine-3'-phosphate
  modified_base 9: mod_base = OTHER; note = 2'-fluorocytidine-3'-phosphate
  modified_base 10: mod_base = OTHER; note = 2'-fluoroadenosine-3'-phosphate
  modified_base 11: mod_base = OTHER; note = 2'-fluoroadenosine-3'-phosphate
  modified_base 12: mod_base = OTHER; note = 2'-O-methyladenosine-3'-phosphate
  modified_base 13: mod_base = OTHER; note = 2'-O-methyladenosine-3'-phosphate
  modified_base 14: mod_base = OTHER; note = 2'-O-methylcytidine-3'-phosphate
  modified_base 15: mod_base = OTHER; note = 2'-O-methyluridine-3'-phosphate
  modified_base 16: mod_base = OTHER; note = 2'-O-methylcytidine-3'-phosphate
  modified_base 17: mod_base = OTHER; note = 2'-O-methylcytidine-3'-phosphate
  modified_base 18: mod_base = OTHER; note = 2'-O-methylcytidine-3'-phosphate
  modified_base 19: mod_base = OTHER; note = 2'-O-methyluridine-3'-phosphate
  modified_base 20: mod_base = OTHER; note = 2'-O-methylcytidine-3'-phosphate
  modified_base 21: mod_base = OTHER; note = 2'-O-methyluridine-3'-phosphate N-[tris(GalNAc-alkyl)-amidodecanoyl)]-4-hydroxyprolinol (Hyp-(GalNAc-alkyl)3)
ctttccagcaaaactccctct

SEQ ID NO: 3200 - RNA, 21 nt, synthetic construct
  source 1..21: mol_type = other RNA
  modified_base 1: mod_base = OTHER; note = 2'-O-methyluridine-3'-phosphorothioate
  modified_base 2: mod_base = OTHER; note = 2'-O-methyluridine-3'-phosphorothioate
  modified_base 3: mod_base = OTHER; note = 2'-O-methyluridine-3'-phosphate
  modified_base 4: mod_base = OTHER; note = 2'-O-methylcytidine-3'-phosphate
  modified_base 5: mod_base = OTHER; note = 2'-O-methylcytidine-3'-phosphate
  modified_base 6: mod_base = OTHER; note = 2'-O-methyladenosine-3'-phosphate
  modified_base 7: mod_base = OTHER; note = 2'-fluoroguanosine-3'-phosphate
  modified_base 8: mod_base = OTHER; note = 2'-O-methylcytidine-3'-phosphate
  modified_base 9: mod_base = OTHER; note = 2'-fluoroadenosine-3'-phosphate
  modified_base 10: mod_base = OTHER; note = 2'-fluoroadenosine-3'-phosphate
  modified_base 11: mod_base = OTHER; note = 2'-fluoroadenosine-3'-phosphate
  modified_base 12: mod_base = OTHER; note = 2'-O-methyladenosine-3'-phosphate
  modified_base 13: mod_base = OTHER; note = 2'-O-methylcytidine-3'-phosphate
  modified_base 14: mod_base = OTHER; note = 2'-O-methyluridine-3'-phosphate
  modified_base 15: mod_base = OTHER; note = 2'-O-methylcytidine-3'-phosphate
  modified_base 16: mod_base = OTHER; note = 2'-O-methylcytidine-3'-phosphate
  modified_base 17: mod_base = OTHER; note = 2'-O-methylcytidine-3'-phosphate
  modified_base 18: mod_base = OTHER; note = 2'-O-methyluridine-3'-phosphate
  modified_base 19: mod_base = OTHER; note = 2'-O-methylcytidine-3'-phosphate
  modified_base 20: mod_base = OTHER; note = 2'-O-methyladenosine-3'-phosphate
  modified_base 21: mod_base = OTHER; note = 2'-O-methyluridine-3'-phosphate N-[tris(GalNAc-alkyl)-amidodecanoyl)]-4-hydroxyprolinol (Hyp-(GalNAc-alkyl)3)
tttccagcaaaactccctcat

SEQ ID NO: 3201 - RNA, 21 nt, synthetic construct
  source 1..21: mol_type = other RNA
  modified_base 1: mod_base = OTHER; note = 2'-O-methyluridine-3'-phosphorothioate
  modified_base 2: mod_base = OTHER; note = 2'-O-methyluridine-3'-phosphorothioate
  modified_base 3: mod_base = OTHER; note = 2'-O-methylcytidine-3'-phosphate
  modified_base 4: mod_base = OTHER; note = 2'-O-methylcytidine-3'-phosphate
  modified_base 5: mod_base = OTHER; note = 2'-O-methyladenosine-3'-phosphate
  modified_base 6: mod_base = OTHER; note = 2'-O-methylguanosine-3'-phosphate
  modified_base 7: mod_base = OTHER; note = 2'-fluorocytidine-3'-phosphate
  modified_base 8: mod_base = OTHER; note = 2'-O-methyladenosine-3'-phosphate
  modified_base 9: mod_base = OTHER; note = 2'-fluoroadenosine-3'-phosphate
  modified_base 10: mod_base = OTHER; note = 2'-fluoroadenosine-3'-phosphate
  modified_base 11: mod_base = OTHER; note = 2'-fluoroadenosine-3'-phosphate
  modified_base 12: mod_base = OTHER; note = 2'-O-methylcytidine-3'-phosphate
  modified_base 13: mod_base = OTHER; note = 2'-O-methyluridine-3'-phosphate
  modified_base 14: mod_base = OTHER; note = 2'-O-methylcytidine-3'-phosphate
  modified_base 15: mod_base = OTHER; note = 2'-O-methylcytidine-3'-phosphate
  modified_base 16: mod_base = OTHER; note = 2'-O-methylcytidine-3'-phosphate
  modified_base 17: mod_base = OTHER; note = 2'-O-methyluridine-3'-phosphate
  modified_base 18: mod_base = OTHER; note = 2'-O-methylcytidine-3'-phosphate
  modified_base 19: mod_base = OTHER; note = 2'-O-methyladenosine-3'-phosphate
  modified_base 20: mod_base = OTHER; note = 2'-O-methyladenosine-3'-phosphate
  modified_base 21: mod_base = OTHER; note = 2'-O-methyluridine-3'-phosphate N-[tris(GalNAc-alkyl)-amidodecanoyl)]-4-hydroxyprolinol (Hyp-(GalNAc-alkyl)3)
ttccagcaaaactccctcaat

SEQ ID NO: 3202 - RNA, 21 nt, synthetic construct
  source 1..21: mol_type = other RNA
  modified_base 1: mod_base = OTHER; note = 2'-O-methyluridine-3'-phosphorothioate
  modified_base 2: mod_base = OTHER; note = 2'-O-methylcytidine-3'-phosphorothioate
  modified_base 3: mod_base = OTHER; note = 2'-O-methylcytidine-3'-phosphate
  modified_base 4: mod_base = OTHER; note = 2'-O-methyladenosine-3'-phosphate
  modified_base 5: mod_base = OTHER; note = 2'-O-methylguanosine-3'-phosphate
  modified_base 6: mod_base = OTHER; note = 2'-O-methylcytidine-3'-phosphate
  modified_base 7: mod_base = OTHER; note = 2'-fluoroadenosine-3'-phosphate
  modified_base 8: mod_base = OTHER; note = 2'-O-methyladenosine-3'-phosphate
  modified_base 9: mod_base = OTHER; note = 2'-fluoroadenosine-3'-phosphate
  modified_base 10: mod_base = OTHER; note = 2'-fluoroadenosine-3'-phosphate
  modified_base 11: mod_base = OTHER; note = 2'-fluorocytidine-3'-phosphate
  modified_base 12: mod_base = OTHER; note = 2'-O-methyluridine-3'-phosphate
  modified_base 13: mod_base = OTHER; note = 2'-O-methylcytidine-3'-phosphate
  modified_base 14: mod_base = OTHER; note = 2'-O-methylcytidine-3'-phosphate
  modified_base 15: mod_base = OTHER; note = 2'-O-methylcytidine-3'-phosphate
  modified_base 16: mod_base = OTHER; note = 2'-O-methyluridine-3'-phosphate
  modified_base 17: mod_base = OTHER; note = 2'-O-methylcytidine-3'-phosphate
  modified_base 18: mod_base = OTHER; note = 2'-O-methyladenosine-3'-phosphate
  modified_base 19: mod_base = OTHER; note = 2'-O-methyladenosine-3'-phosphate
  modified_base 20: mod_base = OTHER; note = 2'-O-methylcytidine-3'-phosphate
  modified_base 21: mod_base = OTHER; note = 2'-O-methyluridine-3'-phosphate N-[tris(GalNAc-alkyl)-amidodecanoyl)]-4-hydroxyprolinol (Hyp-(GalNAc-alkyl)3)
tccagcaaaactccctcaact

(The sequence listing continues in the following parts.)
